United States Patent Application Publication US 2019/0348154 A1 - sequence listing, part 64

SEQ ID NO: 239275 - DNA, 258 bp, Klebsiella pneumoniae
atgaaaatagttttatcagtatcaaaatgtttatacataaacgatttagatcgcttacttccctgtaatcgtttttttgttcatttagattataagaatattaacaaaacagaatcatttgagatgaatagacacgacaaagaaagctacaaacttatctttgataagattgtagataatgacgtaatgcttgctattgatgaagacatctacagcgaagttatcgaaaacttactttattattcaaataagaaataa

SEQ ID NO: 239276 - DNA, 288 bp, Klebsiella pneumoniae
atgcgtaaatttatgttagcggcaggtcttgccaccctgctaacgggatgcggtgatgatggggtttacggcaactatatcaatcaacagtatggcgtcaggcttgatattcagaaagatgtgatcaagtttcgtgatggtgtttttaccgttaaaagctgggatgaaagcaagaaacctatttatatcgccaaaacacaaaacaaagatcttggatcttggacttttaaaatcgaaaaagtcaaagatggcgtagtctatcaaggtgctatttttaaaaggaactga

SEQ ID NO: 239277 - DNA, 327 bp, Klebsiella pneumoniae
atgcccgctaacgtagcgggttatgatgtgaagcaggctgagattgcttttgtcgccggggccgctgccgccatgatgaccaaaaccaacaaaatcagctatgtcggcggcatggagattccctcgatcgttaatgccggtaaagagttcggcaacggtgctcactatatcaatccgaaagtcgagaacctggtgagttacagcggtgattttgatgatgtttctaaagcccatgaagcgacgctcgccgccatcgcccaaggcgctgatattcattaccatatccttaacctcggtctgcgcggcttagaggtaagcgttaagtga

SEQ ID NO: 239278 - DNA, 285 bp, Klebsiella pneumoniae
atgcgtgtagaaatcagcattgccaaagagaaagccgcgaaaatgccaaaggggtcaatggaggccttgaaagacgaaatgacccgtcgaatcagcaagcaatatgacgacgttgaagtgatcgtgaaaacagccagtaatgatggactgagcgttttgtgggcgactgataaagaaatcgccaaagaatttgtagagaccactctaaaagacgcctgggagacggctgacgactggtttgtgtgttgcgttatgggtatagtgcctcccgactgtacggcatga

SEQ ID NO: 239279 - DNA, 126 bp, Klebsiella pneumoniae
atggaagtagccgaagtgaagcggctcaagtcacttgaagatgagaacgctcggctcaagaagctgcttgccgaagcaaggctggataaggaggcgcttcaggtggctctgggccgaaagttctga

SEQ ID NO: 239280 - DNA, 732 bp, Klebsiella pneumoniae
atggagcatgttctgattaccggtggaagccgaggcattggggccagcacggcgattgagtgtgcgcgtcgtggatttggcatcatccttacctggaacagcaagccggaagccgccagccaggtggttgagcgtattcaggccgacggggggcatacgttagggttgcagttaaacgtagaagatgccagcagctttcctcagtttcgttctgttctcgagggcgcaatggaatcacacaggggaaccagagaacttcacgggctggtaaacaatgcagggtatggtctttataatcccatagagacagtcactgaagcacagtccgacagcttaatgaacgtccatttgaaagggcctttcttccttacccagaagctgctaccacttctacaaccgaatgccgcaattgttaatctcaccagcgccaccacccgcgtggcaaccgccggtgtagcgccctatgcaacattcaagggtggccttgaggatatggcgaaagagtttggtgaaaggaagatctggatcaatgccgtgtcacccggtccaattcgtactgagctggttggcggtttaagtgatgaattcgaagcattgctggccgggcaaacagtccttggccgaattggcgagcctgacgaagttgcccgtgttatcgccggtttactgtctgccgactatggctggattaatgcccagacgatagaagtcgcgggtggttataatatctaa

SEQ ID NO: 239281 - DNA, 426 bp, Klebsiella pneumoniae
atgctggatcatatatttattaccgtaagcgatactgagcgtgcaatcgttttttatgagcgtgttctgccccttctcggcatcaccaatcgtcacgataatgacggcagcaatggcccatcaggccatcctgacctcaagggatttggtgctaatggacgcgtatttttctggctaagatcgggcacgccttctcttcagaccgtgcatgtcgggtttgtggcagattcagaaatcatggtcaaacaggcttatgctgaggccatcgccgcgggtgctgcggagattcactcacagcaaattatcgttgatcccatgctcacgagcgagttgcgctacggagatctctggtcgatgcgagagttcaaccattttgattttgaactcaacgggataattagggctctttttacgcactgcggttaa

SEQ ID NO: 239282 - DNA, 417 bp, Klebsiella pneumoniae
atgagcgacagtctgcacatcgtttgcccgcattgccaatccgtcaaccgcgtaccggcgggcaaactcgccgaccagcctaaccacccggaggatttgccggtcgttctggcaaaggtgcgcgcttaccaagaaaccccgtcggagcgattggagtgcgagtaccgcgttcgtcatcaatctggcgtttggatttgggtgcttgatcgcggccgttggctgggtgacgcgggcaggcaactgatagtcggtactctgttcgacatctcttctcgcaaggaaatggagcagcagttgctgcgtatggtgatcaccgacccctttgcttcacggttgaggaaacatgttcgcgcaaccgacatggctgcccggattggggggaggaattcgctgtgttgttggaagcggtatcgatag

SEQ ID NO: 239283 - DNA, 1881 bp, Klebsiella pneumoniae
atggaaaaaaagaatcaatggaataccggctactggatcgttgccctcctgctgttgttgagtttgcagagctactggcagacggcgaaaaccgtcgagccggtgccctacagcgagttcgagaaggagctggccgagggtcgcgtggccgaagtgctggtgtcggatcgtacggtgaccgggcacctgaagtcgccggacagccggggcaagacgacgatcgtggcaacgagagtcgaacccgatcttgccgatcgcctgtcgaagtacgacgtgccctatgcccgggtgttggagagcacctggctgcgcgatgtgctgtcgtggatcctgccagcggttgccttctttggcgtctggttcttcctgttccgccgcttcgccgagaagcagggcatgggcgggtttctcaacatcggtaagagccgcgccaaggtgttcgtggaaaagaacaccggtgtgacgttcgccgatgtcgcgggggtggatgaggccaaggcggagctgatcgagatcgtcgatttcctgaagaatccgcaggactatggccgtctcggggcgcgcatccccaagggtgtgctgctggtggggccgcccggcaccggcaagaccttgctggccaaggcggtcgccggtgaagcgggcgtaccatttttctccatctcgggttcggaattcgtcgagatgttcgtcggcgtgggcgcggcgcgggtgcgcgaccttttcgagcaggcccgcagccaggcgccggccatcatcttcatcgacgagctcgacgcgctgggccgtgcgcgcggcgtcggcggcccgatcggcggtcatgacgaacgcgagcagacgctcaaccagttgctgaccgagttggacggtttcgatgcctccgtagggctcatcattctggccgcgaccaaccggcccgaaatcctcgatcaggcgctcttgcgcgccggccgcttcgaccgccaggtgctggtggaccgccccgacaagaagggccggctcgacatcctgaaggtgcatgtcaagaaagtcatgctggcacccgaggtcgacctcgagcaggtggccgcgctgaccaccggcttctcgggggcggatctggccaatctggtcaacgaggcggcgctggccgcgacgcgccgccacgcgcaggccgtggagctgcaggacttcaccgccgccatcgagcgcatcgtggcggggctggaaaagaaaaaccacgtgctcaaccctaaggagcgcgagaccgtggcctatcacgagatgggccatgcgctggtggcgctggcgcttccgggcactgacccggtgcacaagatttccatcatcccgcgtggcatcggcgccttgggctacaccctgcagcgcccgaccgaagaccgttacctgatgacgcgcagcgatctggaacacaagatcgccgtgctcctgggcggacgagcggccgagaagctggtgtttggcgaactctccacgggggcggccgacgacctggcgcgggccaccgacatcgcccgcgacatgatcacccgcttcggtatggacgaaagcttgggctatatcgccttcgaggcgcagcggccgcgcttcctcgacacgcccgagttggccagcggcggctgccgggtggcggaatcgacccaggcgcgcatcgatcaggccatccgcgacatcgtgatgggcgtgttcgagcgcgcctacgggattctcgacgccaaccgcgcggtgctggagcgctgtgcccgcgagctcctggcgcgggaaaccctggatgaagccgatatccgccgcctgaccgaggggctccagcgcgccaccccggccacggcggccgaggcggcgctcccctcatcctcaacaccttcaggagcctcgacatga

SEQ ID NO: 239284 - DNA, 318 bp, Klebsiella pneumoniae
gtgctggacctgccacagcaagaaaacagcaacagagagaacccgatgaagagtttcaaaattgaatacgttgatggcgttttgaccgttctggagactgatggtcagtcacgaatgaatgaagccgtgcatggcatccattttgagcatgttcagggcggccgccaactgctgaaactgacgattgcgcatgatattgcaccggcaccggctgctgagtcggctcaggaacctttagtgggtgagctggtacaggatcaacaatctccgtttcccggcggtcatcgttcccgccatcgtaggggaggtaagcaatga

SEQ ID NO: 239285 - DNA, 1026 bp, Klebsiella pneumoniae
atggaagccctgggggatgattatggggtacaagagcgttttttccgtcagtactacaatgcgttcaagcctgagttaaaagatatcgtcaatgtaccagtagcgacgaaatctaatcttatacaaattttcgaaaaattgattgctcatgatccgcatcaattcctacaagctatgcgcagtcattctgactggtatgcgcagattgtagggaattgcgaagttccggatgaacctaaactaacaaaactgcttaaaagtctggatagaattcaaggcgctccttcttatctcttattgctaatgttgtttgccagacgacagaacttagcattgagcattgagcatattgaaaaagtggtcactttgctgatcaacttctttgtccgtaggaacactactgatgtgcctgctactcgggatttaaaccgcatatttatggagttaactgaaattctgcaaagctgccacggtgagcaggttgtcagtgcgattgctaataccctagggtctgtcagtacctctgatgagcatttccgccaagcgcttagtggcggtctatacgaagaaaatagctgggtctgccgctttatcctgtgtgctcttgaagaaagcatgatgaccaaggagaaccaagtagacctatgggcagtggaaggcaagcaatatgtgtggaccattgagcatgttttcccacaaggattaaacatccctgattcttgggtagatatgatagcggatggcgataaaacgttggcggagcaatatcgtcaaagccatgtgcataaacttggtaacttgactatctcgggatacaacagttctttagggaataagtgttttttggaaaaacgcgatcgtacgacccgggataaacgtcctgtaggctacaacaatggtttgtatctaaatcaggagctggctattactgagacttggtcaatagtgcaaattgagcaaagaacaaccgcgatggtagataaggcactaattctgtttagtttaccgggtgtcgtcgggagataa

SEQ ID NO: 239286 - DNA, 2037 bp, Klebsiella pneumoniae
atgcaagtaattgataaattgatagagcagctacggggtagtgcacattttaatcctgcggtgcaggaggccccagcagcggtgctatggacagatgaagcctgtcaatggcaaagtgccatgccattgattaaacaatttattccagagctgctcgaacttggtgattatcaaccagagcagcggactggtccggctatttggttgaagtgtgccattgctggggtgttggaagatgttatgttacctgaaggtcgtacaccaattatctatcttcccaaaattgggcgaaaagcgttgcgcgctatcgaagattgcccggactatttacgtcctttagcagaattacaatatcgtgggtgttggtgggcctataatacggcaggacgtgattggagtataagttcttttttgacaaacccacgagttgggcttgaattagacgtagcaaaagataaaaacacattagaaattatcccccaaatcttgaaggatcttttagaatcccgtgttgaagacttacaaggaaagcggttagaggttaaagattttcaatcattagtatttaatgatcctattaaagatctacttgggtggctgaataatcccgaagataagcgtaagcagtgggacgacaataaatggtcgcttttcagtaatacttgctcaagtcagtttggttatgaaccaacagatgctaattattctcaaatgctcgcatcccttttatctgcccaaggggcgtggcaagaagtgtggctgcgctttgaagataccgcacataacctatcaggattaatccttgtccttcgtgatgtaacccctgatttagctgctgatttaagtcattatcctattgaaaatactcgcgatgaaaaaagccttgccgatgcgcttgctggccttcctcaacttgatgtaaacaaagttagaggaactatctgttcactatatcaacagaataaagagcgcgaaagctggctttggtatcgattaggggaatctaaatacctcgagattttggcccatctggcaaaagtcgctgaattgacccagcaagtgttcaatcatcagtcaccggaagagatggcagagctatatcaggagtgcttctggcaagtcgatgctgcagcgttgcaggccatggcattggcaaaagaaccgggccaacaggaattagtcgcaaatgtattaaaactaatatattccccttggttgaacgaggtatcgcttaacttccaacagttggttaaaagaaaaggatatcccgggaatactgaaattaaggaagcgacagctacttaccaggttaaagggatggtagtgttttttgtagatggtttgcgttttgattgcgctaaagtattagagcgtaagcttactgcgcgtcatttgattgtcgataccaaaacacaatggagtgctctgccatctttaactgatacagcgaaagctgcggttactcctgttgctgcacttttgaacggtgcttatgacactcaggattttaagccttcagtagtggcaacgggtagtgagtttagtagctatcaattaaaaaaagcattggcacaacaggggtggcaataccttgaaggattggatactggtgagcctaatggcttagcgtggctacaaacaggtgacctggataacctgggacatcagcagcaaagaaaattacctcttggtattgatgatgttcttgaagaaatagctgatagggttagctatttgtttgaagctggatggaagcaaatccgtattgtcacggatcatggttggttatggcttccagatcaattacctaaagcagatcttgaaaaaccattggttcgtaagtacttatcaagatgtgctattctcaaggataatgccagtacgaatttgcctcaggtagagtggtattggaattcctcagtgtcacttgccatggctccaggcatcagtgcatttactgcgggagattactacaatcatggtggcctaagtttgcaagaatgcttgacacctgtaattaaagttactaaggactag

SEQ ID NO: 239287 - DNA, 1857 bp, Klebsiella pneumoniae
atgaataactcaaataagtatcgcaactatgtccagtgttcaatggctgaaaatacttttgaacaccaacgcaacgctgctgagaaagcatttactaaattgaactctggttcaaaagcagtgatccttgctgcggaaatgcagtcaggaaaatcaggtatcgctcttgcccttgcctgccttcagagactatctttacccgatgaattattggctaaccggaaatacttaaaagatactttatatcttgtgacaatggcagatctggcccttcaagagcaagcaaagcgtgaccttgccccctgcaaaaatgtcgttgttagtaacttcacaaatatagataatgcgcttaaatcggattttaagcgccaaccacctaagctcatcatcatcgatgagtgtcactatggttctggcattgatagtgttcgctatgaaaaggtatttaattacctggaacaagttaatgtagactgtaaagttgtatttatttccgcaactccatttagctcactctactcagctagcgaagattccattctacgtcacagcttcaatacgtctttggtatttcacaaagctagtgatgaatatcatggcattcgacaaatgcatcgcagtaaccagctggtcaaacttgatgatgatcaacgcgatttttgtgaagattcactgctacaaaagcgctttatacgccagtttaaagaacatcagggcgtaggctggtcactgattagggttccatcaagtcaagcaaacatagccaaacaagtactgattaatcaaggtgtagatgaagagcaaatcttaatcataggtcaaaagcttgttggcgttggcgatcacgaactctcatctatcgatgacttcaaacgagcgtacgaaacagcagcaatgtttgatgaaaagataatcgctataactgtggctggatttcgcgctggtattaactttggccaagaaatgaaaaacacgctaataaacacatgggatagctctattgccaatatagccgcagtggtgcaagccaacgttggcagagcatgtggataccaccagaatactcaggctaaacattttacaaacctggaagctgttcgagcgtattcagaactacttgatcatcttgaggccagcgatgaattgaatgatttcgatgggttacggtattcatttgaagatatttgtgcgaaatatcaagtcagaggctttgaccgaggaatgtttatcacccctttttctgaaactgtaatcaccaaaaaacgtgatgattcggaaacatttctaactcaaagctatctagtcattcctggaaaattgtctgagcccgaagttaatttcagcgcctataccaacgatccacagctgcttgaggcaatcaaattaattcgtgacgaattcctgaatgaaggaacgccctatcctaaatctggtcgtgcaatgcgaggtgatgatagaaactggataaaagctcagtgggtaaatggagtcacctataatgacttctcgccgagctgtgcgaagagcagagtgctggattttaattcacgcctggagctgggtgaagatgtagaattcaacttaattgttaaccctggtggcggagagaccactgctgacaaactcatagttgcgtgtgtattcagtatttataatctttctaaacaaaaagatgcttacaaacgtgccatggaccgagaggatatgcgggaaattagtgaagccttaggttgtgaatatgacgatacgattatggtgctctatcagcgcggaaactactctagtggagtgacagaacaaaaaaaagtaactacaaaacagctatctcgcatccgcaattccagcgtgttcaaatag

SEQ ID NO: 239288 - DNA, 1998 bp, Klebsiella pneumoniae
ttgaacgcacaagcacaaaaacatcgacaactagtactttctattcttcagagcgaagcgctacatcagcaccaagtaacagcagctaccaaagtatttgatgctttaactggcaatgtgcgagcagtagtgacagccgccgaaatgcaagcaggtaaatcaggcatttcgctagccctgtgttgcttacagcgattaagtctctccgagacagatatttgcaatcgtaagcagctaaaagacacactttacctggttacaatgcctgataccgccctcaaagaacaagctgaagaagacctcaagcttgccaagaatgttgtcgtcagtaattttgtgaacttcgaaaaggcattggaaaatgaatttaaaggcaatccacctaagctaattattattgatgaatgtcactatggctcaaatgtcactgctgttcgatacagtaggatcttcgactacctggaacaagagaacgatagttgtaaagtcgtcttcatctctgccacccccttcggtgctctctatggagcagagactgaatatcaagaagctctagaacttcaacaagaagccaagaatgataatgatgcagaactattaactcaagcccgaaatgttgctgaagcggccttaaaagactcaatcttgcgtcgagactttaacacccgcctggtattccacaaaactagcgatgaatactacggcgtccgagagatgctaatgaatagtaaggtcaaaggccttgaggatgaaagtcgtaatttcctttgcaagtccgttcaacgcgatgagtttgttcaacaatttctgagtcataaaggtatgggatggtcactcgtaagggtgcccgctggtttggcgatggaagctaagcagtttctcatatcgcaaggcatcgatgagaatgctgtttacattattggtaattcattagcaggggtaccagaagatgaacattgcagcattgagcaattcaaaaaggagtttgatgatgctcagttgttcgaagaaaaactaatcgctattactgttgctggagctcgagctggtatcaacttcggtgcgatgatgaaaaataatctcatctcgacgtgggatagtacagttgccagtgttgcagcagtggtgcaagccaacattggcagggcgtgtggttaccatgaaaacaactcttcaactcatttcactaacttaaatgcagctgaggcttatgcttgtatccttgaccatcttgaaaacacctgctctgaccaagcagcgtctgatttcgaagggttaaaagagttttttgaagatgtgtgccaggaataccatgtcaacggtttggatgttgggttaactatcaaatacaaacgtcgtcgcccaatcggtgatgttgaaacgtataaaactgatagctacattgctgtacccgcaaaacttcttgacgatgatgcagagttcaccgagtacacaaaagataagtatctttttcaggcgatcgatattattcgcaaagagttcacgattaaaggtgcgccaagcgtcaaaggtaatcgagctatgcgaggtaaaggcaagaactggatcaaggcacattgggtcaatggggatagttacaataaccccgagaaggcacgcgctgacggaactcaaaaagaaaaaactaaaacccacacccaacaaattgataatggggaatatttagagtttaaccgcgttgtagcacctggttccggagagttatctgaagataagtttgtggtagctaccatttttagcgtttacaacatttctcgccgaaatgtcgcaaagaaaattatgactcttgaagatgtttgggagatgtgcgactactttggtgttgagcatgatgacactctacttgttatctacaagcgcggtgagtatgaccttgaacgtactcttgctaagaaacagcacaacgaacttcctgagcagtcaggtgagcttagcgatgaatcccatttctctgacaaagtagaatctacttattaa

SEQ ID NO: 239289 - DNA, 141 bp, Klebsiella pneumoniae
atggccttactgatactgctgtgtcgttcttgcaccggtcaggcgacaattaccgtcgagtacgatagaagatttggcaaacatatttgggccccttaccgccagacgatgcgtagacgtcagccgtccctgttcgggtag

SEQ ID NO: 239290 - DNA, 876 bp, Klebsiella pneumoniae
atgaataaacctaacggccttcaggcctttgaacaaccgctcgcgtcgcttccgcgcacgcttcgccagcttattcttgaacgtatccagaacctgacccattacgagccggtgattggcatcatgggcaaaagtggtgctggtaaatcatctatttgcaacgaacttttccggggcgaggtgtccccggtgagtgacgtgaactcctgtactcgcgacgtactgcgcttccgattgcgcagcggtcgtcacagtctggtgattgtcgatttaccgggggtaggtgaaaacgggcggcgggatcaagaataccgtgccctgtaccgtcgaatcctgccggagttggacctagtgctgtgggtcattaaggccgatgatcgggcactaaccgtggacgagcagttctggcacggcgtgatgcaaccttataggcaaaaggtacagtttgtgattaaccaggccgacaaaatcgaaccctgttatgaatgggataccctcaccagcaaaccttcaccgcaccaactgggaaatcttaaagcgaagcaggctgcgattatggcgatgtttaaaccgtatcatccggtctgtgcggtgtcagcccgcactggatggggcattgaggagatggtggcagccatgatgcgctgtctgcctgaccgcgccaccagcccggtggtgacacaactgcaagggagactctgcacagagccggtaaagtcgcaggcccgtgacagtttcggtgacgctgtgggccgggtttttgatacggttgagtcatcgtcattcctgcctgcgccactgaaaacggtgattcgtaccgtgcgtgatgcggtggtgtcggtcgcacgggccgtctgggactggatattcttctga

SEQ ID NO: 239291 - DNA, 348 bp, Klebsiella pneumoniae; identical to SEQ ID NO: 183380

SEQ ID NO: 239292 - DNA, 1179 bp, Klebsiella pneumoniae
atgcaagataatattcataaaggaaccaccgccatctggggcggcgaagccgaagcctttgccgaaggcgcaatttgcgttccggttttcaactccgttaccttcaattacgatgatatggccgaatggttcgacgttgcccttggcaaaaaagccggccatatttattcccggaatactaacccaaccgttcgtcccttagaggaaaaaattgccctgctcgatggcggagaagatgccaccagtttttctaccggtatggctgcaatcagcaacaccttattttccttattaaaagcgcatgatcgtgtcgtagcgattaaagatacttacggcggcagcaataaaatttttatcgaattcctgccacggcagaatattgacgtaagcctgtgcgataccacggattttgataccattgaaaatgaaattaaaaaaggctgtcaggttctgtatctagaatcgccgactaacccgacgttaaaaattgtcgatatccaacgtctggcaaacgtcgcccatgaacacgggggtatcgttatcgtcgataacacgttcgccacgcctatcaatcaacgtccgttgacgttgggtgcggatttagtggtctacagcgccacgaaatatctgaatggccattcggatgtcatgggcgggctggtggtcggcaaaaaatctctgatccgcaccatctttcattatcgggaaattaccggcgccacgctccacgcccattcggcctatatgatcctgcgcggcatgaaaacgctggaattacgtatgcagagacataacgaaaacggcatgaagatcgccagctggctgtcggcgcatccgaaagtcgaacaggtcttttatcccggactgccgacgcacccgcattatgatatcgcgaaaaagcagatgcacggttttggcgggatgatgagcttctctcttaaagggggatttcccgccgtgattaccgttctggaaaacatgaagctggctcataaagccgccagtcttggctcggttggcacgctggttggccctccctgtacaaccagtcacgtggaattaacggccgaggaacgggctaacgccggcattcccgagggattgatccgctattccgccgggattgaaaatctcgaagacttgattgaggatctgcgccaggcactggatcgggtttag

SEQ ID NO: 239293 - DNA, 888 bp, Klebsiella pneumoniae
atgatccccatcaccgtcattaatcatggtcaggggaaaacggccttattaaccggtgccaatcatggcgatgaatatgaaggaccggttgcattaagtaaacttgccaatactatcgatattcagaatgttaacggccgcattattattgtgccgttcatgaatacaccggcatttttggcggcaacccgcacatcgccgattgatcatggcaatatgaaccgcagtttccctggcgtccctaacggtaccgtcacacaaaaaattgctgattatttccagcatactttattgccgttagccgatatcgtcattgatattcattccggcggtaaaaccctcgattttctgccgtttgccgccagccatattctgcaagataaagcgctgcaacaggaaaccgaacaattagttgcggcgttctcggcgccctattcgttgcaaatgctggaactggattccgtcggtatgtttgacaccgccgttgaagacgccgggaaaatttttgtcaccaccgaacttggcggcggcggctccagttccgcgaaaaccgtcgcgattgcggaacgtgggattaccaatgtgcttatccgtgcgggaattctgaatggcgaattacaattatcgcctaccgtatatttgaaacaagatgatagcgcttgtttcattaccagcgaacatgacggattatttgagatttgtcatgaccttggcgccatggtgaagaaaggtgatgtcgtggctcgtgttcatgatatgaaacgtaccggcgttaagccaatcgaatatacagcaaaatgctcaggactggtaaccggtaggcatttccccggggtgatccacagcggcgataatatgctggttattagtgaaatcgtcagcgcgtaa

SEQ ID NO: 239294 - DNA, 1191 bp, Klebsiella pneumoniae
atgaccgaggctaacatccagcttccctttacccgcgaagaataccagcggcgcttagccaaaacccgtgcagctatgcaggataagggaatcgaattactgatcgtaacggacccatcgaacatggcctggctgaccggttatgacggctggagcttctacgttcaccagtgcgtgctgttgccgctggaaggcgacccctattggtacgggcgggggcaggatgttaatggtgcgaaacgcaccgtttatatgcaggaagatcacctgattggctatcccgatttctatgttcagtcgcctgtccgccatcccatggattatctgtccaaagaggtgattgcggcccacggctgggagaaaatgaccattggcgtagaaatggataactactatttcagcgcgaaagcttttgcctctctgcaagcgcatcttcctgcagctcgctttgtggatgcgacggcgctggtaaactggcaacgggcagtgaaatcggcacaggaaatcgaatatatgcgggtcgccgcgcgtattgtcgaaagtatgcatacccggatttatgaacgtatcgagccgggcatgcgtaaatgcgacctggtggctgaaatttatgatagcggtatccgcggcgtcggcaattttggcggcgactatccggccatcgtcccgctattgccatcgggaaaagatgcctccgcacctcatttgacctgggatgattcgccgatcctgaataataccagcacctttttcgagatcgccggttgttataaacgctaccattgcccgatgtcgcgcaccatttatcttggcaagccgccgcaatttttccttgatgcggaaaaagcggttctcgaaggtactgaatgcgctctcgacgtcgccagagctggcaataccaccggggatatcgcgcggacattcttttccgtcttagaaaaatatggcattcataaagataaccgttgcggttatccgatcggcatcagttatcctcctgattggggcgaacggaccatgagcttacgtagtgatgatcatacagaacttcagccaggaatgaccttccatttcatgacaggactgtggatggatagctggggtttagaaattactgaaagtattttaattaccgatactggtgtcgaaactttctgcaattatccgcgtaaactctttattaaagattaa

SEQ ID NO: 239295 - DNA, 1410 bp, Klebsiella pneumoniae
atgaaatcatggggtacggcgctcagcaaaattcgtcctggcgagttcaaatttaaggtgcttgtcgacaccatcatccatgaaattgagaccgggaagcttgtcgatgggcaacgccttcccccgcaaaggaaagtagcggatgatctgaacattggtattcaaacgatcactaatgtttataaggaattaaaaagacagggattgattcgtggagaaaccggcagaggcagttttgtcacccggcgggctaccgataatgtcaattacgacatattggatcagcaacagcaaaccatgctggacttttccaatgcttgtcttatccgcaatgccgagcaggaaaaggcatggcgagacacctgcctgcaactgagccaggaacagtttcaaccctggattcatacgttcaggcccatcgccggtcttgagcctcaccggcaagccgccacccagtggttaaaggagaaaaccgggcttgatgtcgaaaccaaatccctactcatcaccaacggttgcgcagaagctatcgatctggcgctgtcatcgctggcggggccgaatgatcttgtgctgtgcgaaaggcttaccgatcatggcgttatcggtatgtcgcaggtgttgggatttaaattaaagggtttggaaatagatgaacacggcattattcccgatcattttgaagagctgtgcgacgaccagaaagtgaccgctttggtctgcacgccaaacctcaataaccccaccggagcgattatgccggagcaccgccggcggcaaattgctgaaattgccgcacgttacaatgtttatatcattgaagacgatgtctacggcgcgctattaagccagcaacaacgcccgcgccccatcgccacctgggcgcctgatctcactttttattgcaccagcttcaccaaaacggtccttaccggattacgcattggctacctcgtcatgccgccgaaactggccttacgcaccgaaagtatattgcgcgtaaccagctggatggcctcgccgatactggcggaaatcgcatcgcgttgggtaatggatggcacggcaaaccatcttattgaaggacaaaagaaattaatcagtaaacggcaggcgctggtcaggaaatattttgctaaatatttgtcaggcggcagccctcaggcattgagttgctggataaacatccccgaacactggcagcccgatcatctcacggcagaactacgcaaaagacaggtcgccgtttcgtcatcctcgcccttttcggccgataaaaccgccatcactcatgccattcgggtatgtattggtgcagactgcagcgatgcgcaattcgagcaagggctattgacgatttacgacttgttcaaccaatatccgcagatacaacctgccgacgttgtataa

SEQ ID NO: 239296 - DNA, 855 bp, Klebsiella pneumoniae; identical to SEQ ID NO: 183385

SEQ ID NO: 239297 - DNA, 690 bp, Klebsiella pneumoniae; identical to SEQ ID NO: 183386

SEQ ID NO: 239298 - DNA, 657 bp, Klebsiella pneumoniae
atgaacttttttgactggcaatacacatgggaaattttcccgctgatgatgcaggcgtcgatcaagacaatttatatcaccctcatcggctatgtcatcgcgttagtgctggggttatttctggcgatggcgcggcgtagcgcttaccgctggctggcattcccggcgaccggggtgattgagtttattcgtagtacgcccttattaattcaggtttactttatattctatgttctgcctaactatggcctgaatatttcggcaacccaggctgggatcatcggtatcgggctgcattatgcctgttataccgccgaggtctatcgttcaggatttaatggcatcccgaccgggcaatgggaagcgattaaagcgctgaatatcccggggcgagccgcctatctggatatcattttcccgcaagttatcaggccggtagtgccggcgctgggtaactattttattgcgatgtttaaagataccccggtgttatcagcaataaccgttgtggaaattatgcaagaagcaaaaaacattggttcagagaatttccgttacctcgaaccgataaccctggtggggtgcttcttcctgaccattagcatcgtgctggccattctttttaataagatagaaaagaaagtcgccttaccataa

SEQ ID NO: 239299 - DNA, 783 bp, Klebsiella pneumoniae
atgaatgttgcacaaaaaccagacagccaaccgttagttcgctttaatcatgtcgataaatattttggcgacctgcgggtattaaacgatctcaatctggcggttgccccggcggaaaaactggcgattattggccccagcggttcggggaaatccaccgtattgcgcgccttgatgaccctggaaaaaataaactccggaaccattgaggtggagggggagttactgacgcatatccacaaaaatgggcaactggtgaccgcgccggaaaagcatattcggcagataagaaaaaagatcggcatggtgtttcagagcttcaatctgtttccgcatatgaccgttatgaaaaacgtcatcgaagcgccgatcaaagcgttgggcttatcgaaagcggaagcggaagaacgcgccgtcagtttgctgcaaatggtcgggttgatgggtaaagccgatttgtatccttcgcagctttccggcgggcaacagcaacgggtggcgatcgcccgggcgctggtcatgcgcccgaaaatcatgttgtttgacgaagtgacatcggcgctggacccggaattatgcaacgaagtgctgaatgtcattcggcaattaggcgaacaacataagttgacgatgattatggtgacgcatcagatggggttcgtgaaagagtttgccgatcgagtctgttttttttgccatggcaatattctggaacagggaacgccggatgacctattcaatcgcccgcaaagcgaacggttacagcaatttctaaatgaataa

SEQ ID NO: 239300 - DNA, 1020 bp, Klebsiella pneumoniae
atggcaaataacgtctcttcagacattgatatcgcggagttttatgctgcccgggagcgtatttatcctctggcgctggccaccccgttgatctattcccgcagtttatccgatctgttttctgcgcaaatttatctgaaatgcgaacaatttcagccgacgggggcgtttaaaattcgcggcgccgccaatacgattctcggcgagctgcaaaaaaatgagcaacggatcaggcgcaatggcgtggtcaccgcgtcgactggcaaccacgggcgagccgtttcttatgtggcgaaaaagctggggatcccggcgacggtctatctttcttctctggtgccggaaaataaagtccgcaatatcgaactggaaggcagccgggtagtgcgtgttggcgccagccaggatgatgcgatggccgaagtgaaacgcgcggtggcggaattcggcatgatagaaattccgccctttgatcatccgtcgattattgccggacagggaaccatcgccttcgaactgaatgaacagctcaacgacattgattatatctttagcggactttccggcggcggattgcttggtggcatcggtctggcgatgaaacaccttgctccacaaacccatatcgtcggcgtgagcctggcgcagggcgcggcgatgtgggaaagcctgaaggcgggcaaaccggtgatggttgaagaggtcgccagcgtggcagattcgctgggcggcggcattggcatggataaccgctggacgttgccggctgtgaaacaggtgatggatcagcatttccaggtgagcgacgattatatcgccgccgcgctgctgttgctgttcgaaaaagagaaaattttggtcgaaggggcggcggcggtgggtcttgcggcgctattgcaatatcgtccggacatcaaaggccgtaaggtcgtcctgattttaagcggcaatagtattgccaccgcgacgttgccggctttacggcaacgggcagtgaatgtggatgaggtagggcaatga

SEQ ID NO: 239301 - DNA, 231 bp, Klebsiella pneumoniae; identical to SEQ ID NO: 182601

SEQ ID NO: 239302 - DNA, 798 bp, Klebsiella pneumoniae
atgattaaatcagtatttaactatccggtgtcaaccttgttggatattgaagcaggggtggtatatgccatcccacgttaccaacgagagtacacctggggtaaatggcaatgggatgccttgtttgaggatctattagaaaacgaccttaattactacttgggatcgattatctgtatcaaccaaagtacagatacgctggctctgcagcagttagagttagtggatggccaacagcgaatgaccacattgtcattattgttagctgccatttatgcaagctacaaccagttaggcattgaacttgagatggaacagcagatagagctgtataacctgaagcataaattggtgctgaaaaagaatgcggaccagccccgattagtacctcaggtgcaaaatgccaaccagcaggattacctggcggtgttgaaagaggcaggcattcttaaagaagctgagtgggtttccaatgcaggtaatcgtcgggtatttcgtgcctatcgacattttttaatgcgtattgaacagtatgtcagtgagagcgaaaccccattgcaggcactgaatgcgctacttgataaagtcaatgcatctactctggtaaaaatagaggtggcaagtcattcagatgcttacaccctgtttgagtcacttaacaatcgcggtgtgcctcttaccgcgattgatttaatgaaaaacaagctactggcgaagatcgaacagattgagccgggcagtattgataagtcttttatcagctggacggctttgttgaataaatcgaacttttgctga

SEQ ID NO: 239303 - DNA, 3465 bp, Klebsiella pneumoniae
atgcgaaagtcactggataaaacgcttagaaatcaactggaaaaagtcgttgtcagggcccgagaactgatagaaaaagctgcatcagaagcattaatacgtttaggggtggagacggcggaagctccggcatacctgaatgataatgagcgtaagctgcgtaaccgcctgcgagcccatgcccgtcagttgggagacaagctgcagtctaatggtgtgcagggaactgaacgcctgcgggcggaggttagctatgagcactggcatcgtatgttgtttgcccggtttttggagcaaaacaatctgctaatgctggataaatatcttgctgtcacgttgagcgactgtcaggaatatgctgaagaagaaggttgtaaagatggctgggaactggccggcaagcttgctcagagaatgctgcctcaggtatttagggtcgattcccccatatttgagctgcaaattcccgtcgaccgcattcgtgaattagaggatttgattctgacacttcctggtgcggtgtttcaggcccaggatagcctgggatggtgttaccagttctggcaaagcaaacgtaaagacgaagtaaatgcggcgggtattccgattggtgcggatgagttaagcccggtcacacagctgtttaccgaaccttatatggtgagtttcctgctggataacagcctgggggcgtggtgggcgaaaaaacagctgacggatgcggatttacgctcggccagtgatgagaaaagcttgcgtcaggctgccgctatcgagggtgtgccgctggaatatctgcgttttgttaaaaccagcgatgagcagggtgagttgtggcaagccgccggcggctggtttgatggctggccacaggaagttcgtgcactgaaaacgctggatccgtgctgtggttcagggcattttctggttgcattattcctgatgctggtgccaatgcgtatgcagcttgaaggacttgatgccagaagcgctgtagataaggtgcttgctgataaccttcatggccttgaacttgacagccgctgtgtggagattgctgcctttgcgctggcgctggaggcttggcgatatcccaatgccggaggttaccgtaccctccctgcactaaatattgcctgctcagggctggatgtcagcgcagctacccaagaatggctggcacttgctaaacacaatccggatatcagcgaggcacttaattggtttacccgaaccttcaaagatgctccggtgctgggcagcctgattgacgtcaatacggcttattacgaaggaaaaactgaaggcaaagcctccccctggcaggttctcctggatgcgaaagttgcaacagatgatgaagcaaaaacagcccaagtaacagctcagggcttagcaatgacagcaaaactattgtcagaaaggtataacctggtagctactaacgtgccttatctggcacgtggtaaacagtgcgaggcgcttaaagagttttgtgagaactattttcctgaagcaaaagccgacttggctacggtgttcttggagcgctgtacaggtttcaccccaatcggcggtacttcaacaatcgtcttaccgcagaactggcttttcctgacgagctacaagaggttcagagaaaagttgctaacagaagagacttggaatctgatagctcgtttggggccaagggcgtttgaaactatttcaggtgaggtggttcaggcgattttgattattctcactaagggaacagcaattaatggagctttgctgcatagtgtcgatgtatccgcaccaaaaactgtgtcagaaaaagcagggaagttgcttgaagaggttttacaaactgttgaacaattaaagcaattggataatccggattgtgtgattattttagcggaatcatctgcttcttctctgttaagggacgatgcaaaagggttggcaggtattctaaatggggattccccgcgatttcagcgccaattttgggagtttaattgtaaaggagaggatttcgtatatcagcaaagtaccgtttcaacgttcattcactttggggggcttgataaggttattgagtatgatgatacaaatggccatatgcgtttacctgctgaatatcgtagagacaggcttcacgattctgatcaaagagggaattctgcatggggtcgatggggggtggcaattagccaaatgagagagcttcctgcagcactctatattggtaacaagtttgactcgaatattggagttctgttacccaaaaataataatgtgcttgctgcactttggtgttactgctctagccttgattataataaagaagtacgtttaattgatcagaaattaaatgtaactaatgcgaccttagtaaaagttccgtttgagtttgaacactggtcaatagtagcaaaacagaaatatcccaatggtcttcctaaaccctacaccaatgaccctactcagtggatttaccacggccatccctgtggctctgttatctgggatgaagaaaaaaaatggactgctatcgctgataagcgaaccgacgagacagtactacaagttgcggttgctcgccttttgggttaccggtggccagcagagctggatgacaaaatggagctggctgatgagatgctttactggcttggtaaatctgatgaactgcttaaactcgtggatgatgatggtatagtctgcctgccagcacttcgcggggaaaaagccgccgcttctcgcctggaggccatgctgcaggctgcctacgaagaggactggtcatccagtgttcttagtgatctgcttgccagtgttggtagtaagagccttgaaacctggctgcgggataaattctttgaacaacattgcaaactcttccagcaccgcccgtttatctggcaaatctgggatggtcttaaagatggattctcagtactggtcaactaccataagctcaattaccagggtttggaacgcctgatttatacctatcttggggactggatccgtactcaggagcacggtttcaaagaaggcattgatggtgcagaaagtcgtttgatggcggctaaaaacctcaaagactcgctggaagccatccttaaaggagatgccatcaccggcaagagtggtctcgacatttttgtgcgctggaaaccgttacacgaacagcctatgggctggaacccggacttaaatgatggtgtgcgccttaatattcgtccgtttatgcaggcacgggatgtggataagaagggggccggtgttttacgcactaagcccaatattaagtggggtaaagatcgcggcaacgacgttgaatcggccccctggtattatctgggcctgcagtatggtgaaaaagagggggcgcgtatcaatgaccaccatatcagtcttgcagataaacaaggtgccagagacgaacatgcaaataaggaaaatcacggatga

SEQ ID NO: 239304 - DNA, 3474 bp, Klebsiella pneumoniae
atgctaaaccgcgaaatttataaacttgaccctctggaaagcaaattggccaacaacggtgtggctgaggtaaaagatgatctctccaaaggggctcttgaaacattagattatgagctgcggacgtttgtctgtagcggggcttatgccaaaggcatggctgatattcttagcaactacttacgaaacgttaaaagttctggtgaacaacctgcagtttggatttcaggctttttcggttctgggaaatcgcatctagctaaaatgctcagaaccctttgggtgaatcagaaaatggagagcggagcagatgctcgctcattggttgagttacccgatgatgtacgacaatattttgacgaactttcaacattgggaagtcgactgggaggacttcatgccgcgtcaggaactttgggggcgggagcagaagacaaagttcgattagccttgttggcgatcattttcaaatcagctgggttgtctgagcaatatcatcttgcccaatttgaactttggttaagatctgaaggggtgcttgagcaagtaaaagcttacatccaacagcatgccaaaggtaaagaaggcgaagacctttggaagaaagaactgcgcaatctccatgtttcaccagtcatggcgaatgcgctgttacatgctttaccatctcttggaagtgatgctaaagaagtacgagatatgctgcgtgcgcaatataaaattgttgatgatgtatcaaatacggaaatggttcagtcgattgttgatgcattgtcaaatgaaggcgaaatgcccttaactttggttgttcttgacgaggttcagcagtatatcgctgatgatccagatcgtgctcatcttgtgcaagagaccgttgaaacatgctgtaaagctggcgcacttaagtcgaaattgcttttcgtcgccacagggcaaagtgccttatccgggttgcaaaacctgcaacgccttatggggcgtttccagatttctgttcagcttgaggatactgatgtcgatgcggtaatccggaaagttattctccagaagaaagaaactgccagagctgagatcgaatccgtggtacatcataacctcggtgagattaatcgtcatatgagtggttctgttattgaagctcataaagacgatgaaaaatggatggttgcagactatccgttactgccagtgcgtcgtcgtttctgggagcgagtccttcctgcgctggataaaaccggaaccggatcccaactacgaaatcagttacgtgtagtgcatgaggccacaaaatctacggcgcttaaaccgttgggttcagttgtccctgccgattttatctatgaacaaattgcaatcaacctgctacaaacgggtgttattggcaaagagatctacgaaaagatagctcgcttcaaggctggggacgaagatgaagtcctccagggtagagtgctttcgttgatactactcattagtaaactaccaacagatatcaatcacggtattgcctcaacggaagctttcctcgctgatttgcttctggaacatttaagtgatggtaagcatgaactgagagcaaaattgccacatttaattcaacaactggttgatgacggcgacttactgccaatgaatactagtgcaggtgttgaatacaggttgcaaacgcttgaaagccagcagtggcatgatactttcaaacaacaacaaaatgatctacgcggtaacccacagcgtttagaaacgttccgcagcctcgaaataaaaaaccgtgttaacactgccctagggtttggtagcgtgaatcaaggggtcagtaacgaaccccgtaagatcaccgtgtgtttcgatcaggatcttcctgccgatgctaaaaaaaatctctatgctcatgtacttgaatgtaaagaaaaagctttcgaggatgcagtgcgtagtgcgaaccctgatgacgccactattttcattcatgttccatccattcgccgtaatgagctactgagcgcaattgtcgattttaaagcggcggaaacaactctggaagtgagtgggataccctctacggatgcgggtaaagacgctcgcgctgcaatggagcaccggaagtatgaagctgagcgcaccaagaaactgatccttaaagaaattattgatggtatccaggtacaaatggctggtgggagcgaagtacttggtgacacgctagttgagcagttccagaatgcaggtaagaaagcatgtgaacggctctatacagagtttaagcaagcagatcaaagaggttgggataaggtatttgagcgtgcaagtaaattcgctgatgccaatgctctggaagctgtaggccataatgatgaagtggaaaagcaccctgtctgtgtcgccattaaacgctatatcggtgttgcaaaaactgggggagagatacgagaaaactttatgtctgctcctttcggctggccgaaagataccgttgacggcgctctttttaccatgttggctgctggtgtattgaaagcaagcgactctcaggaaaaatcagtcgatgcgaaaagtttggagcgcagcaaagtctctcaaaccaactttcggcctgaaaccgttagcttgacgccgcggcagttggcaggcattcgaagtttgatccatgcgattggtttgaactgcaccaatggtgaagagcaatccaaattaagagatgcgatagaaaccgccaagcaattggctcgtaaagcgggaggcgacgccccattaccattaccaccaaaagcagaattacttgttgaagttgaaaggctttctggtaatgaacagctaatggctgctttcgaacgacatcgcgatattatcgatgaagtggagagttggaaagggcttgctgaaaaagtgttcgtcagacaagctcgctggggcgaactaaaatcggcgcttaagtattgccaaaatttagttggttttgacgagctcatgaacgaggtgcatgcgattgagcaaaaccgaagtctgttagccgatcctgatccagtacagccgttgctgaagcaggtaattgaaaaaattcgcgttgcgattttgaaaaagtacgaagattttcaaactgaatataacgagtgtctaaaggaattgcatgaagatgcaatctggagccagctttctacagagcagcaggagcgattgctgacaaagcatcatctggataacctggaaatgtcaccgttatctgataacgacagagtgctcgattgtattgaaaatacctcgttagaacagtggagtgataaaacgtctgctttggcaggtcgttttagccgtatgcggcaggatgcggttgatatgttagtgcctaaagcaaaaatcgtacttttaccaaaatcagtcattgaaacagaggctgagctcgattcctggttggcaaaagttagacaagaagttatgtccgctttaactgaaaatcgtcctgcatcgttgaaataa

SEQ ID NO: 239305 - DNA, 543 bp, Klebsiella pneumoniae
atgtctgacagattgtcaaaattactgaaaagtttttccagtcacatcagtgtgccatggggtaacaatatctcagctgaagagaaagctatctttgtcgtatatgacaaagaggatgagcttaagcttcgtgctcgcatgactgaatttgagcatgcatgcatcgaaagcgagcacccatggctgttgttggacttgaccaatgagttcccctactggatggccagacaggactacaaagaggcttatttcgaagatccagagtatctggaaggaagctatgactattttgctgaagagcttgtgtcgaaactccatgagcagattaatgcgcaccaaacacctgaatctgtagtggctcttatgggatgtgggaccatgttcggctttgtatcagtctccgctttagttaaatctttaacgactcaagtacagggacgcttggtggtatttttccccggagaatatcatgagaataactacaaactgctcgatgccaaagatggctggggatatcaagccactgcgatcaccatagcttaa

SEQ ID NO: 239306 - DNA, 762 bp, Klebsiella pneumoniae
atgaaccatgagcagttagttcagtatggattcaagtttggaaaaaatggacctcatgcagcgcgttgcatgatgatcgaagaattgaagatattgctccaggcacggcctaacaacaccttacaagaagaatatagggtaagcattgtggatgacaatattcttcataaacccagttctagtgccaggaaactaacttatcggcacatggttggtctttatgggatgtctccgcacatacctttgttcaaattttttcgtcaactttgggagctatctgaagaagctcagcctctactcgcactgcaattggctattgcaagagatccactacttcgagaatctgttggggtcattacggcacttaagcctgggcaaatcttacccagaagcgttatggaagaacacttagcaaaagacgatccagatcgatttagtcaggcatcacttcagtcatttgctcgaaacattagtggcacatggactcaatcaggttatctttcgggtaaggttaaaaaacaacgtactgacccaaaagtaacgtatgtgaacgtggtttttgctctacttcttgggcacttccaggggctttcaggtaaacgtttgtttgatagcttttggatgaaactattaccagttgatgaaacaactttgtacgagcttgcatatagagcaactttgcgcggcctgattaatttcaaacaagccagtgaggtcgttgaagtgtcttttgcacctctgaatctcctagttaaggaataa

SEQ ID NO: 239307 - DNA, 141 bp, Klebsiella pneumoniae
atgaaagaagggttatgtcttaatggtcatagccctttttcttggctaaagcagataagaattaagtcagaatttaaactgatgtttattaaacaattgattaataaggaaattataaaataccttaaaacaggaaaataa

SEQ ID NO: 239308 - DNA, 201 bp, Klebsiella pneumoniae
atgacaacaagaaaacttattcgcttgccagaagtgatgaataaaacaggatttagcaaagcatggatctatagacttattagtaagggtgattttcctaagccgattaagattggaataagagcctgtgcctttgttgaaagtgagattgatgaatggattgaacaactgatctattcatcacgcaatacagcagcataa

SEQ ID NO: 239309 - DNA, 276 bp, Klebsiella pneumoniae
atgaaaaaagaaaataagtgtaatagtcagaactcagcagaacttacagcattgttagaatactctcgctttaccaagaaagtgcttgcgaagcctgctaatgaagtattcgatctatttactgacaagtattatatggaaactgtttacgatgatattattgataaaacgaagaagagtattgatcaaagtcagcatagattcatagattttgaagaggttagaataaatataatgtgtatgcatacagaggccattatgatttgttatatgtga

SEQ ID NO: 239310 - DNA, 270 bp, Klebsiella pneumoniae
gtggcttccgtctgttgtccctcctgttctgctacccagggcgtggtgcgtaacggcaaaagcactgccggacatcagcgctatctctgctctcactgccgtaaaacatggcaactgcagttcacatacaccgcttctcaacccggtacgcaccagaaaatcattgatatggccatgaatggtgttggatgccgggcaaccgcccgcattatgggcgttggcctcaacacgattttacgtcacttaaaaaactcaggccgcagtcggtaa

SEQ ID NO: 239311 - DNA, 294 bp, Klebsiella pneumoniae
gtggcgcacgtcttcggtgaacgcactctggccacactggagcgtcttctgagcctgctgtcggcctttgaggtggtggtatggatgacggatggctggccgctgtatgaatcccgcctgaagggaaagctgcacgtaatcagcaagcgatatacgcagcgaattgagcggcttaacctgaatctgaggcagcacctggcacggctgggacggaagtcgctgtcgttctcaaaatcggtggagctgcatgacaaagtcatcgggcattatctgaacataaaacactatcaataa

SEQ ID NO: 239312 - DNA, 924 bp, Klebsiella pneumoniae
atgctccttaatctaaatgaatttgagtttagtattggagcaatgagcgttccatttttctttattgtatctggttttataatggcttatatacaatcaaatagggaaggagggtttattgaattcatcaagaatagaattattcgaataatcccactctattatttattcacaaccataattttattcatttacttaataaaaccacacttagtttattattcccaccatccaacaatatccatatttggttcgtacactctataccctgtccatgacacttccatgctgttaaatccagggtggacattacgaccagagctaactttttatttaatattcggtttatctttaaccttttttaaaaaatacactcacgctcttgatttcgtgatattgtcttcaatcacattatctacatcgacactatttttttcgaatgagatattttcagcgtatgccgatcatctttatatttttgcctttggcgtgttaatttacagattaagttcaaggtttaatatactgagttttttttcaaaaaaaatatttatcttcatattctttggcttgctttgctttgttttaagcataaaccaagaggcaaatgtattgtcagtaacaataatgtcgctcttttttatttccatagtggctaacgagaaaaacataaatcataacaatgttatagcgaagtttttttacttattaggtggagcttcatactcgatatacctgacacatgtcttttcaattggtttaatttcattcttgttcacacgttatcactttagctcaatctcatttaatcttttaagtatatcattatcaattttcgttggggttttatcttatcgaatggtagagatacctctgatttccaccattcgaaaaataaataaaaaaaaacccaaagaccactaa

SEQ ID NO: 239313 - DNA, 267 bp, Klebsiella pneumoniae
atggatttacaatacccgcgttcgaaaacaagcctatatcagataacagcccttttgcggagttcttttttacatcccgaacatacgttgatatattctaagtcagtatacactccgctagtgctacgtgactggttcagggctgcgccccgaaacctgctaacaacctctcagctactggatatcaccccatgccgtctgaacatgatgaacaacgggatgctgctgatacgcagctccccagcgagtatgacctttttgatttaa

SEQ ID NO: 239314 - DNA, 822 bp, Klebsiella pneumoniae
gtggtgaaaaatcggcttgaaatcaggaatctcaatcactcatttatcaagactaatgatgaagagatccgcatttttcagaaccttaaattcacaatcggtagggcggaaatcgtcgcgattgtgggccgaagtggggcagggaaaagtacgcttttcaatttgatttccggactgcttaaaccgagcgcgggtaaaattgaactagctccgcgtgaggatggcagtccaggcagtattgcctacatgctgcaaaaggatttactgctgccgtggcggaccattttggaaaacgcagtgttaggtatcgaactccagcgcgatgtcacaccggcagatcgtacgcgcgcgactgccatgctggcgagatacggactggaatccgtcgcgcatgcttaccctcattccttatcgggcggaatgaaacaacgtgtcgcactgtgtcggactctgcttgctgatccaacggtggtattgctcgatgaacccttttcggcactggattatgaaacccgactcatgttggaaaatgatgtcctgcatctgactcaaaccgaggggaccagcgtcattttagttacccatgacattgatgaagccattgcaatgagtaaccgtatcgttgtattgggaggccggccggcaaacatcattcttgaagaacacgtggtgctgaatgtaccgggaagcaatggattgcgagacgcgattaccgcacgcggtgccgctgaatttcctctctaccataaacggatttggagtgcgcttcgtgataatgatgtcgctcactcggccaatgcgacagggaaccctatctcatga

SEQ ID NO: 239315 - DNA, 765 bp, Klebsiella pneumoniae
atgaagaaaaagagcaatggtgctaccgcaattgtgactgccattcttctggtattggtggcgttgtgggagttggctgcgcaggttggattaattaatggacagttattaggatcgcccgtcggcatttttaactccgccgttatcggctttacgcaggggcaattgcttaacgatacgtgggtaacttttgttgaaacggcgcttggcctggttacaggcagcgtactcggtatcatcctgggtctggttctttggttctatcctcgactttctgacatcgttaaacagttttcaatgctgctaaacagcattcccaaaattgcgcttggtccgctgatcatcatctggtttggttcgggaatgatttcaaaagtctggctggcgggtatctcaacttttgccgtcgccatgatctcctcctgtgctgcggcagaagaagttgataaggatctgcttaatcttttccgctcattcaaggcacagaaatcaatgatttttaagaagttgatcttgccggcttccgttccctggatcttctccatttttcgcatcaacatcggttttgccctcatcggggctgttgttggcgagttcatcgcctctgaaaacgggctgggccacgccgtgtttgtcgcgggttcgctgtttgacctcaatacagtctggctgggtgtcattattttgacgctgatggctgccgttcttacctggattgttcaattaatcgaagagagggtcgtttcatggaaaatcgcgcaataa

SEQ ID NO: 239316 - DNA, 993 bp, Klebsiella pneumoniae
atggaaaatcgcgcaataaaatttatccgtcatacgcttgcccccgtgctcgtcaccgccagtttgagttgtttggctgtgcagcctgctaatgcccaggagaaagtggttattttccaggcattccagtccattcaatatcttcctttatatgtcgcaatggatgaagggctgttcagcaagcgtggactggatgtcaaaaaagtcaccgctggtggcggcgcgcaaggtgtcgctgcggtcattggcggtcacgctgatttctccctacaggatcccatgacagcagtactggccaaccttaaaggagcctctcttgtcaatgttgcgatggtggtttcaggcgtgcctgtgtggatggttgcgccaaaagatgccccgattaatgacatctcaggtgttaaaagtcagacgatttcttcggctatcccgccttcgaccagtacttacttactgcagaatttgcttaaagagcgcggtttaacggacgtcaaactcaacaccgtagcaattggtaccgaaatatcgcctgtggcagcgcatcgtgccgacatcgcgacgctctatcagccgcaggtcgaacaggcattatccaatggttataagatcgtttatgactttgccaaacaatataacggcgtgttcgcgttttcgacgattgatacgctgaaatcgaccgtagagaaacgaccagaaatggtgcaaaagttcgtcagcgccatcgctgaagcagagtcattaatgcagaagtcacccgatgttgcataccgggtagctggcacagagttcacttcgctggataagagcgtcgttcagtccgccgtaaaacgtatgctcgaacaaaaaatttacccggcaacgccttccatctccaaagaagccttccaggcaggtctggatctgcaggtctctattggcaacattaaaccgggacaagtgagctgggaagatgccgtggataaccgctttgctgaccaggcgggcaatcattaa

SEQ ID NO: 239317 - DNA, 1269 bp, Klebsiella pneumoniae
atgactatctcaacccctaaagaaattcctgcacggctgagcgctgccataaaggcagctgacgctattgataacacgctgaaatcgtttgtttatcgcccggcagattatgcatcgcaattaacactggctgtaagtgggcctttggcatgtgtacccatcgctattaaagatctgattgataccgcagatatgccaaccacttacggctcacgtacattcgaagatcatcagccgaccagggatgcctggattgttgccaaactgagagaggcgggagccatcatttttggcaaaacggtgactaccgaatttgcctggcgggatgcgggtccgacggttaacccctggaatacggcgcacagtccaggaggatcgtccagtggttctgctgctgcggttggggctggaattgtcgatatcgcattgggaacccagacggtgggttccattattcgccctgcgtcttattgtggtgcttacggctacaaacccacctttggactgattccaaccgacggcgtgcatgatttagccgtatcactggatcacctcggatttattctctctgacctctattggggagcggtgtgccatgccgtcatcgtgcgaaatggggcgattacgtcgccatcatcgccggagcagttcgccatcggtgtcaagccccgcaaaattggtgtgtatcgatcttcgctatggtcatacgtagaatccgacgtacagcaaaacttcgaaggcgttatacgccggctgaacgcacagggcgtggagtgtgtcccggtcgatttctccgaagatttgccagcactgaacgcgttgacgaacaagattctggcgtatgaggccaacgttgctatcagtaacgatattaaaggacgcgaagagcgggtcggtgcgtatacgcgtgacctcatcgcttacggaaaaaccattagccgtcaggaatatgacgctctgcttattcagttgagtgatttacgagcggcacgcgacaatgcattcaccgatctcgatgcgataatcacgatcacctcaccgacaacagcgttgaaaggcctggagaaaaccggtgatgcctctttctgtatgccagcaaccttgctgggtctacctgcagtgagtgtgccgtgcggtatttcctctgattttctgccttatgggctgcaactaatagggcgtggtgacgatgatctcgcgcttctcaatattgcccaatgggttagcaccatattgccgacgctggtggttcctgcgattattgcgtaa

SEQ ID NO: 239318 - DNA, 675 bp, Klebsiella pneumoniae
atgccaaatgctttcaagacgctggaacaacgcgttcttaatcttctgcgaaatgacattctttccggtaaataccgtccgggtgaccggcttcgccaggatgaagtggctaagcgttttgatatcagcaccactcccgtgcgtgaggcgtttcgcggattgcgctcggaaggtttgatttccattgatgcgaataaaggcgtggtcgttaaagggttgtcgattgatgatgtcacggaaatttacgagctgcgcatcatgctggaaccgctgctggctaaaaaatcggtcagttcgataacgccggagtcgttgttactcgcagagcaaatccatgatgaaatgtgcaaagcaaccgatcctcataactggtcttcgctgaatcgtgattttcacgtccagctgatgagcagcgaatctcatacccgtctttatgagatggtaaagaatttattggtagtagcagaaccctacgtctctctctccatttttgttcatccggaaatattacagaccgacaatgacgaccatttcaacatccttgaggcttaccgacgaggagatgcaatgcaggttgaagagatcgtcaggaagcatttaactcacactttggaaactattcaggcttccgtcaacgaagacaggttaagccgattaatctcccctaaactgtaa

SEQ ID NO: 239319 - DNA, 330 bp, Klebsiella pneumoniae
atggatgttaaaaacgtgactcacacacagcacgacacacaaaaaacgatgaaacaagttagggcgaagaacctacggaaaggcgacagagtaagggtaagcggattgcccacactgaggggcgtcaccagagtcgcgatcgacggcgagctggtcgaggtatgggtagctggccgggaggtgccggtgtacgtcgggagagaggccatgatcgaatgctcccccgcaacctgggcgagggtaaccaagccgacgggtgcaggaaaacctgcaacccaccacgacaggccagccgcagagctggcttttttgtgtccattttccaactaa

SEQ ID NO: 239320 - DNA, 222 bp, Klebsiella pneumoniae
atgaccatcacgactgtcggtatcgatcttgctaaaaatgtgttcgctgttcattgcgttgaccagaatggcaaaaccgttatggttaaatccagagtaacccacgcagctcttcccgggctgattgctggtttgccgccctgtgttatcgggatggaggcggctccggggctcattactgggcaagactgtttcggcagtatggtcatgagccgcgtctga

SEQ ID NO: 239321 - DNA, 219 bp, Klebsiella pneumoniae
gtgggctatagcgtaacgggggtgggctatcaggtgcagtacgccattgaccaactagagaaacacacttggcaaccgggctataaagcctttggcctggcgatggggtcggaggcatcagacatggttgtttgcagctcaacgcctgagatcgatgccaaactcaaacagattaaacaggatattcaaagcggcaaaattcacgtgctggaaggatag

SEQ ID NO: 239322 - DNA, 1548 bp, Klebsiella pneumoniae
atggctgacacgctcgcagtaccgatccccgcgctgtcgttgcagggcattgataaatattttggttcgtttcaggcgctgtccaatgtcactttggatctgttgcctggcgaagttcactgcctgctcggtgagaatggggcaggtaagtcaacgctgtgtaacgttatttttggcgtccatcagcctgacagcggtgtgatgctgcgggcgggtaagccctacccccccacaaagccccaagatgcgctgttatctggaattgcaatggtgcatcagcattttagtctcgtggataacgtcacagtactcgataacctactgctagggcaggttaaaggctggatcaacgccgatcagcagcttcagcgtattatgcaaacgctacagagtctgggcctcgatctcaatttacaggccattgtttccacattatcggtcggtgagcggcagcgggtggagatcgtcaaatgcttactacgtcagccgagtgtgttaatcctcgatgagccgacggccgtattgctcccaactgagatcgatgcgctgctgtcggtgtgcgaacgcgtagcgcagcaaggatgtgcggtggtgctggtgacgcataaattggctgaaattcagcgtattgcctctcgagctacggtattacaaagcggcagagtcgtgaggacctctgcgcaacccgccctggagatcgatcgcctcgtccgagcgatgattgaccgtccagggcaggagcatgcatcggcatggacacctgagcccaatgggccacaggcgaagcgctatgccttgagtgaagaggtactgcagctcaatggcctgaccgtgcgcgattctctgggcgtcacgcggttagataattgcacactggtcgtcaatcggggagagattgtcgctattgccggagtggagggtaatggacagagtgaactgggtgcagtgctggccggtatgcagccggtcagtaatggaaagatgtatgtcgcaggcaaggatttgaccggcgcaacgcctcggcaaattaccctggcgggagtaggtattgtgccggaagatcgccatgcactggggtgtattaccgacatgagcctgctggagaatttgttgctgaaccatcgagaacgatatgcccgttggggatttttacagcggggtaaaatgcgtgaacaggcccaagccctgattaccctttttgatattcgcgcggcaggtatggacgtctcttttggtggattatccgggggtaatcagcaaaaagcggtactggcacgtgaattaacgcttgatcctctggtgttgctgatggcggcccagccgacgcgtggcttggacgtcggggcggtggcggcggtatatcgccatatcaccgcggctcgggatcgcggtgtcggtgtattacttatctcctcggaactcgatgaagttctagctgtggcagatcgcgtggtggtgttttatcgcggaaaaattatgggtaccagtctgtatggacaacacgatcgtgcggtcattggggcttggatggcggggcaagcagcatga

SEQ ID NO: 239323 - DNA, 216 bp, Klebsiella pneumoniae; identical to SEQ ID NO: 118659

SEQ ID NO: 239324 - DNA, 345 bp, Klebsiella pneumoniae
ttggcagacaaacgcagcaaaatgctcaccatgtgggtgactgaggacgagcaccggcgtctgctggagcgctgcgagggtaagcaactcgcggcctggatgcggcagacgtgcctggacgagaagcccgcacgcgccggcaagatcgacggaagttcgccggcgctgcttcgtcagcttgccggcatggggaacaaccttaaccagattgcccgccaggttaacgccggtggtggaagcggacacgaccgcgtgcagattgtcgccgcgctgatggccatcgatgccggactcgagcggttgcggcatgccgtactggaaaagggtgctgatgatgatcgttaa

SEQ ID NO: 239325 - DNA, 534 bp, Klebsiella pneumoniae
atgcgcataaccgtacaggcgatcatccggcatcgatgcggttacagccagatcaacactgccttcctgcaggagggaataaatgcgctgtttattgccggtatgaaaccgcaggcgatatccttctttcatcaggggtgccataactgcaccaagccgggaatgaataaaatcaggcggtccggccagattcaccgtccccccgctctcagcgccagcgagaagggaagacaatttttctgccaggccatcaatatacggggatattgcacgggcaagctcatctgccgcttcggtagcctttaccccacgggcctccctgataaaaagcctttttccggtcagaacctcaagggactggatatgctgggatgcagctggctgcgatatacccaacacctgggcagccctcgaaaaggagccagaacggtacgcctccaggaaagttcgcaaatggataagatggctcattatgacgcgccccatagtttaggagcgcccacaatcctcattatggctgctccggatttttga

SEQ ID NO: 239326 - DNA, 213 bp, Klebsiella pneumoniae; identical to SEQ ID NO: 194819

SEQ ID NO: 239327 - DNA, 741 bp, Klebsiella pneumoniae
atggtcatgacaattaaatcgaatattcatggtgacgtaattgcgaatcctgacggatggaatccggggtttgcaatggatggtctgctctatgccggcttgttcgggcgtagcctgactaaaaactttgcgcccggtggtgtagatgtagcggtagtggggtcccctattgtgaccgggcattttgttgattttaccagttctaattatatcagcacgggaatttcgacgacgaaaagtgcgacactaattacagtcgcaaaaaggaaacctgggacaggtcggcagcaccttatcagcgcttatcgtggtggtggtgaagatattggacgctctctggttattgagagctcccagtcggtgttggccgcttactctcactacaaaggcgttgacgcggatggaaaaaccgtcgacacgtggttcagtgtgccgtcgccggtgtcattgactcttgatgattcgcctgcatttctttctgcgcgagatacaggcaaaactctatatgtaaatgacaaaaccagcaatcggttcaaagaagctactgccagcggaacagtcgagtcatctgctaatactgcgttgcgctatcgaatcggaagggatctgatgtccggggcgtccggtccatgctcgattggcgcggcactgatttacaaccggtcattatcagacgaagaacttaacgatgtttatgcctattttaaggggtatttttcccggcgggctatctccatctaa

SEQ ID NO: 239328 - DNA, 1668 bp, Klebsiella pneumoniae
atgatttcacctgacggggtatttttaagtggcttgtcaatatcccatgatggcggagatgcgggtcttagatatgaagactccgagggtttttattttaatataattggcccggacggccttagtgagcgagccggaactctgaacggtgaaggtcggtttattactaaatcaggggataacggctggttgacgctggaagatgccgacggattttataaaattctggctgacaaaaacggggtgctagttggtgccaccagtaaccctctggatttatcagttgccgatgcgcagaataaattatattcgcaaaatatcagggggcagtataactctgaggttcagcgactggtcagcggactaaatcatctgcttatttatagccagagcctggggacgtatcaggagggctggccagccctcagcaagacgccgattgccggttatgacaatctcatgctcggagattctatacgcccgtccagccgattaaacccggcgtttgtccccctgggtgagcctgttctgaaaccgatgcgagcggttgtccagaccctctctggtaaggcggtgctcacggatgcagaggaggcagcactgtctgccggcgctcagaacgagggggagggcggagtcgcgatggcaaactttcttcgcaaactctggctacagaaaaacaacctggagagcgattcaacgcgtcggtttgtgacgacatgctcaggcgtaaatggccagaccattgaggcgctttcaaaaggggcgacgcctgaactgtaccagaggccgctgcaggcggttcagcaggttaaggcgctggcaggagcagcgagctactcaatcggggcccttttgtggattcagggggagtggaactatagctcgtcgtatggcggagaccagacgaaagccggatacaaagcgaaaatgcatacgctattcacagatatgatctcggatatggctgttggtattgcaggccagaaatcaccgcctgctatttttatgtatcagacgggaggcagtttttcgtcagatacctacgatttggcaatcggaatggctcaatgggaatactgcatggaaaacaaaaatgcgtatctcgccacacctgcatatccattccctgataaaggaggtcatttaacggcgaatggataccggtggatggatatgcaattcgccaaagtgatgcatcgggtgctaaatgaggggcagggctgggagccgctcgggcccaggaaaataaccatcacagggaatgttatttttgttttctatcacgttccttatccgccacttcagtttcgtccgtcatatgtggggcgtactgcaacaatgtatgccgacaaggggttccgtgtaacagatagcgcaggagcggttgcaatatccggcgtcgaaatcgtagcggatacgattattaaaataacgctggcaacaactcctacggggggtaccaaactctggtatggcgacaaaacaacacatggcggcaacggtaacgtattcgacagtgacccgtttgtcgcgtcagaaaactacgtatacaccgagggttcgggccagtatgccgatgaaaatatcccggaactggtcgggaaaccttatccgctaaacaatccttctgttcagttctgccttcctgttaattttggggaataa

SEQ ID NO: 239329 - DNA, 1407 bp, Klebsiella pneumoniae
atgacggctctcgcagcggagtttttcactttggatgaagttaaccgactcaagattattcaggacgtcatcgaccggcgtctgacaacacagatggcagcgcagcggcttggtatctccgaccgccagtgccgtcgtctgcttgcgcgttatcgtgaagatggtccgcttggcatgaccagccgccgtcgtggtaaatccagcaataatcaactgcctcagggactggccgcatacgcgctgaatattattcgcgaacgctataacgatttcggtccgactctggcctgtgaaaaactggctgaggttcacggcgttcatatttccaaagaaacggttcgtaagttgatgactcaggccagtctttgggttccacgtaagcaacgtgcaccaaaaatccagcagccgcgttaccgacgtgcctgtgccggtgaactcatacaaattgacggctgcgaccatcactggtttgaaaaccggggacccaagtgtacagcactggtttacgttgatgacgccaccagtcgtctgatgcagcttcgtttcgtaaaatctgaatcgactttcacctattttgaagcgacacggggctatattgaaatgcatggtaagccactggcgctctatagcgacaaagccagtgtcttcaggatcaacaataaaaatgccactggcggcgaaggcgaaacgcagtttggacgtgcgatgcacgaactgaacattcaaaccatctgtgcagaaaccagcgcagcaaaaggtcgtgttgagcgggcgcatctaacccttcaggacagactggtcaaggaactcaggcttcagggcatcagcacaatggaatctgctaacgcatttgccgaagagttcatgaacgattacaaccgacgtttttcaaaagcgcctcgccaggagttcgatgttcatcgggaactggatgtcgatgatgatcttgatatggtgtttacttggcgtgaagcccgccgcgtgtcgaaatcactcactgtgcagtacgacaaagtgctttacctcattgaagacaatgagttcagtcgtcgggcgattggtaaatacattgatgtctggcattaccctgacggacataaagagctccggcttaatggcgtatcacttccctactccacctatgacaaactgtctgaaatcgatcagggtgccattgtggacaataaacgtcttggccgtgcgctggagatggcgcaacttgtgcaggccgaacgggataataaccggtcacaatcagtgccatccggtgacggcacttcacgcaggcgcaaagcccctacgacgaagaaatcccagcgttctttggaccaggacgatatgttcaatgcacttgtaaaacttcagacacgagctgaggagatttttggtgaacgcaaccaaaaatga

SEQ ID NO: 239330 - DNA, 183 bp, Klebsiella pneumoniae
atgacgactcatgcagcggagttttgcactttggatgaggttaaccgactcaaaatcattcaggacatcgtcgaccggcatctgatcacgcagatggccgctcatcgcctgggtatcaccgatgaactcagtgccgacgtcttccgtcgcattatacctaacctagccgcttggtatggctaa

SEQ ID NO: 239331 - DNA, 258 bp, Klebsiella pneumoniae; identical to SEQ ID NO: 233401

SEQ ID NO: 239332 - DNA, 417 bp, Klebsiella pneumoniae
atgaaagatttaaatttgattgaagaatacaattacgatctctttttggtaaacacctatgaagaagttgtagatttaataaaaaagggcgcagatgttaactttgtgaactacaaggggtttactccgctttcagtggcgcgtaatgttgatgtagctaaggctcttgtagaacttggtgctgatgttaactttataaataaagaaggtgaaacactgctttttaaaaccaacaagcttttgaatgttgcccgattgattaacatgggctgtaatccattcctgaaaagtgctgatggtcattatcactatgaaaacatgacaatggcagacagaaaaaactacagtcagtttatagaggtatttaaaaataacgtaagaaaaaagaatgaagaaagaatgttattgagcgcttaa

SEQ ID NO: 239333 - DNA, 480 bp, Klebsiella pneumoniae
atgattattttttgcagtcaggccttctgcaccgtggaactgccatgccctgacccagcgacggacagatgttctttcaataccaaaaaggtcggctgtactctgttctccgtctttaccggacaaataatgattaaccacagccagttttgtttcaggggaatactttggtttagccataaaactgcaccttactcagttgggtgtccaacttttggggtgcagtccagcagcgccgccgggcaagatatcaggcacggtatccttgatttcgccgggtggcggctgcgccttacccggcctacaggatccactcacaggctcacaccccgtaggcccgtgcaagcgcgccgccgggcaacagtatccggccccctcccctacttcgccaggctggcaaagcgagcaaagaccgcatcaaaaatcgccagcccctgcgccacctgctcagcagtaatggtgcacggcggcaccacgtga

SEQ ID NO: 239334 - DNA, 303 bp, Klebsiella pneumoniae
gtgaaaaaagcactggataacgccctggctgtcgcagaacaacgtaatggcaggctgattgaccagcccagcctccagaaagcgatgaattactggcgcaaagaaatagcaaaggccgggctgacggggatttataccccacactcattacgctatgcgtgggcgcaggatgcactccgccactatctggcgcaggaattcagtcacagggaagcgctggcgctgacctcaatggatttggggcacggcgacgggcgcggacggtatgtggcacaggtttacgggcgacgggaagaggaataa

SEQ ID NO: 239335 - DNA, 549 bp, Klebsiella pneumoniae
atgatgaaactgattaagttgaatgctaaaaaagtgattataggttttctaaatgctatcttatcactatcgactttttttgtggttaggcgattcttgttacgtgttttatttagagctattgtgggaaataagagtacggttcatcgcaaagttaaaatatttgatatcggcagtttatcaattggtaagcattcaacgattaactatggctgctttctggataatagaggtgggttagatattggtgataatgttaatatctcgcattgcgttaaaatttatacaatgggtcatgatttagatgatccatttgcaaagcttgtaaaaggaagagtacaaattgggtcaaattcatgggtatttcctaatgtattaataatgccaggtgttactcttgcagaaggagctgtcgtatatccgggaagtgtagtaacaaaaaacattcctagttatgaagtttgggggggaagtccagccaaattcatatgccatagaaaacgtgacattaaatatgaagcatcttttcctgtatggtttgccatttaa

SEQ ID NO: 239336 - DNA, 972 bp, Klebsiella pneumoniae
atgattgcatgggttagctttcagcgaagagctgatgttatgaaagaattttgggagtatagcgattattatattactactaaatttagacataaattattaaaaccacttgattatcttataaagataatcaagaccataaatatattagcgcgtgaaaaaccagatgtagtgtggatgcaattacctccaacatttatggtttttgtcggaatcgcttacaaacatttaagaaggaacagtgtttttttgattggtgactttcataatagtgcattaaggccaaaatggtttaatttcccatttgtacgttctgcgcttaatagaatagatattcttgttgctcataatgagcaggttaaaactgagttgatatataaaggcattaataaaaaaaatgtttttgttcttgaagatatgcctttctcatactcaactgggaatagtgaacctgtaaagaacactattttatttccttgttcatttgatgtcgatgaacccctcgatgtcgtcctttgtgctgcgaaagagcttccacatataactttcaatattaccggaaaccataatggaaaaatttctcccgatgtaataaaactagctcctgacaatgtaatatttactggatatttaaccaaaaaggcttacgatgatttgttcttatctagtagcgtaattttggggttgaccacacgtgataatgtgcaactaagtgtttctaatgaagctttaagtgctgataaaccaatggttttatcagacactacaactcttcgaaacctatttggtgatgctgcgatttttgttgaatcccttgacgctaagtctataagtatgggctgcgtttatgctgttgagcatacccaagaattacatgttaaaactaaaatattaaaatcagagcgtaaaaacagatggaaatatcaggctgaaaagatcaaaagaaaaataacggatttcaacgcaatataa

SEQ ID NO: 239337 - DNA, 495 bp, Klebsiella pneumoniae
atgattttttgtagtgtaggcactcaacttcctttttctagattagtggattatttatatcgctggtctgaatttgtaaacaaacagcaaaagagaatagttatacaatccggtggtgaggttaattctaaaaaactagataatattttagtcagaatgtttgtctctgaggaagaattttcaaagtacattgatgaatgttcggtttttatttctcatgcggggatggggaatataattagggctattgaattaaataaaccgatagtaattgttcctcgacttggttcattaaatgaacatagaaatgatcatcaaactgattctgcgaaccgattctcttcactaagtaatgtttttgtggcaaatgattttgattctttttgtaaagccattgagttagctagtggttattgtgacaacagaagcaaaactgcttaccctgaacgagataaattaataaaatatcttaattcacaaatatcccttctgtag

SEQ ID NO: 239338 - DNA, 270 bp, Klebsiella pneumoniae
atgtcaaaagaaaccatgaacttagcggtgagctactcgaatgccaacttagtcatcgagcgctcattaaacctgttctacagagtgaaccaaatccgacaatctatcagcgaccttcaaggggaaatgcgaccgtttggagtagacgcagtcgatgaattggataactacgacgtggccctccgaaaccttgaaaaattactccagaagattgagcgtggcgctcgggaagaagctatcgccattcgctacaagattgaatcgaaataa

SEQ ID NO: 239339 - DNA, 513 bp, Klebsiella pneumoniae
atggatgcagctcaatcatctcttggtgaaggcaagttactgattgcttactctgataaaaatggctccacaataggtgtagagttttctgctgtggcatcaagccaagcaacatttttaatgggggcttgctctgttgcagctaccggtaaagaaaaacgaattgtcacatcagccgtcatagatgatactgagatcattcaagcagcgagtgatgatggaggagacaacatggaaacgcggattgcacttcttgaatctgatgttgcccgcatcaaaggtgacatctctgaaatcaaagccggcactcagaagttatcttcagatacagcagacataaaaaaagacgtcgcagttattttgcacaagattgttgatattgatgaaaaattatcaaaaaaaccaagcaacagcgaaatgactactgcaataacctcagctgtcaatcgacagataatgtggactatagttacagctttggctgtgttggggttagctcgttggatattttag

SEQ ID NO: 239340 - DNA, 282 bp, Klebsiella pneumoniae
gtgagcgagaaacgagaagttgttttacaacacgttaataacgttttggaatctaagaattacattgaaacaaatgctgacggtgtcgtaaccattggcacgcagaataatggttacgatgtttacaactttgtatttctcaatagctcccccgtcattagccatgagaatggcgaaattattgtaacggggatggagcgaacgaaagttgcatcagtaacactaagcaagcaaaaagcctttgatttctatcagtccttgaaaagcctatttgaggaataa

SEQ ID NO: 239341 - DNA, 183 bp, Klebsiella pneumoniae
atgaaaattaacgtaactcccgcccagttggaggccatcaaacgacttactgatgattgcgcttcgatgattggcagcggaaattatgaagctgataaggcctggtcgcgtaacgtcaaattgattgacaggatgctcgaaagtaatgggctatcaaggaactttaagggagagggtgagtga

SEQ ID NO: 239342 - DNA, 546 bp, Klebsiella pneumoniae
atgaatccatggggagctattattgcagcattaattgcaggatttattgcttttattggaatggttatagcaaaagaaaataaaatttcagaatttaggcaggaatggattaaagaactaagaggtaacatagcgaagcttttccgactttatggaatgctgagaaaagactcgggactaactcctgatgaaaggactgaaaagtttaatgagctaaatgaaataattgccacgattggtttacatttaaatcatggtaacccatcagtaaatgagcaaaagttacttgagtcaattagtaaattgaatttacatgttgaaattggtgaggcgtcgctaccttcattattcgattctcttacagaaaactctcatcttgtactaaaagaagagtgggaaagggtaaagcgcggtgagccaaattatcacaggattaaagattttttgtttttggtatttgtattttgtacgtctttactcctaatatccctagttgttttctcaatgataaaatgtggaatccttagtgcaacattattatcctaa

SEQ ID NO: 239343 - DNA, 2076 bp, Klebsiella pneumoniae
atggcagaagtacctttaccaactccaaccgacaaccaggtgcccagtactgatatccgggacgcagtttatgctggcgccatgctggataaggttgtcaccagtaccgaaccgacatatatcgatcgcctcggcggagagcactacaccgtagatggaattaaggcggaaggggataaagtcgttgaagaaacgcggcagaatctgatccctctaagccgtcagtacatgaccctggctgatgcacaggcggatattgccaacattcctgaaggttctaccacgtattaccgcagccccgatgatagtgcgctggctattgaagtcatcaataacggcgggacgctggaggcgaccgggcgccgaatgccatcacaggtttatatcgactcactcctgagcattattcagcaaatgcagaatcagtcactctatcgagacggtgtggcgggggtttcatttccggtcatctcagctgataaacgtgttatcggatttaaaaacgacggcggcgagtatgtagcagacgttgaaattcccggcacagataaaatacctccgcgcgacggaccgcaatatatttccgttgttaagtcaaagacggacgggcgcgtaggtatcggattcaatccaaaaaacggcttaacattcgctctgcttgatgatgattctgttgcatacattgctgacagaattggtggtggaggggctaccgttcctgaaattcgtgggcaatggggggcgcgggtatttaatccccgacactatatcggcgacgaatacaacaccgcttctgtcctggacaaaagttcacgcactttcgacgcgcgtcagttatctgacggtgtgcaggatacgctggtgatggctgcgccattagctacggcaatccgtattgcgttggtatatggccagtcaaatgcggggcttggtggctcgacaggccgcattgttgatagcgccccgtgggcgttttccacctggggattcgctggcgtgaatggttcgagtcagcagggcactgttcatatgtctgcagcatcgctcaccgactttgtaccggcgctggactactctgctgcacagtcaccggcgatctgctctgcatacggaatcacgcagcgtaacgcagaacttgggcgcgatgaccccggctatattgccgcaacagcgtggcacggtagtcagccaatcagctcattttacccaaatgcacagtcaggctactggaactatgaaaacgcagtgacgttcctgcagcgtgccgctgcgattgctgcggagtatggccgatctgcggtgcttgacgttatgcagtggattcaaggcgaagcggggccaacaggtcgcgataactacgccactcagctgaatgaccttttcaacactattctacccgggtacaaagccgccaccggacaggctaatgatgttcgggttgctatctggcaaacaaacatgtcgaaagccgcaagcggcgagaactacgccagtcaggggcaatgggacgtagcgaacagccgcgccgatagttacctggctgggccgatgtatcagtttaaattaggcgatgagccaggcaccggccccagcacagtccacactggaccagaagggcggttgatgttgggagaaacttacgctgacgtgtatagcagtatcgtcgataaaggggcgtggaaaccggtacagccggtatctgccgtactaaccggaaatgttgtcgatattactttcgaaggtacgcctttcgaggcatttggcgcaaaactgtcaatcgatagcgactgggtacccgatacgcttaaccacggcttttctttccccggcgcgaccatcacagccgttgaaattacgggagccaaaacagtacgcctgaccctctcggctgcaccggcgcaacgtaccctacgatatgcgattgacgcatttgacgatgtgacctactggccgacacgtcgcggaaacctcatggttgaaaccgaccgaaaatcctggtggaactcgcagggagtgaatatcccgcgcaacgttcgccactacgctattcgttttgaaatcactgttacggagtaa

SEQ ID NO: 239344 - DNA, 756 bp, Klebsiella pneumoniae
atgcccggaatcgttgttgcacaaaatttcaataataccgcgctgccggcaggtgaaagcctggcatctgcgctgattgccgaccccggtgtaaaaaactggtttcaggccgatgcgaattctgtaaccctgagtggcaatgatattgcctcattcaatgaccggaaaggtaccgccagcaagttgacccgcgctgatgcagctaaaggtgcaaccctggtcagcaacgcattcggacaatactctggggcaagattcaacgcggcagaatctgatcgctctttattcagcggagatgtgctggatttaacgcagccattcagttggtcaggtgtggccacactaagggcgctggcggcatcaagtaacctttgtggcacattcacctcctcgtctgttcgggccatactcaatgtaagccccactaccaacgccgggaaattacagtttctgtatgggtcagcaacatgcgttggcccgacactggatctgaatacgccgtttgcgttcgtttgtggttatgatgggacgaatattttcctgcgcgtgaatggtgtgatggcttctgttgctgctgctggaagtccttcttcttcggcattcgccctgggcgcattacctggtggttctcagttctgggatggtgacgtgtccgatctctttctgtgtaccgtcgcaatgaacaccagtgctggagcatcattgctcgcaaagctgacggcattttataaagacgtgtatggactgacgctgtaa

SEQ ID NO: 239345 - DNA, 867 bp, Klebsiella pneumoniae
atgcagcatgttcataccgaaggtttgctgccaggtcagggcattcacgatcaaagcattcaggcagagaaagacctgaaattaatgcaagtgagcgccgtggcgtggaaaaacggaatgggggatgaatggctggatgccgcaaaaaaatacttattcgcatgggttggtacttatcagccgaacttcaaccctatcgatgaaactgcatttgatcaaatgattcagacttattcgattgtgaagcctaaattatctgaagaagaaagaagaaatatcaacaagtatttctatgactgggcaagtgaatatatttcacagatgaacaatgcgccaaataaaagtacatggactaacaactggcaaagccacagagtgaaattgataaccttgatggcagttgccacaaggaatgagcatctctttgctgaatcaagacgtttattccaggagcagattaacgtaaatattgatagtgatggagaaactctggacttcaagcagcgcgatgcaatccattatgttgtttatgatctacagccattagtgcaggcggcactggcagcccaaaaaatgggcgaggactggtatcactggactgcccctgatggggcttctcttgcgaaagcagtgagctggctaacgccttatgttaacggggaacagactcataatgaatttgttaactcccgggttaaattcgacgctgtaagaaagcaggacggcatcaagggatttaatggcttattccgtccagaaatggctaaggagctatattggggcgcttctgcttttgaatctaccctgatgccattagcacaaaaactctcaccaacccccccgctgttcatggattggtgtaattaa

SEQ ID NO: 239346 - DNA, 927 bp, Klebsiella pneumoniae
atgacctttgaacagatcctggaagagtatttttttgcccgcttattgcgacctgacacccagagctgttatcgcacggcagtaaaccagttcactcactggcgcaacgtgttacccgccgaagtgacgccgcatatggtactcgaatggcgtcattacctgttaaatgtgcgctgtatcaagccggtgagctggaaccactatatgcgccatatgcgggctttgtataacttcgctattgaacaagggctgctggaacagtttatcaatccgttccaaaaaacatcactgcgggaatctcgtaagaaaaagaaaaccctgacccgcgagcagatcctcgcgtcacgcaaggtgctgggccattttattgagctggaaagtactcaacaaaactatcgttcgccgctgtatccggcctggttctggctgaccgtggttgaaaccttcaactacaccgctatccggctgaatcagcttatccatctgcgcattaaggatgtcgatctggtccatgacacgctgtttattcagagcgaaggcagcaaaagccatgatgaacacattgttcctatcgcctcacggcttcgcccctatctggagcatctgcttgaagaagctaaaacaaagggaatacgagctgacgatcagttgttcaacatcaatcgtttcagtcggcggacgctgcgccagggtaaaccgatgacagaaaatcaggtgagttatttctttgccaagctcagcgatgcctgccacagccgtttttcatcgcaccgctaccgtcataccgttgccacagaattgatgcagaaaccggagcaaaatctgtatgtcacgcagaaactactcggccaccgcgatattaaggtgacgctcagctatattgaacacaatgtcgagatgctcagaagttgcgtggagagagattga

SEQ ID NO: 239347 - DNA, 1176 bp, Klebsiella pneumoniae
gtggaagatgccagcgggcaacgctggtttccatggcatggcccactgattcagccttatcggtttcgctatctgccgcaacgtgattacctgcgccatccggctgcggcagcccttctgcttacccaacttctcccaccggaaagcctcgactggctcgccgccgatgccgctgcgttatccactctgctgcactgcctgaacggacagtatcagtatgccgggctggcaggtgaactggtgcagaaggctgaccgtgcatcggtggcgtttaatctcggcggcaatccggtcaaggctatccatcgtccgcaaacctcgctgccgcagcaaatcatcgccgccctgcgcgacctgctggcgcatgagttccggctcaacaacccaaatggctctgacggctggctaacggaagaggcgctgtggctggtcagtaagaacgctgccgatgccgtgcgtggctggctgctgcaccaggggattgacgccgtaccgcaacataacgtgcggctgttcgacgaaatgcaggcgcaccagttacttatcccctgcgaggataaggccatctggcattgccggattgaggccagcggtggctggagcagtgaacttacgttgctgcgcttttctccttcgctgatttgggaagatccacaacagcggcccgcaaccctcagtggaaccgtcacgccgatagcgggtgtcctgaataagacagaggcagtgattgcaacggacgcggtagtagaacaactatcccctcaacccgaacaaaacgatgccctactttcaggcgaagcattctggcagtggctggtgcgtaatgttcaggctcaacatctggaagtcaatgaacctaacgcccggatccataccgtcgccgggtcggtgtttctggtgacgcccggtattttcaaactctggcttagcacctgcggtcagaatgtcccagaagaatactggcgggaggtacagaagaagttccagaatctgaatcttcaccgaaaacaaaaaaacggcctcaacatctggcactgcaccgttgtcggcccacgccgttgttcacgtctgaagggatatctgcttgacgatcccacgccgctttttggagatgacgttccctttaataaccctcatctcttgctcaatgaaggaagtcactcaaatgacctttga

SEQ ID NO: 239348 - DNA, 480 bp, Klebsiella pneumoniae
atgcggatatggctgacgcgcaaaaagcaaaacactacaccatccactggcgaaccagacgtcacggagggatggctgcatcctgaatccgcgcaaacgctactggctgaaactacccgccaacagttgatccagtttattcggcagagcaccgcccttcccgcctcactgtttgaacgcttctggctgataccagtccaccgcttcgcagaactggcgcagttgtttccggcctcggaaaaccaccaccattcccacacgggcggtctgctcgatcacagccttgaaatgccgcacgactgcggcagagttatctttttccgcctgatgcagcgccggaagatcaggccgcgcagtccgaacgctggacaacggtcatcatctacgccgcgctgctgcacgatctgggcaaactcatcaccgatattgaggtggaagatgccagcgggcaacgctggtttccatggcatggcccactga

SEQ ID NO: 239349 - DNA, 912 bp, Klebsiella pneumoniae
atgaacagaagcaacgatctttaccagaaagtcaccgatgaaattatcgccgcgctggagaaaggcgtgatcccctgggttcgcccgtggcgggaaggggaaccggtggtgccgatgaatgccttatccgggcggttgtatcacggcatcaatattcctcggctctggaacagcgcagaacgacagggatatgaaagcgatcgctggctgaccttcactcaaattcgcaatactggcggtaacatccgcaaaggcgaaaaatccacactggccgtattctatctgccccagcagcgcgaggtagtgggcagcaatgggaatacggttcttgatgctgacggcaatcctaaagtgacgtcttacgccgtggtacgcgagttccggctgttcaatattcagcaatgtgaaggactgccggaggcgttttcacagcccgtcgtgatggtcgatgatcctatctccgtcgctgagcaggttgcccggcaaagtgcggtgacgatcactcaccgacgccagaaccgggcgtattactcgccaggacgcgactgcatcatcatgccgcatcctgagcagttcacttcgcgtgaggattattacggcacactactacatgaactgacgcacgcgactggacacgcttcgcggctgagtcgggacggcatcaccgccggaaagcataccttcggcgatccgacgtacagttttgaagagctcgtcgccgaaatgggagcggctttcctgtgtgctcatgttgacattcaggcgaagctacagcatgacagctacatcgcatcgtggctgaaggtgttacagcaggacaaaaaagcgattttccgcgccagtggattagcgcgtaatgcctgtgaatatctgcttgaacgggcgcagcagccattagcgctgagcgcatga

SEQ ID NO: 239350 - DNA, 294 bp, Klebsiella pneumoniae
atgcctacttcatcttgccctgaagcaaaatccttatcgttgtctgtctcatctgaggcctgggaaaaagtagtcagttttccacccgatccctctcaggaagatgaccgcctcgaaaacctgattgtcgccgccatgctgacattcaaaagcgcgggcccggaccgaaagagcatcaatttcggtctgtactgtttgcccgccggcggcagcagcaatgtaccgctgatgacgccgctgcgcttaacgcttgaagataaccagctgttggttactgcccttcatacctgctga

SEQ ID NO: 239351 - DNA, 873 bp, Klebsiella pneumoniae
atgacatcactcgaaacactgcaatcggctatctctaacgtctctgtatggcgtcagggtgatgtatgcgcaccgcacaagccgttgctgctgttgtatgtgttgtcgcagtacaaagcaggacacccgcgcctgtttaactacggccttgagatccacgaaccgcttacccgcctgctgaaagagtttggccctaaacgacgcactgattatcccaatatgcccttctggcgactcaggactgacggcttctgggagatcgccaacgcggaaggttgtaaaccccgtagaggcaacacccagccgacaaaaaaagagctgattgataaccaggtagcaggcggctttgataaagcggcttaccagcagttgctggcgcatccggagatgatcgatcaactggcccagcaaatcctgatagaccgctttcccgaaagtattcagcggatcctcgccaaccaactgggtctggattttatcgattgttcgaagaaccgcgatccgcgcttcagagatatcgttctccgggcttaccattcgcgatgtgctttctgcggttacgatctacggctggatggtgcgctggttggtattgaagcagcccatatccactggaaaacctatggcgggccgtgtgtggtgaacaacggtctggcgctatgttcgctgcaccacgatgcttttgatatgggcgcattcgggctggatgaaaaccttaccatccgcatctccggaggcgtcagccgtagcccggtagtggataacctgttctggcaacggaacggccagtcgttgcatcttcctcacgacacatcgctgtggcccactgaacaatacgttggctggcaccgtaagcagattttcaaagcctga

SEQ ID NO: 239352 - DNA, 1824 bp, Klebsiella pneumoniae
atgcttgataattctactttcgattacaaaccacatttaaaatctgcttatattgatccgattagaactgtgacagtcatcgatgatgaatacccaactattgatgatttaatttcaccgaccaaagacagtttttctcaagacaacatttctcgattaaaagatattattgatataagtcgaagtgaagaatataattggcttttagatgtctataatggaaaagagaagaaaattcaagagggaaccgtatctaaccgtctttatcacagtgatctactaatcttggactatcatttagatggagaggactctggatattgtaaaaaatctatagatattattaaaaatctatctgaaaatcgtcattttaatattgttgcagtgcatactaaaggttatgatggacaaaagggttcagttaatgaggtactaatcgatattattacttccttacaggaaagacccgctattagtattttaaatgataaaatcaaatctagaatagatgatgctttagatgaatgggaaatcgaagatccaagtatcagggaagatctaattaattcagtttctacattagatttacttttcttgattaataaattcggatcaaatttaagttcaggatgtttcgactacgaagttcttgatgtttttcataatatatttgatcaaaaaccagacaatataaacatatccaaaatattgatttttaaatggctctcatcagaaaagttacatagatacgctgaacaatttaataataagacatcaaagttctttgattgggggacaaatgaaaaccacaattggataaaaacagaagacttatttattactgtccttggtaaaaaagacacaccaatcagtgacataccgaatcaacttttggaggctttgtcaaactctaaaccacatccgcacaaacttattttatcaaaactcagaagtgaaattgaaagtaatggtagctatgctgcaagtaatataattaacaaaaaattcttacaggcggcgtggctaaaggaattacttcaaaaagaggatgaatatgctatcaaaacagctgcatggcaagcagtaactaaattgtgggaagaattagcatacgaaataaaacagagtcttgatgattttacaattaatcttgtccgcgacttaaagaaaattaactcacctttaaactatttcatagagaaatctacacttgatgctgagcttgaacaaattaaacatgcaaattgtttcagttgttcaaaaaaaataactgctcatcatttggttacggggcatgttttggagttcaataataatcactggttgtgtctaactcctatgtgtgaccttgttcctggtcagaaaaacggaaatagtttactccctgttacgctcgtgaaaatgtatgatgcgaaagttgctttaaataatacacgtaaaaatatgcaaaacgagcttaaactacccaatttgccagaaatcaacgaagatgaatcaattagacaaatactaaattattccacacagaataatctattgttcgttcagtctgaacatgacgggaaaatacatattcttagtttcaccgttggactcgatggcaaggcaaatcctaaagcaatggattgctatgtggaaaatcaaggtattttctctgaagataaaataatagcactaaaatatgccaagcccactgaaaatgaaatgaacataatatccgtagaagcaaaaatagttgctgaattacgctacgaatatgctttgaatttattaggtagactcggtgtatcaaaatctcgagtcggattagattttatcaactaa

SEQ ID NO: 239353 - DNA, 2970 bp, Klebsiella pneumoniae
atggtaatttcagcagcttttcaaacaagagcaaggacaattgatcatctagggcgtgagcaaatagctgattgtccaaccgcaatttccgagctttggaaaaatgcatatgatgcttatgctcgtaatgtttctctaaatatatttgacggcaatacacctgtggcaactttagttgatgatgggcatggtatgtcgttagatgacattatcaataagtggcttacagtaggaaccgaatccaaggctacaaaaaaagatattccatatgaagatagaaacggaatagatcatattcgagcaaagcaaggtcagaaaggcatcggtcgtctttcttgtgcggccttgggctcattaatgcttttagtttccaaaaagaaagatagccctcttgtagcttgcctgctcgattggcgtatatttgaaaacccatatttgatgcttaatgatataaagatacccattatggaatgcagtgataacaatgaattaatcactgttataccggaaatgtttgatgctttgatgggaaatctatggggtgatggtgatgatatattacgagataaccgtattgaacaagcttgggaaaattattctgaattagaaagaaatgaaaataattatattacaaaagaagctatcgagaatactgtaattaatgctttttttgaggaaaggcattttcaatcttggcctgtgtggaataataaaaccactcacggcacagccatgtttatagctggaattcatgacgatttaatagctcagctatcaacagatgctggttcagaagctcaaggtgcagaggttcgggctaaagaacgctttcttcaaacattaaatagctttgttaatccatttaaaagagaaggcgaagaacagattactgatttcaatacaagtgttgtcgcatggaatggtaatctgcaacgatttattatcgatgaagttagaaactttgatatttcaaactttgaccagctagaacatatagttgaaggaagtattgatgaaagtggattattttccgggaaagtgaaagccttcggagaatggtttgataatattacagtcaaacctaaatctgcatataagaccagaaaagatactcgctttggccctttctttttaagattaggcacatttgaagttataagaaaaaatagtacattatcagatgaacagcatgcaaccttcgaccgtatccgtgatcagtttggtggagtaatggtttttcgtgatgatttacgtgttatgccatacggacgtgaagataatgacttttttgaaatcgagaaaagacgttcaaaaaatgctggtttatatatgttcagtaatagggcatgttttggtggtgtatgtataacgaaagaacataaccccaacctacgagataaagcaggtagagaaggtataattgacaataaagcatctaagttatttagagagatagtcgaaaacattttaatagaaattgcaaaaaggtttattggccgcgcatcaaatatacgagatgaaaagctagaggaaataaatgctaaacatgctgctttgaaagcagacgaagatagaaaaaaattattacgtaaagagcaaagaagaatcaaaacatcgattcaaagagatcgtatttctttagaacatttaagaaatgaattttatgaaatatcacagcttctaagcgacaagaataattttaaagaactagaggagctattacagctcaaagaaaacatcgacgtattggatggtaccctaaaaaacctatctttaggttcagtaccaagaaatttagggagtatagagaaagactaccgtcagtatcgcgatttagagattgatgctaaaagtcttttaaagcagattaataactctgtatactcagcgcttgatcattttactgttaaagatgattattcaattgctgagaaagactttcgtagcaaagcagccatattacatgcgaaaataagaaaattttccaataaaggacgcaatatattaaaagaagagatgttgcgtttcgaagagataacaaacaatacaaataaagctttccatgaaaaaacatctcaatatttatccgatctacaagaaaatagaacttcactcaaaaaaacacttgaaaatttagatcttgcttatcagattcaagacattgaaataggtcaaacctacgccccatatattaccgcattagaaagcttaagagaggaaattgatttagaaggcctcgcgatctcttcattcaacgaaaatacacggttgaagaaacaggtagagcaagtgaatgcactcgctcaacttggaataactgtggagataattggtcatgaaatcgaaggtttcgatatgactattgagcgaggtataaatagactgtcatcaacaaacctcgatgaatatcagaaaaatgctttatcaagtattacccaagcacatcaatcattaagcgattcttggcgttttttaagcccattaaaattatcaggagataaggtaagagctttcttgagtggaaaagatatttttgattatgttaatcattttttcaacagtaaatttgaaaaagattcaattgaattttcttgctctactaatttcctagatatttcattatatgatcaaccagccagaatttatcctgtgtttattaatttagtaaacaactcacgatattgggttaaagaaactaaagaagagcgtcgaattattaggttagatgtacttgatggtttgatatatgttagtgataatgggccaggggttgatcctgatgacgtgtccgaacttttcactatatttttctccaagaaacaaagaggtggtcgcggggttggcctttatctctgcaaacaaaatttagcggtgagtggccatagtattttctacgaaacaagaacagagaaaaaaatactaaatggtgctaattttgtaattaatttcaaaggaattaaaaatgcttga

SEQ ID NO: 239354 - DNA, 1197 bp, Klebsiella pneumoniae
atgaaggcaattgacttatttgcgggggctggagggtttagtttatccgcccacaatacaggcgctatagatgttgttgctgctatagaattcgatagcgcggctgcaaacacctacagaaaaaatatgttagaaaggcttgagcataagaccgaacttttacaggaagatattttactcgtaggcccaaaaaagttaagaaaaaaaataaagctcaagaaaggcgagcttgatatgatacttggtggacctccgtgccaaggtttttccagtcatcgaattaatgatgctggtgttgatgatcctagaaataaattacttttaaggtatttcgattttgtttgtgaatttaaaccaaaagcttttttggtagaaaatgtctccggtttgttatggaagagacatgaagcccatttgaaacgctttaagtttttggcttccaaaaatggttatactttaattcattgcgatgtattaaatgctcgtgattatggtgttccgcaaaatcgcaaacgagttttcattgcaggtgtcagaaatgacattttaaaaaaaagaaataatattgagtttccacctcaagctactcatttcaaccctaattctaatgaagtaaaaaacaattcaaaaaatacgtggagaaccgcatcctctgtttttgagaagatgaatgataacttaattcaaagatatatatctgaatactttcttaaacatacttcttactcaattgatgaagcacaagagctacttgaaaacctagaatatcaagacgcacccataagcgaaaaagatccatgcaacatacatatgataccaactgagcgtatggcagagcgtttcagagccacaaaactcaatggcagtagaagcgatgcaggaaaagaatttgagctaaaatgtcattccaatggatacgcaggccataaagatgtttatggccgcataatgattcacctcccagccaatacaattacaactgggtgtaacaatccatctaagggaagattcattcatccatgggaaaatcacggcatcactttaaggcatgcggcaaggttgcaaacgttccctgatgactatattttttggggtaatgcgacagagcaagcaagacagattggtaatgcagttccccctatgttaggcacaatattaataaatgcattacttaacataattgcacccaatagataa

SEQ ID NO: 239355 - DNA, 1731 bp, Klebsiella pneumoniae
atgtcagataataatatattgaaagaatttttcaagtctctaaatgaacaggaaaagccatttactcagcttttaaaagatgatcggctaggtatgatattacgttcagctgtaaacgaactaaatttaatgcattataaaaaccatagtgaatacaacgcgacatttagtcaggaagaatattattatatatttaaactgggcgtctctcgattaattaaattagcccttgaagcacgaacctcgtttgaagcccctgctataatgtttctacaaagctctgaaataagcgcagagacacataatattgtaagaggcttaggaatgatcgaacatggaaggagaattgcgcagtcagtttattccggccacactaaaatagaaaaaatagggggaaatgagtttaaaataaccataccatcaatacttgttgatgaagaaagccatgaaaagcacatatctaatcattataaagatcaatacagagaaaatctcattagaatttataaatcaaaattcatggaagaattcaaagtagatgttgacaataagttgtttgatttagtttatccatatgacacttattttatagggtacgaatccgcacctattctagatgaattcttttttgggctcacctattcagagcttttcaatcaagatggatttgacacttttcactactccgtaaaatttggagggatagagtttcaaaaatataaattagctatcggatttataatgtcggtaattgaaaaacatttaagattttcagaaaaactcacaataaaacataccacaataaaattagagaatattctaacagtttcagcaaatacagacgaatttatagaaagcatgtgtgatgcaattaattactttggatcgtcgctaaaagggtatactcagcttgaattaaacgatgcacgtaaaatttttgaagtaatttcttatagcagaagaaacataaagttattagacaaccctggagcagagctaccgatgctgattcaaagctctgatgaaagtttcttcttctgtattgcagcaagatatagctcaccattacaatatcttcatgaatccttaaggtttcattttagtaaggattatgataagcagcaacaatcacgagaacaagtattacaaagagcaataaaaggtgttttgaacgaaagtttcagtaatttacaataccaagaaaatataaagataaaagagaatggtaaaacattaactgatatagacttagttgttgtcgaaaaaagcacaggaatagtttttctttgtcaattaaaacatcaagaactttatggtgctgatctacatgcaaaacatgttcgaaccactagattaaaaaaacaagcgtcggattggcttacttcgatgaacaattggttaaacagcataaccgaaatagaactaagaaaatcgttgcaaataaaaaaacatgtgccaaaattaacaatatataaattattcataacaaaacattatgcctatccactcaaagagctatcagatgaagatacagcgtattgtaactgggcgcagtttatttatgccattcaacttatcgacgatgataaggggaaaagaaaagatagtatttcatctttaatcctcaaattaaaaactttaaatcaggaagctaacattgaatatcttcatgagcctacatcgaaatggatgataaaaaatttaactttcagtttagagcaagaaagataa

SEQ ID NO: 239356 - DNA, 171 bp, Klebsiella pneumoniae
atgattatcaatttggtgatggggtcgatgtttctggtgctgccgacattctggctaggagcaatgacgtgggctggagtgagggttggcgtggcagtgaatggggcgctgacgggtggggttaaggtggcgcaggatagcggggggaaggtatgggggaaaataacataa

SEQ ID NO: 239357 - DNA, 150 bp, Klebsiella pneumoniae; identical to SEQ ID NO: 99366

SEQ ID NO: 239358 - DNA, 336 bp, Klebsiella pneumoniae; identical to SEQ ID NO: 25079

SEQ ID NO: 239359 - DNA, 246 bp, Klebsiella pneumoniae
atggacgattccactcccctgctcggtcccccaacaaaatataaaagtagcttttgcggcgtaaaaggcttcagccctgatgttcttcatcctgggattttaatactgacccattatccggacagaaatcatccgaatattttcttttactttgcctcgcgctacgtgaaatctgacgtactcacccctccgattttcttcagatttcgcgtagcgcaacctgagcgaaaaccactcgaaaagtaa

SEQ ID NO: 239360 - DNA, 333 bp, Klebsiella pneumoniae
atgaacataaaagaaatatccataactcatgacaggggattcaattctgactctaaaataagtgaagatcttacactaaggagaaccctgttatttgtgatttactcgatcattcctgttattgctctctattacttttctccgtacctcgctgaagccacgataaattgcctagaatctctaggaattgagattaaatatgggttatttctacatttctttgcgacctggttttttttctggggggcggtaactatgcagcatgacttctatcgtcttttgaagaaaacatataagaacgtgagatttttaataaagaaaaagggccaatag

SEQ ID NO: 239361 - DNA, 522 bp, Klebsiella pneumoniae
atgttcttgttatccatccatatcaaggagtgcttcatgttaagcataaaagtattcgcacctaaagttttctatttttgtatctggtctggaatcttgttatacatcttttttgtatcagtaactactatcatgttgagaagcatagatcatgaagtagctacgactttcaaaaatggtgaagggtttgtatcaagtaaaccaatatcggtaaagaaagttgatctttcagatgtcaggaaaacaatgactctagagagactgactggtgtgaagtggaattattataatatcggtgaaaacaatacgatcgggatttttagttatcatcaaataaaagatggtgagattttaacgataacctcacccactgaaaagggacaagaagaattaagaagtggacgttttaaaaagttccaagatttttcttttttcaaaggcttagtcaaggatagtaaaaatttgccttatgctaaagtgtgcgttagcaatggaaattgtttttcagcgatacggctatag

SEQ ID NO: 239362 - DNA, 1392 bp, Klebsiella pneumoniae
atgttatcagtgctcagatgcttctgcttactttctatttttttctcaattcatgcattctccgctgatataaatgattctgaatgcatttcccctgagttgatgaaatattctttcgaacactacacaatttacagtgaagacgattatggtgaagtaacacatagatattccgatatagataattgcaatcaagacgccttcgcagctctcttgaaaggaattgacttcctccgaaaaacaaaagacaaaaaaatcaaaaaaaaatatgaaaccattgcaaaaaaagaaggtgtgatacagttctttaacaaaagagtaaacaccatcattcttttgcaaccggatactagcttatgcgcagataatactgccgcctttgttccaccttccgaaaccaaaaatggaaaaatatatatttgcgattcgataaagtcgatgccatccttctttgtcgcttctgttattttacatgaagcgcgacatattgatggcttcccgcatattaagtgtacgcatgggtattatgctagtagtgaacttgaggcatgtgacagcaattttaaaaaacaaggtgcatatgccattcaacttggctacttataccaggtatatcatggtgagtatactgataaaattagaaatgaagtccggaaattaattattcaattaaccgtgaacaattttaacgctgttttaccaggtgttagaaagggtgggcttttactagatgatgacgataccctatccttttacgatggagctaatgaaactctacttgcttccttcaaggataaagtagcaacgatgattcctgataaaacatacccggtaattttttttaaaaatggtaatctgacaaaatatgacttcactagaaagtgggagataataaatggggatacaactgaaacatataaaaaactaacgcaatcagaaaggaattctttgcttgatgtatttatctcatcaaaagatgtttgttttctctttcaatctctaatcaaatgccaggctgagaatcaaaacaaagacttcgtattgttggatatgcatgaaataaaaccagtcgcattctggtatgatcagaacgtaaacgaaaatgacatgtatgttgtgggtgaaaacagactgatttacaaacttccaaaaccaaaaagatttgaccagaccgtttttgataacattttaaataatggaaaaaaaatatatcctcaggttacctcctatgcagaaatggtagatggtagtcttttaggcatttcaccacaagggaacgtgttgaggaaagaaaaaacctcatcatcatggttaccagcgaaggagtttggcgactataagtttaaaaaaatactccccttttactggagtaaagaattggaagatctgtaa

SEQ ID NO: 239363 - DNA, 549 bp, Klebsiella pneumoniae
atgaacatttacattttaactgataataattttctttatcatgggctatccagcctttggtgtaatgaagttaatttattaaaaattaacaacataaccatgtatataccggataattccatcgtcctcattgatattgattcctcaatgaatgcatcattcctgaatatggattgggcttctaaaccaatttatcagatttttctttctgttaatttggaacggaatgtggtgctttttaatggtgtagttgtagtgaatctaaaaggtaatgcaaaagttgcaaattacattattaggaatttgatttcagactggtcctttatgaaatcaaaaaaagcattcactcattcagaaatggctgtcataagttggttattgaaaggatggaattatagtaaaatatccagcatgatgaatatcaaaaagaaaacggtatacactcatgtacagagcattcagaataaaattggctgcaaaggtatgcattccttctttcttttaaaatgtccgattaggcatagcattaagcgaaaatataacgtttga

SEQ ID NO: 239364 - DNA, 243 bp, Klebsiella pneumoniae
atgcccgttaaaccggatctcatggcttcctcaaagccccatacaggagctcagcgtaaagaaaagagagatatcgccggcaagcatttatctgagtgtatcgctgtgctggaggaactggtagacacatatgaccctgataccgagggtccattcagcgcatgccatcctcgcacaggtgccgcgagcatgaagcgacagcttgagaacatcctcaaagcgctgaaaacagcaaaagtttga

SEQ ID NO: 239365 - DNA, 1035 bp, Klebsiella pneumoniae
ttgcggcagatggcctttgaggtcaatcaggtcttcaatctggcaaatgagataaccagcgcggcatacagcaacgctggtgcttttggtgcacaggttccaaagtggttaaccgcgtttgatgttcagaagatgacaaccggcatacagcgtgagcgcggcttttccatcggcagtgcgacggtgcaggaagtgatcgctcaccacggcaaagcgcggaatcagttcaggcgttcccgcctgcgctggcgtgtcagtggcggcgctcgccgttcactgggctgggtgccgtttaagtcaaaacaggcgcagtggcagaacggctgcgttaagttcgccggacactatttcaaagtatgggacagctatggcctggcgggctaccagttccgcgccggtagcttttccgaagacagccggggccgctggtacttcaatatctgcgtagaggttgcgaccgtccataccacgggcgcgaccgctgttggcatagacctcggtttaaaggataccgccacggtatccgatggcagcaagcttgtcgcgggccgtttttatcgtgatctgcaacccgcattaggcagggcgcagcgggcaggcaaaaaagcccgtgtacgcgccatccacgccagaatcaaaaaccgccgcaaagatgccctgcataagttcagcacagcgctggtaaacagccatgcggcgatattcgtaggcgaggtgagcagtaagaagctggtcaaaaccagaatggctaaaagcgttctggacgctggctggttcatgctcaaaacacaactggaatataaagcgatagcgcggtcagtggtgtttgaagtggtcaatgaaaggtattccacccaggcttgttcgtgttgcggggctatctccgccaacagtccgaaaggtagagcagacctgcgaataagagaatggacttgtcgtgagtgcggaaccgctcatgaccgcgacgtaaacgccgcaaagaacattctcgcggcaggacattgccgtctggctgcaggaattcccgttctttag

SEQ ID NO: 239366 - DNA, 228 bp, Klebsiella pneumoniae
atgacaaaatataacgagctcgactcaaaaatactgaacaaaattggtgagtacccagcaccattttccagtctgtacgtcaaagatgtagccgaagaatgtatccgcattgcaaaggaggagaataagcctgaaccctttcgcattctcgatcgccgactccaggcactacgtaaagctggtgtaatccgcagcacaactaagggatgggtgagggccaaatcatga

SEQ ID NO: 239367 - DNA, 264 bp, Klebsiella pneumoniae
atggctaagcgcgattttaacccaactggcgcgacatgctggcagggcggtagttgcactcgcagggggataactcgtcgtcatcgttatatcaccggtggcgatggacgaaagttcgaatcgtgcccgtacaccgacgactggtacgcactcggcgacacctttgacacctttgggaatccgtaccggtatcgaatcaccggggagcaagccagggttcttactcagttctgcaaagacaatttagaacaagagaaaaactga

SEQ ID NO: 239368 - DNA, 1434 bp, Klebsiella pneumoniae
atgaataaaataaaaatcacaattccattactttttgtagtaattgttaccggctgtgcagaaacacaagagccagggatagtagcgcaagagtgggcaaaaaatacccggcagttaaacatatttcctttgttccctcctagggagagattttatcccggagatgtatatatattcccatttatttctcccaaaatggtagataaagttccaacgaaattttacacaataaaaccgataagattcacaagatttgatgtttctgacctactggaacaagaacaagctattccaacgatgccagaaacaaaggaatgggaaaccctgggcaatgctcagtcacgaataggcgcttttgtaagttacccctcagctgaatcccgacagaatggtataatagcctttcctggctactcatttgcttcagtgagtgatgtaagtctaggtcttggaactgtgaccagtgcgatcgcacaaaaactatcatttgctagtagctctaggcgaaacataactttcagcattccatatgctgaagttatcagtcttgattttagctcttctatggataaatttttattgtacaaatcaactgtggatggatatgagacgtctaaattgcagtatctgaagaagagaatggagttactgatcgataatttacttgatggtgcgaataataaatatggcattactccaggtattgtttttgtaaccgatgtgtattatgcaagatcaataaatgtcacaatcacatcagccgacggttttagtgcttcagaatcggcatcgctggcaaaatttaccgcattatcctcacgcagagaagcattagtcacgaaattaaatgcaatatcagaacaaaatagaagtttattagcaaaaccgggaaataaagaagaatcaaatggcgagccatcaacacctgatcaaaatgctacaggagtaacacctccagaaaagacaaactcgacaccagaaatggattctttggcgagcgaaataaatgccctggacttacagcttaaaatactctcgcaatccgtagctccagataccttaggatttactggtaatgttacgagagcttctggaaatagtcttacaataaaccaggtatttaaatatcctgtcgccattggctataacggcataactatgcctgtacaagattttatagagatgaatgtaaaggttacaccaccgtcaaaaactaaatttcaagccgaaaatcaggataatggaataaagcaaccagttaataagacagtatccaaaaaaccaattaaaacaatagataaagccccgtcacaagggaaaccagttgctgattggcccaataaaccaggtagccttattggagagcctgctttgcatcaaatgacctctgggctagagatagattttgaagatagtaatgatgcaaaaaaataa

SEQ ID NO: 239369 - DNA, 507 bp, Klebsiella pneumoniae
atgttaattaacaataaaatcaaaaaactaataaaagcaaaaaaaaggaaggctattaaaataatttggacgtgccatgccatcgaaaggaaatatcctcaacctatttttatagcccttctttatttaccttggcttcctttaatagcatatattaagctattcccgcaaatttcaactttaactgcattactgatatacggatttgggattataataatactctctgtatggttctatttggatcttcctaaaagctggattgattcacttgaccgtcaaattttgaagtaccgatcatataagccattcattgatgagctcaaagaagtacacactgaagattttattgatcatggcaaggaaacactgacgattagcgacattcaatattgggctaatgaccaaaaatggcaactggagaaactacatagaaaatgtaatcgcgtcaaaatcaaaaaagaggtggttgttaaccttaaaagttttgaaagtaaaaaggactga

SEQ ID NO: 239370 - DNA, 1143 bp, Klebsiella pneumoniae
atgaaaaaaaataaagtatatattcgtggcgcgtatgcccctggtaatatcggtgatgatgtactgatgttgagtgttataaatatagtaaagaaggtagtgccggaaaaatttatttcagtaggggttgaacacccatcactagcaagaaaatataattctaatattgactggatacatataaaaaaacctatctcagcggatgttgttgtgtttggtgggggggggcaatttttttcatttaacccacctcccggagtcaaatcgagtttaatttctaaagttataaaatctataaaagcccaagaaaatctattcactgcgatagaacgactgatggtatcctcgtgcggcgggttagataaaatttatataccaaggaaacttgctgcattttgtattggcttagggccatttgataatcacggcaagggatatcagcgtgcagtagaaataataaataaatgtgactatgtttcggttagggatgataaaagtaaatcctattgtaaaatgcttggcaatgagtctgtttcagaatttactgatcctactttattatctgacatttggtaccctaatcagataaaaaagccatactattctgacaaggggtatatctcaattgtattaagagattggccacatgataagaatgggcaggattttactaaagagttgattaaatttggtaactatttgattaataatggtgaaaaggttcggttcgtatcagtgtataaagaacgtgaagaggacttaattgcaaaaaatgataatattgactggctggtttgggatgcaagaaactattcgatagttgaattcatgaatgaattcgttggcaatagtgaagttatcatcagctctagagcgcatggcgtactgcttcctgcttctttaggtgtaccaacaattgctgttgcaattgagaataaactgctaaaagttcatgatatgatttcggacggaaatattatagtgaaaatagcggaacataaagcttttgatgaagcattgacctgtttcaggaaagataaagaacagttgagagttaatttggaacaagagataactaaaaatcatcaaaaggtgaaagatgcaattgatgaatttacaaaatggcttaaggataacgtttga

SEQ ID NO: 239371 - DNA, 1437 bp, Klebsiella pneumoniae
atgcaaaataattcaattttatcgagattgttaaaagactcaacctggagtatgatttcaacttttgcaaataagatttcatttgttattgttggaattattgtggctagaattttaggagcagaaaagtttgctatatttgcgataatacaaagcgtggtagtgatgctcgcgaatgttttctctcaatcgataacaaccgccacctctaagcatatagctgaatatatagaatttgataaaaataaggtaggcgcgggaatcgtggcaacattaattttttctatgttgttcgcatcaactatttgtctttgcgccaatttttttcctaatgaattttctatatacttgctgtttcatgaagactatttgatatttgttagcagtacagctggtattattgttcttacgattggattggggtgggttcagggcgttttttccggttttagaaattttaaattaaatgcagcgatcaatttgctttatgcaggtatatccgtaccatttgcatatgtattaacatctaaatatggtattagcggagcattttatagcgtaattattagccagtcagtgactcttattataagtacccttattatattttttatacttaaaaaaaatcatgtcagatttattattaaaagttcatggcgagaaagaggagttattacccatgtagggttgccagttttcctcaccggcattattgttgctcctattacgtggtattctaataagctattgtcagtcctttcagatggtcttaaccaacttgcggtttttgctgcatcaatgcaatggagttctatttttacgcaagtttctgttgtgctaggcgctgttttaattcctatgttggctgcaaataaagataaaaacaatgagttgctagatagaattaatttctattcgagttggctttttacgataatatgcacagtgcctcttattatttttgttgacttgtttgtaaggatttatgggaagtttaatttaacctctgactttaaagttagcgtaatatttgtattatttagcgcaattttaacatcatttaaggggggggttgctagaaaaataattatattaaatctatcatggttcagcgtgctgagcaatttaggatgggcgtttatatttgtagcgttgacttggaaaactaaaaaatatggagctgttggaattactggtgcgttgtttttttcacagtttatacatttcataattacaataccttattttttaaaaaggaagattattgacatatccatgatttttaatatacatgtcttaactttgatttttgtgcccatgatttctatttatgtaagctttcgaattgacagcctgattcttaaagctatagcatgtgttgttattatggttttttcagtattcaaatctatagatttgataaaaataaggaagtaa

SEQ ID NO: 239372 - DNA, 1122 bp, Klebsiella pneumoniae
atgttttttataatcttctcgatgttcatagtgttttctattataatgttgattggctcgccaaaaaaatctttttttatatttcttttgattatagccattatacctacagggaactcctacgcagattttatatcgctgcaaggggtgtactattttgatttctatctgattggtttttttatactaatacttaaaagcatcatgagttatagtagtgagaaaaatatctctattccgtactcgactcttttcggtatttttacatatctatgtattatacttgtgtctgttgtcagtaataatggctataataaaaatacaatatttaagattttgtttgtaatgtttatatttagcattattcatctgatattaccgagacttggagtatcagtgtataaagatgaatattatgaagataactcttatagatatcttgatgcatcaacttacgttgcagcgatatacattatcaattattttactagcaacatgaagaaagaatgtggaaaatgggctagattatgtttctatgcagcaattctttgtgtgctagttggtaactcccgctttatgcttttggccatcttcgcaagtataatctttgttagcgttaaagatgtaaagaaaatggctatatactccctatccgctattcttgttgctggtctttttttaggggtgagtgtttatgttggtgctgatagggtggtaaatggattttcaggcgatgtactgctcttccagatcactaacagattctcacctgctctaagtttaattgataaaatgtcatggtataactatatatttggattgggagctggaacatattttgatatcccgtggtttgcataccgtggtcttgaaacccaaaacatttccgttgatagcttatatttaacaatgtatgttaaatatggattgtttggacttatgcttattgctttatttacaaaggttgctgttaatggtcttaaagcaaacgtaaaaaaagcagttataatattttgtttaataatgtattttgtgtcagctataccttatcacccttattccttagggattattgttgggggagccgttatgatattacttaacagaaaagaagttgtatag

SEQ ID NO: 239373 - DNA, 132 bp, Klebsiella pneumoniae
atgctttttggacattggatagatcaacgggaaatcccggatccctataaaaaaagcgaagaagcgttcctgtctgtctataaattaattgagcaagccggaaagtactgggctaaaaaactaagcgcataa

SEQ ID NO: 239374 - DNA, 375 bp, Klebsiella pneumoniae; identical to SEQ ID NO: 190911

SEQ ID NO: 239375 - DNA, 693 bp, Klebsiella pneumoniae
atggcaatatctgaacctgtcaggtctcttgacacacatgaactgatgcctggcgatatttacccacatcctgcagtgggggaaacttattccctgtcacatcgcgaggtctgttctctcttcagtgaccacatcatgtatatctgcagcgcgttggttattcttctcctggttttcattgcaggtgtctttttccgaaaattaatgacgtcttccgcggaacgtaagcgagacaaggtgtcagttattcccgatacaaagccagaagcacagagcaaaccggaatatttccatctttccatatgtgtggaaggcccggcctgcacggatgattctgttctgtcctctcttgcctcccgtgttgtgcgcgaagctgaagatttgtatatccccggcgtcaatcgccgcgacagcgctgacgacgtgtttgcctggtccgtgcagactcagtttccttctgacaggctcttcggcacccggattttcccgggcaccggctggattgagcgtccggatattattgaacaccctgcgaaatggctctgcatctgcctgcagtacacggctgaaacattgccatccacactgcatgccctagtcgatgaggccggtcggcaggtggcgcagtcatacattagaggcggacattatcatggctctgagggctataccttctgtataagtcagttctga

SEQ ID NO: 239376 - DNA, 348 bp, Klebsiella pneumoniae
atgcattgtgtcacagaggcatatatggctgctttcctggctattctgtgtgtcacgttaactggatatatatttgctcgtaatattaacgtttcagagtatctcaggtgcacattcgttgtcatactcatacaaagtattttcattggttatgtggcaaagcagggtgtaacttgggacgtagtattatttatggctgccagtattcagtgttgcgcgcctatacagaccatgtttattcatcgggccacttatacccggcagacccgtaaattgatgttcaggatttgtattatggctgggatgccattgcttgcgtggttgtcgatagttttgagacttcagtga

SEQ ID NO: 239377 - DNA, 156 bp, Klebsiella pneumoniae
atgccgcgcgatcctgagcggatggcgcaggcaggattaattgatcgcagcggcgagatcttttttcaccagctcgcgcagctcagaaatcagcacctggcttacgtcgaaatggcgatcggggcgttacgcatgggggtatttaaaactggataa

SEQ ID NO: 239378 - DNA, 198 bp, Klebsiella pneumoniae; identical to SEQ ID NO: 21570

SEQ ID NO: 239379 - DNA, 159 bp, Klebsiella pneumoniae
atgatgcgtcagggggtgatttccgccgttatttttttactgctggcaatgctggtcatgatctacatgccggagggatatgcagcgattagctgggccataggcgcaggtgtggttgtgacgctgattttaattcgtgcccgaaaaggaggggattga

SEQ ID NO: 239380 - DNA, 546 bp, Klebsiella pneumoniae; identical to SEQ ID NO: 95960

SEQ ID NO: 239381 - DNA, 609 bp, Klebsiella pneumoniae; identical to SEQ ID NO: 152299

SEQ ID NO: 239382 - DNA, 1812 bp, Klebsiella pneumoniae; identical to SEQ ID NO: 152298

SEQ ID NO: 239383 - DNA, 1374 bp, Klebsiella pneumoniae; identical to SEQ ID NO: 152297

SEQ ID NO: 239384 - DNA, 1266 bp, Klebsiella pneumoniae; identical to SEQ ID NO: 152296

SEQ ID NO: 239385 - DNA, 1185 bp, Klebsiella pneumoniae; identical to SEQ ID NO: 152295

SEQ ID NO: 239386 - DNA, 1470 bp, Klebsiella pneumoniae; identical to SEQ ID NO: 152294

SEQ ID NO: 239387 - DNA, 1431 bp, Klebsiella pneumoniae; identical to SEQ ID NO: 152293

SEQ ID NO: 239388 - DNA, 741 bp, Klebsiella pneumoniae
atgctgcgcctgatgatcattgagaaaaaatatgccgtaggtgggagattaccgccagaacgcgaaatagcagacatgcttgaagtcagccgtacggtcgttcgtgaagcgttgatcatgctggaaatcgaaggcatcgttgaagttcgtcggggcgctggtatttttgtggtacgcattcctgatgggaaagagggggtcgtcagagatgaagagagcagcgacgagaatacaccgaaccagtgtaatgatgccggtccttttgaacttctccaggcccgacaactgctggaaagtaacatagccgaattcgccgccttacaggcgacccgtgaagatatcataaaaatgcgccgcgctttgcagttgcaggaggagggggcagtttctgacgatcacgaggtcggtgatatgcaatttcatctggcaattgctgaagcgactcataatagcatgttggttgagctgtttaagcagtcctggcagtggcgtgttaataatcccatgtggattcagctccatcttcatttacgtgatacacagtaccgtaaggaatggttggtcgatcacaaacagatccttgctgctttaatcaaaaaagatgcacgggccgcgaaattagccatgtggcagcatcttgagaatgtgaaaaaccgcctgctggaactctcagatgttgatgatcttaatttcgacggttacctcttcgaatcctggccattacgtgatgctaacgcttga

SEQ ID NO: 239389 - DNA, 3009 bp, Klebsiella pneumoniae; identical to SEQ ID NO: 142903

SEQ ID NO: 239390 - DNA, 315 bp, Klebsiella pneumoniae
atggttctgacgactctgatggttctgacgactctgatggttctgacgactctgatggttctgacgactctgatggttctgacgactctgatggttctgacgactctgatggttctgacgactctgatggttctgacgattctgatgtttctgacgattctgatggttctgacgattctgatgtttctgacgattctgatggttctgatggttctgatggttctgacgattctgatggctcagacgactctgatggctctgatgactctgtatcttcttcacgtacaacaccaagtttctcaccagcacagctaa

SEQ ID NO: 239391 - DNA, 774 bp, Klebsiella pneumoniae
atgaagcccggtttacccgccagcgttgatgcccgtggacgtttgaggccctgtttacccgccagcgttgatacccgtggacgtttgaggcctggtttacccgccagcgttgatacccgtggacgtttgaggccctgtttacccgccagcgttgatgcccgtggacgtttgaggcccggtttacccgccagcgttgatgcccgtggacgtttgaggcttggtttacccgccagcgttgatgcccgtggacgtttgaggcccggtttacccgccagcgttgatgcccgtggacgtttgaggcttggtttacccgccagcgttgatgcccgtggacgtttgaggcccggtttacccgccagcgttgatgcccgtggacgtttgaggcttggtttacccgccagcgttgatgcccgtggacgtttgaggcccggtttacccgccagcgttgatgcccgtggacgtttgaggcttggtttacccgccagcgttgatgcccgtggacgtttgaggcccggtttacccgccagcgttgatgcccgtggacgtttgaggcttggtttacccgccagcgttgatgcccgtggacgtttgaggcccggtttacccgccagctgtgataatgttgaacaggacgccagtaattcgccctccagcattgatctcaatggccgctgcgggtccggtttaccttccagcagtgacgactttatgttaagtgttaaatacaaatgtgggacatttctgaacgaccgttttacttgttccggtcattga

SEQ ID NO: 239392 - DNA, 243 bp, Klebsiella pneumoniae
atgattattcaaaaaagtatcagacaaatgaaaaaagaggcatggacattaatagcaatattatatttatcaagtatctcattattaatattaacagtgaatgtattaccaaaaacaggattagatagcttttacataattggcggtggtttaatggctttaacttcattgttatcatggaaagaagcatataagttagttaactgtataaatgaagcaaaaggaactaaaaagcctgaataa

SEQ ID NO: 239393 - DNA, 378 bp, Klebsiella pneumoniae
atgaatatagatattatcggaagtttcaataaagaaaccgctattgattacagagtgttttatacaaccgactattttgaatggttaaaagacctacataaaacaaggggtgaaaagataacgcttaaagagctacacaataacttaataaaagaatatggttcattggttaatgttattgagttaatactcagaacagatagcaatattggaagtatcaaagaatcaacattcgaaataatcgatgctgacaacattctttttgaaggcagtgaagatttaatggctgttcgattagtgatgaacatagaatatttagatatgtggattaagaaatttgatttcaataactacataacagaggcatttaaaaactaa

SEQ ID NO: 239394 - DNA, 270 bp, Klebsiella pneumoniae
atgataatagaagaagtaataattaatgacgttaagattgttttatcgagagggaaaggaggtaaaggaggtgaaaacaatgaaacatataagttctatatttatatagtgaataaggatgtttcagtttacagggttggtaagctttcaatagtgatttggcagcattcgatttacacatcagataaagccttaattcaggaagctcaggatttagcaagcgcagtattcaaatataaaacagaaaaacttaaagaggtgattttatga

SEQ ID NO: 239395 - DNA, 561 bp, Klebsiella pneumoniae
atgtcaaaaaacaaaggaacagattacttttactttaaacccttccgttctggttctgttagctttccaagaccaaatgaagcaatctatgtaatagatgttttatcaagagatgatatagtttactttgatgattttggatatttgatttcagaaagagcgttggaggttttaaaaaaacataacttaacaggcgtaaaggtggataatgctactgttaaatttagcgcaaaacataacataagatacaaaaaccagacattacctaaattctaccgattaatacctactgagatagttgataacgaacttagagaaatgtttttggatgaaaactataatcttataatcaacaaaagaataaaagacattataacaaataaagatttaatgcgcttacagcgttcttattttgaagagattgaacttgaagatgtattagatgattatgaggatgaagctgaaacacctgtttataaaaacgcaaacaaatcaaccataaaacagatcattatcttcaccgttgttatggcgttagtcgcatatctattttttaaataa

SEQ ID NO: 239396 - DNA, 207 bp, Klebsiella pneumoniae
ttgaagcgtctaaaagtgatctttctgactgattacatgagattagccccgcaaggggctgttattaagaaggaaccaacaatgaaaaaacacatgaggaatatgaataaatacataaaacaagcgttctgtgatatagcctttataacattttttatattaccgtttacaaccgagtatcatagaatctattcattcattttttaa

SEQ ID NO: 239397 - DNA, 654 bp, Klebsiella pneumoniae
atgttatcgttaaatttagcgttagaacgtttggataaaataagtaaatactttgttcttaactcccaaaaagatttgatttttcgagatgcttatacatttataatggagactgtttatcactctgttaaaagcaaaataacaaatttagatgctgttagtaatggtggtcaactcattgaaatgaaagcaccttttaacttcatcctatgtagaacagggcgtttcattgttttggataactattatacaatcttaccaaaaaaagatcgggatgattgggaaaggcatatacataatataagcatagaagaattcatttatagcttcgacaataatacaacaaggtatttattacttgattgtaaatattactttgaccagttcaatattacacgtctggattttaatattatttcaatggtatataacactttttatgaggttttccagttagacagattttatgatccagtagtaaacagaataacagccgaagagattgaaaagcatataaacggcctacagtttaataaatcatcttatgatgaagttatcaggaagaaaacatatacctactttctcaggcttctcaggttcattgaggggcatgaagagacatggtatttaccaatgaagttagaatacaaataa

SEQ ID NO: 239398 - DNA, 2916 bp, Klebsiella pneumoniae; identical to SEQ ID NO: 94635

SEQ ID NO: 239399 - DNA, 246 bp, Klebsiella pneumoniae
gtgctagcttttcgtaccgtcacttattgcactgaaaacgaggagaccccgggcaagaacaccaatgtgtacctgggctcagccgaactctcggccatctgctccaagctgggccgtattcccagcaaggaagaatatctggccgacgtgggcgtcattaaccagagcagcgacaagatctaccagtacctgaacttcgaccagatcgaagaatatgtggagaacgccaaggaagcgactgcctga

SEQ ID NO: 239400 - DNA, 1617 bp, Klebsiella pneumoniae
atgctgtgtatttacacagtatttatgccagccacctccaagcccaagctctacaacccgcgccaccccgagcgcacgctgctctaccaaacggtggccgagcattacgagacctggcttgatctggccagcgccggccagttcgacggccagggcgaccaccgcagccccaagccctatgtgcgccaagcgtttgccaagtacctggaatgcggcatctttgcccacggctttgcccgtgcccgctgcgacgactgcggacacgactttctggtggccttttcctgcaaaggccggggcgtctgcccctcgtgcaccacgcggcgcatggccgagacagcggcacacctcaccgaccacgtcttcccccgcctgccagtgcgccagtgggtgctgtcggttcccaagcggctgcgctactttatgcaacgcgacagcgtggtgctgggcatggtgttgcgcatcttcttgcgcgtcattgagcaaaccctgcaagccaacagcccatgcgcagcgcatgcgaacaaggccgccctgcacatcggtgcagtcgccttcattcaccgctttggctccagcctgaacgagcatgtgcatttccatgtgtgcgtggtcgatggcatgtttgaggcggtggcaggggaggcgagtgagcagggcacccgcaccacagcgatcagcgtcatgtttcacccggctatcggcatcgaccccgaagcggtgacccaagcccaggccagtttgcgtcggcgcatcctgcgcgcctttgtgggccggggcctgctcgaaggcttcgaggcccaggagatgctggggtacaaacacagtgggttttcggtagacaccagcgtgtgcatagcagcacaagaccgagcgggcctggagcgcctgctgcgctactgcgcacggcccccgtttgcgctggataggctgcgcaaagcgggcagtgagctcatttaccgctgcgccaagcagcacagcgagcctggcagtgaccggcgcgaccaacgcaaggcaaagcgaggtgttcgggccgacgaactgcacctcacgccgctcgaactcatcgaccgccttgccgcgctggtgccgccaccgcgtgcgcaccgccaccggtactacggcgtgctggcgcccaattcacccctgcgggctgcggcggttgcactgggcgcaggccaaaccgcaggcgcgggcacgggcacggcacagcccgagccaggcggtgtgaccgcagcggtggatgccatgggagtggccacggtcggtggtcccagccagcccgagcccacccagccagctctgcccaaacgctcagctcacattctgtgggcggtgctgatcgcccgcatctacgaggtgttgccgctgttgtgcccgctctgcggtggccagatgcgcatcatcgctttcatcacctacagtgccgacctccggcacatcctggagcacatcggggtggagacagagccgcctcgcatcgcgccagcacgcgggccgccgctgtgggatgggtgcgatgtgccgatgggcgatggtgtcgaggttgagccagattggggcgaggcggcccaaccggcgccggactttgaggtcgatcagcgcgtcagttggtaa

SEQ ID NO: 239401 - DNA, 540 bp, Klebsiella pneumoniae
atgcaaattataaatatgactcaagtaaataaaacacaactaatccaagcagcccaaatattgactgatagtattccaattggttggccaacacttcatgacgctatggatgaaataaaggagcgcttgattccagaaaacacattacttgctgctattgaaaatgatattgtaatcggttggggcggtatacttgcacccatgtataatggaaatgtattcgaactacatccgttagctgttcgcagtgacaagcgaaatctaggtattgggaggacaatcgtaacagctcttgaggatgaagcaagaaagcaaggtggcttgacaatacatttgggtgctgacgatgaaggaggcgatggggaaacatcttttgcaaatgttgatttgtatgatgatttaccaggaaaaataaacaacttcaatgccggcactcatcaatctggattctacttaaagctcggatataagattatcggagttatgcctgacgcaaacggaataggaaaaccggatatttatttcggcaaaggattataa

SEQ ID NO: 239402 - DNA, 1233 bp, Klebsiella pneumoniae
ttgccggaagtgattctggccgttgacgcccaggtgcgctttagctggatcatgctcggacgtgagccgcgctctaccgacgagctgctgatggtctatgccggcatcatggcccacggcaccagtctgactgcggtcgaatgcgcgcgcatgattccgcaattgtctgccaccagcattcgccaggccatgcgctgggcgcgggacgaacggcgtctgagccaggcctgccaggctgtgctggaattcatgcagcgacacccgattgccgccacctgggggcggtccgatttggcatcttctgacatgatgagcatggagaccaccaaacgggtgtggcaagcccggcttgatcctcggcgcaacacaccttccattggaatctactcccatgtaaaagaccggtggggcatcttccatgcgcagccctttgtgctcaatgagcgccaggcgggcgtggccattgaaggtgtcatccgccaagaaaagctggagaccagccagcttgctgtggatacccatggctacaccgactttgccatgtcacatgcccgtttgcttggttttgatctttgcccgcggttgaaggaactcaaacagcgccacctctttgtgccacgcggcaccaaagtgcccgcagaaatcgctgcggtgtgcgaagccaatgtcgacgtcgctttgatcgaaaagcattgggatagtctggtgcacctggcagcctcggtcatgagcggacatgccagtgcggtggcagctcttgcgcggttcggttctgccgcccagggcgatccaatctatgaggctggcgtgcaattggggcggttgctgcgtacggcgtttttggctgactactttgtcaaggacgctttcaggaacgagttgcgccgggtgctcaatcggggcgaggctgttaacgccctcaagcgcgccatttataccggccggatcagcccggcgcaggccaaacgtgtcgatgaaatgcaggctgtggccgatgcgttgagcctgatggccaacatcgtgatggcgtggaatacctcacagatgcaggcggtcctggatcgctggtcgaaccgccgccaggtcattccaccggaactgatcgagaagattgcgcccaccaggctggagagcatcaacttgcggggtgtgtttcgcttcccggttgaccgctatgctgaccaaatcctgccttcgcggccaaatgcatcgataactggcaccaatggatga

SEQ ID NO: 239403 - DNA, 885 bp, Klebsiella pneumoniae
atgaacagtgaaaacaatcaattaccgttaattatcactgaaatagaaaaaagtacgggtgaagttatacagctgatccccaactctaaacaaagcatccaacctaaatcgcttctgcgactgggtgtatttgttccgaccctgaaagatggcgctgatcccatggccagaggacatcacatcgacgccactaaggagttgtgcagactgtcatctctctccggagaaggttatgagaagatcagcattttcggcccgcgccttgatatggatactgattttaaggtctggttaggaattgtggattcactgaccaataagtacctggaaaaggacggcacagtacgaatgaatttcattgattttgcatgcagctgcgggctggctacaaagcgtgtcgattcccggttacgcaagcgattcagtgactctctgacgcgaattcagcatacgcatttccagttcatcaagccgtcttcggttgaaggcaaaaaaatcaaaattgatatgagtctggtctccacctcttactatgatgagggtaccgatgaggtcatcatcaggccaaacccggacctgaacaccctctaccaggtcgatggtaaaaccaggctataccttaaaattctgaaaactctggcccgaaaagagtcagcacaggcgctgtacctataccttgtggagttaccggataacttctatcgcattggctttgaccgactcagggaacggctgcaactcactgctcacaaaggctctcagaatgccacaatcagacgggctttggagcagctggaagaagctggcttcctgaagtattcgatcgagaaatcccgtggtgattatgtgctggtcattctaaacagaaataagaaaatagcctga

SEQ ID NO: 239404 - DNA, 537 bp, Klebsiella pneumoniae
atgattatgaggtctgacagtccagcagggagacaagcaaagggggcgtatgcccctttgtcgtatctggagctttaccctctacgtgtgatagtcatatactgtatatccatacagcaaaaggagacacagatcatgggctttccatcaccggctgcagactacactgaaaaaccactctcactggatgcgttatgcatccataaaccgcacgctacgtactttatgagggctgggcaggcatatttaagggctggcatacaaaagggcgctacgctcgttgtagacgcttctgttaagccttgtgatggaagcatagtgatagtggcgttaggtggggagttcgtagtgaaacggctaagacttcatccagctccggcgctgttgccattggactacacaggaaccccggtaccgatcgatctcgatgatatggacgagaacaacgctacccggattttcggcgttatgacgtattgtgtaaacgacatgcgaacaggcgagttcgacgacaccccatatggcatagacggctaa

SEQ ID NO: 239405 - DNA, 1047 bp, Klebsiella pneumoniae
atgaataacttaaaagaaaaaatagaaaaagctttagataaatgtgatgtggttgttgtatctggtgttagcggtgtaggtaaatcgactttacttaaagagatagcaaaagaaagacatatacattattcaaatcctacttataactgtattaagttcggcattaaacacagcgatcttattgctattgatgatgtgagagaaacagaactaaaaaacgtgatacaaaagattcaggatgctgtagctaaaacaaacataaaaactaaagcgataatagtggttgataagtttgataagtctgttcttgatagcgttgtattgaaaataaagcattacagaatggtaaagccaaaatcaaaaggtgtcttaccaaaaataaaagagtatcaggagcttttaaaatcaatagaagaacaaagatttcttactgataatgttcagatctcatgtttgaacgatttgtatcaaatggaacaagaattgaagtatttgagagatttgaatgaaaagtatgaatgcgaagctgttttacatgaccataactatactcagttatctcttgatctcgatgatagcaaagcagagaatgaagagctaataaaagagaactacagcttacacttaaaaataaaagagcttaatgatatactttatgaccaaaacgaagaaaaaatagaacttgaaggttctaatcaggagttagagcagtctctttctcaatgctttaataaaattcaaacatatcaaaatacagtagctgtttttgaagataaaaccaaacttcttgaaaaagctaataacgatcttgaatgtgaaatagattatcttaatgagaaagtgcattgcattaaagaagagttagataatgaagttgaggaaacagcatttttcaaagaaatgtcagaagattttatttctcagattaaatggttaaacaacacgattgaagtttatcgcggtgaagttgatgaggacactataagaagggttgaatacacggttcaacagctcagggaaagtttcggtgatgattatgaggtctga

SEQ ID NO: 239406 - DNA, 843 bp, Klebsiella pneumoniae
atgaaagattatgattttaagaaagattatgagtttgaagatgactttgataacatcaaactctacaaaactattgataacaaagtaagacctttaatcaaactctggaccagagaagatctattgttcattccagacgaatatatacaagttgaatctgatagcaaagatgagattaatgaaaagattttattcgtcgagtttctattgaatgaatatattgaagcattttatacatacaaagaagataagaaagaagctgttaaactattaaatgaaatactaataaagataaaagatatgttttacgatggagtattgagttgtacgtttgtattttatctcgctcatgcatactacttattattcaatgaactcaatacgagttatctaaaaagagttgttgaaagcgaggattacattataaacaaacatctaaatcttgtcactatcaatataacgaagaaaaatagaaaaatgttgaaggagttgtcaaaatctttgtcaggaacatctaatacaaatacaacaggaggaatgtttcattattcaaatgagaataaagttgtacatatgttatttagagttaataacaaaaatccttttgatttcataaccagttttagcaaggtttttaaaactgaagtgagagttacgactttgaaagaatatggtttaagttctgagtatcgttacgaagaatactttaaaaaaggtgattgtatcataacaaataaaagtgaagatagcagtgattgcagtgtacctatgcatataatcagaagatttcaacactttgtagatattaaagatctattaataacaaaggggaataataaatga

SEQ ID NO: 239407 - DNA, 198 bp, Klebsiella pneumoniae; identical to SEQ ID NO: 167606

SEQ ID NO: 239408 - DNA, 228 bp, Klebsiella pneumoniae; identical to SEQ ID NO: 167607

SEQ ID NO: 239409 - DNA, 1209 bp, Klebsiella pneumoniae
atgaatgaacaatttttagataagttcgatagagctttcattgctgatccaacagaagcattaaaggccgttgacgacatggccacatctctaatgtcagagatagaacagaagagaaaagccggtgttaaagagttagatcccattatggtaaagctacaagaagaccatgcttatctctccgggctacatgaagaaaagagcgaagagctggcattacatcagcgcctacacaagcaagctggcatcgagatagacaatccctttaatgctaatccagcgcctgcaggtgatgctccaaagggtagaagaccatcattcaataccactgtagtaaaggccgttgtatctcaacagcctgtagttgaagatctggatgatgaagagctaaagggtgaacagaacttaatgacgaacgacgacatagcgaagttagctaaagctgtcagtgataagcagactcctgcagctccggtagaacaaccggaaggtatggacatatcccaatttaagccagaacgtaagcaactggacttatcagggcttgatacgttcaccatgcgtaaagcagaagaggcaaaacaggcagctaaaccaacggctgttaagctggatactgacgaactggataactttagtaatcgctatgccgggaatgatttctttgaaagaatgaagaaaaaggaaaaagaaaggttttcagcttcttctcatgcttctgttagttttgtgccagaacatgaaatttataaaatgtttggaaaaagcataaaagagattaaagataaaaacacatcaagaaaaataaccttccatgatacatcttatatgactgaaacggctcaaggtctttcaatcgtgtcagaagacagagcagcagcagcacaacgtttaactatgatggctgtagctaaaggatggaacagtatcacgtttgaaggtaatcagcttttcttagagcaggcttatgaagaagctactaaggcgggtttagtggtaaagcccacatcagaagagcaagctaagatttttagagaaacacatgaaaatcgtaagcttgataggataatgccttacggtggattaaaagaagatagaaaagtggatattgataaaagtattgaaaaccccggacatgatcatgaacaatcacctgttcctgttcaggctccagtttataccgcaagaataccaaccagaatgaaataa

SEQ ID NO: 239410 - DNA, 552 bp, Klebsiella pneumoniae
atgagcaagatattaaaaaaaggagtcgataaggttattgattctaaaactgttaactttttaatgcctgtaaaaaaatcgaaagacagaatagaagatgttttaaaatttaaaacaacaagaactcttcttaaaatgagtaagcctaaaaaagctaactacgtaccttttgaaacattatgtgagaagaatgatattgatgaaaaagaattggcaaaacgttataggataacatcaacattcgctttgataagtttgattggaatctttggttggttggggtatgccattttatccctaattcaaggtgatttatttgcaactatcagatgttcggcaacattaatcgcatgcataggtatatacttttataatgtagtagatgcttattgttatagaacgagacagacgtattctaaactatcttttctgaattctttagaacacattataccaaatccttttcacgacttcgcacaagttagcgttgtagaaaaagatggaaaagtagtaaaaaagttaaacgcttttttactatcgaaaaatgattaa

SEQ ID NO: 239411 - DNA, 2229 bp, Klebsiella pneumoniae
atgttgtttgttaacttagcatatgctaccgaatttggtaatccaatggctgatagttatgctacaaagtacggcttgccattatttgatgctgatacatcgccatttacaactgtgttatacgtttttaacatggcaacaatatttatagcgggtttaatatttgggtataatgccattatagggacagtttctacagctcatgatggtcaaatgttaggtaaaaaatggtcatcaatgatgatgccaattagacttgtattagctataggttttatgatgcctattgctggagatggtggcggctttagcgtaatccaaaaggtaatatatgaagctggtcgtcagggatcaggtgttgctgatgctatatgggcggcttacgttcctacggcattaaacgggaattcatatattccgcctgaaacatctgaaaaaataaaagaactattgaaaaatacagttcaaagttcagtttgtgtagctcaagctaataaaacaataaataagtcaattactggcatgacagcaaaactattccctgattataagcaaatgaatgattcaacacgatttggctacaagtcttttacaaaagcagaaagtgatgggcgtagaatagttggttataattggggaagaataacagcaccaaataatgtattccctccatttacttctgatgcgtgtggaacaactcaattagtatttgatacccctaactttgatccagatacaaactcaactattttagtggacttaaagaaaatagcagcggaaatgcaaaacattcagataaaacagatggatgatttagttaaagaagctgatgttatcggaaaaaggatagtgaatgaaaataactatagtaaagatgatgctttagctgatatgaaaagactttcagaaaaatattcaacagctttaaaagaagctgctaaagagcaatttgctaaagtatcattaactaaaggggtgattatggctcaaaaagacggatggatgggagctggatcatgggctttaagaatcaatgacactgtgagttctgctaatagcatagtaaataacattcctacgtctcagttcggaagtattgacaggaataacttatttattaggaattttgatgaaagtatatttgtaaaggctggagcggcggctgcaatatttgatagtgctttaaaacaagatcctgattctccaaagtcaagaacgggttcgaatgacgcttattctatgcagctaatgaacatgtttgtatctaatgataaggatttgaataatgttaaagttgattacttttccgctaatccaatggttgtttttagctctatgggtagtcgtttcttagatattgccaatggtgcagcaataacagccacaacagcttctatagtgtcagcaataccgttcttcggtaatgtgttaactactgtagcagcagcatttggtacagcattcagtatgatgttttgggcggttgttgtgccgggactataccttagctactacgttcagatgataccgtttttcatgtttactacagcggttgtaatgtggttcgttcttatggcagaagctttgtttgcttcccagctttgggtaatgatgttcttaacagcaactggtgatgattttgttggtgagcaaagaccgggacttagcttattattctcattatatatgaggccagcattatatgttttaggcttaataatagcaataacaatatcttatccaatatttggttttatcaatagagaatatgtaaatcttttagctaatactcctaatggtgatcattatttatgggcgcagataggttatggatttgggtatataatgattgttcatactattatgatgaagatatggcaacttccgcttgagcttcctgaaaacatagagagctggatgaacattagaggttcaggatctgtagcaagtcttaaaggtgctgctcaagaaaccatgagcggaacaaatgctatttctaaaggtgctttacctgctgctgccggaacattgacggcgggtaataagatattagaagacgttagagcaggaactaaacaaaaacaaatagctgaattacaagcaagggcaagagctaacgctaatacaagttccgctggaaacggtgatgataaatcgagtaatcaaacgacttcaccaaaaccaactgatggcggtcaagatattacaagttttaactccgaaaaataa

SEQ ID NO: 239412 - DNA, 612 bp, Klebsiella pneumoniae
atggaactatattttaacaacatgaggaatgcttatgatacgttgatttctgctatcagaacagatgaaatggtacaggctgtcattaaaagacaagacagccttgtcaaaatcatggaaaaagcttcttcaatttttcaggaacaacaactttcgggtaaaaaaagaatactccaaaatgataatgacttagctttaacgataacaaatattggtgttgagactaattttaaagagataaactactataaaaatcttgtttctgacactttactttttaatcttggaatgaaacttgtcttttctgaaatagaacagagatatgatacgctttttggttcattacgttcttatgaaaaaggtgattttgagtttcattataaagtgtataaaacaataactgatgatcaaagaagctatttaagagacgttagcggtaattctttaagtatacttgaaatgtatttagataaaacaaaaactaaaagagaatacagcaaagataaaatagagttagctcttagtagaatatatgattctttatgtgtctattatggttatcagctctatgatacacgattaaaaagagagggaagttatgaatatgaataa

SEQ ID NO: 239413 - DNA, 927 bp, Klebsiella pneumoniae
gtggcaacctatcacctcagcgttaaatttggaggcaagggacaggctgcaaaccacgccgattacatcgagcgcaaaggggagtatgcgaaacggaaagatctggaatacacggagcacggaaacatgccggaatgggccagggataatccttcccatttctggcaggcggctgaccagtttgaacgagcgaacggttcgacttatcgggaactggaaatcgcgctgccccgtgaactgacaccggaacagcgccttgagctggtgctggattttgtacgtcaggaagccggcgaacggcacgcctggagttttgccattcacaatccgaaagcgagcattgacggaggcgaacagcctcatgcgcatatcatgatgagccagcgtgtgaatgatggcattgaccgtacaccggaacagtatttccggcgctataacgccaggtatcccgagcggggaggtgcgaaaaaggattccggaaacctgactctcactcagcaaaaagagcagttgagggaattgcgaaaacgctgggaggtgaagcacaacgaacatatgagaaagcatggctttgaaaggggcttcattgactgccggacgctgaaagaacagggcattgaacggcatcccgaagtgcatctgggttttgaagctgccggacggcttgatgatgcccagcgtcatgacatcatgcaaaaacggtctgaaccggactattcccgccatcttgaacaggcgcgaacggtcgggcatgacatcagggaatggctggacactccggttaagcaacatgaactggtcagaaggctgcaacatgatgttgcgcgggagcatggctttgacatgagagacagagtgagcagacagaaccgaactgaacctgaacgggttaaatcaccgtcacgtggattttctatgggattctga

SEQ ID NO: 239414 - DNA, 399 bp, Klebsiella pneumoniae
atgcgcatcagcaacatcgaatggctgaagaaacggatcggattcatcaggaagctcggagaacagaccgcacgacagagacagattattgacctgctcgacaacgaagcaggactcacagaacaggaacgcaaactcctccacgtactggcaacagcggaaaaaaacgacttacaggcacaggagagcgaacgaaaacaggcggtccaaaaacgaatcgagggaaaaaaacaacgacgagaacgcaatcaccggctctttctcgcggctgggctactgatcgaagcaggactggtagacacaaaaacaggcgagctatgctataaaaaagacaggatattacaggcacttaaggaacttaagtacgatctggagacatccccaaacccagacgcgtaa

SEQ ID NO: 239415 - DNA, 936 bp, Klebsiella pneumoniae
atgagcgccgcgcttcaatacttcgaagaaaatttaccccaccgtccctatcacacggatgatctcgcttttggtcttcgcatctccggcaaagggcgtgcgcttcttgcgcggtacatccagcagaaccagcctcatgcgcagttctggctggtttttgacgttgaccgtgtaggagctgcgattgactggagcgaccggaacgctcccgcgccgaacatcaccgtaaaaaatcctgtgaacggtcatgctcacctgctctacgcactcaatatcgccgtgagaaccgcgccggacagctcggttaaggcgctgaaatacgccgctgcgattgaacgttcgctgtgtgagaaactttgtgcagatgtgaactacagcggactgatttgcaaaaatccgttccacctggaatggcaggtgatggagtggcgcgaggaggcctataccctcgatgaactggctgattatctcgatttgagcgcctcagcgcgccgtagcatcgataaacattacgggatggggcgaaactgccatctgttcgaaatgacgcgcaaatgggcttacagggcgattcgtcagggctggccagcattctcacagtggcttgatgccgtgattcagcgtgtcgaaatgtacaacgcatcgcttcccgttccgctttctccgcctgaatgtcgggctattggcaagagcattgcgaaatacacgcacaggaacttcacgccggaaactttcgcacagtatgtggctgatacgcacaccccagaaatacaggccaagagaggccggaaaggtggtatcgctaaaggcgaagcctacgatgacaagcgtttcatggcgctatgtatgctggagaatggatattctcagaaagctattgcggcgatgctgaatgtacatcgtaatacgatccgtaattgggcaatgcacaaatag

SEQ ID NO: 239416 - DNA, 387 bp, Klebsiella pneumoniae
atgaaattaaataacccacttgaagtagcaaccataacaactaacgttttagcgcattatgtttatcaggcaatatcagaccttgataaagaagatattattaaatatgacaacgttgattatatcaaagattatttagatagctctattgattctttaggaactgaccgtttttatagcagtgttctaaattctttctacggcatgaatcatgattatggtcatgactattttgatacagaagaagagttaaaagagtatgttttaaaagctaacttatatcttatcaatgactctttagctgttgatgatgtatcagatgagtatgatgcttgtaagcaggttttagaaatgcttgaagctgacataaacgataacgatgaataa

SEQ ID NO: 239417 - DNA, 1035 bp, Klebsiella pneumoniae
atgaaaataaaaccagtaaacctcaacaaaacattaaagttattggaaggaacagaagcagaaaagccattcattgaagatatgttgttatacatggatcaggctaaagagtatgaagaaaagaaagtattacaaagcaacttatatgaagaacttaataatagcttagtatatcgttataaaactattgttaacaatgcgccaagagaagatttatccataattgctatttcaggtgaagaaaccattggttctaatgttgatgtttttcttgagaatacagcagttagatttaaagtcagggataagcttaacgaaagcggctattcagtagctgtaaaggttaaagacggtaaaacagttttagacgttgatatgaagcaagcgggctttacagcacttaaaacgctctctaacgagctggaagagcttaaaccgtgggtaaatgactacatggcaacactcaaagagcaagtgagtgatagcgttcaggctcaggctttacctgatacgatagaaccctacaagacatcatgggtagagcttccagaagaaagacgtattcttgttaaagttcatcctgaaaacatggcaacatttaaatcaaagttttcttcccccaaatgggaaaaggatttaaaagcgtggcgcatatctaatcttcaaagcaataaagataaattgaatgattttagagatcttcttgaactaagaagaagacaagaacatgaaagcccaaaagaagttttatctaaagtcgatacggttatagatggtaaaccacattattatgagttatcacacaaagtagaacatgaaagtttaacaagtaagttcgatacattaacactcgatttaaaaagtgatgatggttcatatgatggggaatggcataaaaggattggttcgtttgagtttgaaaacctatccgataaaaatgaactaaataaaaaagctaaagagtttttaactcaggctatggatttaagagataatgatttaaacaacaaatcaccgattaaattgaaaatgtga

SEQ ID NO: 239418 - DNA, 765 bp, Klebsiella pneumoniae
atgcatttaagtaataaattaagaaagattgggaatgaaaaccaacttagcttcagattcttctttgaggatgaagaaattaaagaaaaggtatatatacctgtggaatcaaactcaatcgttgaagttcatggtaacaatgttttgaaccatgattaccaggagctagacgatttcatttggacagatgaacatatatgtacgttcttctataagataatggaatcatcttttataaccgttcagtaccatatagaccaatcgatggtttataaaatcgatgccaatgggtttcgatatttaaccccaaaactaaaattggagttagattggtattgtactaaacaatttcaaattgtgtgtcatcgatttggatatgacccagatgaaattattggttttattaagtcacgacttctgcttgagatatgctcaagagaatcaaggcaaaaacttattaaatctttagaaactgataacttaacattttctcatcctagatcattgatcattaaatggtcgatagctgacagattgaaactctttaaaaagattttcgatgagcaaatgattatccttgaaaatataagtgaaaatggtgcctggacattggatcagaataccgattcttatgtactaaaaaccgaagctgttgattatattgagtggttatattctgatgcatgcaaggtaatatctcatgtatacggatttgattacggattacttttcagcacttcgaaagccattatcaaaaacttttaa

SEQ ID NO: 239419 - DNA, 630 bp, Klebsiella pneumoniae
atgggcggccgcagaaacccgggagatattgcgcagcagcgccacatcctgcgggctggcgtcgaactcataggccgagatcaccgagccgattggctcgccgccgggagtgtcatactccgcggtataggtgtgccagtacaggccgctctggataagctccggcgcgtcctcaaagtcctggcgcagatcgtctttggcgacgtcgaggatctccgttttgacgttctgccgatagtcggtgttgtccaccagctgtttgaggccgcgccacagggattcgacctgctgaaactcctgatggtgcatcaccgcgtccagctgacggcttatctggaaatccagctcggcgatatggtggtcgatcagcgttttgtcgagcttttccacccgctggccggactgacggatgcgttccataaacacctgcatcgccgcggtgagacgctccgccgccggcgtctcggagagcgcggcatcgtccagaaagtcgttgatatccccgaggcgagacgccggggcgagattaattttttcaaacagcgaggcgtaaacgccctcgcccgccctgttttcctgcagcgtggtttgcccctgaacaggggcgttttctgtggtaacagacattag

SEQ ID NO: 239420 - DNA, 261 bp, Klebsiella pneumoniae
atgaagaaaaatatactatatgaaatatctagagtatgtggatttataagtgtggttggttatatttacccattgttattggcatatctatatctaaaaacaaatagtgccgatgactataaatattttatttatactaaagcggatttgcaattatatatagatgattattttaaaattgaccaccctcgatttattgtcgccatattttttggtttgttatctattacctttcatgttttacataggaaaataaaatga

SEQ ID NO: 239421 - DNA, 258 bp, Klebsiella pneumoniae; identical to SEQ ID NO: 206290

SEQ ID NO: 239422 - DNA, 489 bp, Klebsiella pneumoniae
atgaatagcattaatgaattattattaatttacggttcaaatataacaaaaatcaaagaacttgttttagcaggggcaaatgttaactacatatcgccggaaggtttaacgcctttatcctgtgctgaatctgttgaagtggctcagtttcttcttagccgtggcgctgatgtgaacgctaccaatgaagacgggaaaacagccttgttcagcgttagcaacgttgatacttgccgcttcctgatagagaacggcgcaagggtaaatcatgttaacaacaaacatgaaacagccttgttctatacaacggatatgaaaaaaatcagattactggttgaagcaggatgtgatccattggtaagaagttatgatggtaagcgccattacgatttgttggcacataatcagaaagtgagttttattaacttcttggctaacagaaaaaagaaaatggaaactgttaacgcacctttagctcttgccttttaa

SEQ ID NO: 239423 - DNA, 177 bp, Klebsiella pneumoniae
atggcgacgctgagctttaacgccaccggcggcgatggctatccgaacatcgccgataaacccgggtatgtgaataccggctttatcgatgccgaagtgctgaaagagtatatcgagaagaactcgccgctggatgccgccgcctatgagccgaaaggcgaggtgagctggcagtaa

SEQ ID NO: 239424 - DNA, 1041 bp, Klebsiella pneumoniae
atgaaggacaacaggaggggggcgccggcggtgctgctgggttctcatcttgacaccgtgcgcaacgccggacgctacgacggcatgctcggcgtgctggcggcgattgaggtggtccagcgtctgcaccagcaggggcgacggctggcgaaggcaatcgagatcgtcggctttggcgatgaagagggcacccgctttggcatcaccctgctcggcagtcgcggcgtcaccggcacctggcctgaaagctggctgtcacagtgcgattccgacggggtgagcgtcgcccaggcgctggtgaatgccggactcgatccggcgcggatcgcccacgcggcccgtcacccgcgggatatcgccgcctatctggaactgcatatcgagcaggggccgtgccttgagcaggcggggctggcgctcggcgtggtggaggcgattaatggcgccagacggctgaactgccgctttaccggcgaagctggccatgccggcacggtgccgatgcttcatcgcaaggacgccctcgccgcggcggcggaatggatgatgcaggtggaaaacctgacccggcagcacggcggtaacctggtggcgacggtcggcaccctgcgctgtgcgccgggcgcggtaaacgtgataccgggcgaggtgcagctgacgctggatattcgcggcccgcaggatgcgccgctgacggcgctgctggaggaactgctggggcaggcgcaggccattgccgggcgccgccagctgagtttcgccgccgaggagtattatcgcatcgccgccaccgcctgcgacagtcacctgcaggcggtgctgagcgaggcggtggtggcggtgcagggccgttcgctgacgctgccgagcggcgcagggcatgacgccatcgccatcgccgagcgctggccatcggccatgctgtttgtgcgttgcctggggggcgtcagccatcacccggcggagtcggtcaccgccgccgacgtcgggctggctatcgacgcgttctcccgggcggtagagaaggtggctgacgcctga

SEQ ID NO: 239425 - DNA, 450 bp, Klebsiella pneumoniae; identical to SEQ ID NO: 237264

SEQ ID NO: 239426 - DNA, 297 bp, Klebsiella pneumoniae
atgggcgaggcgaaggaaaaatgggccgaacgtatcgccctgctgcgcgactatcaggttaacagcgcgatgctggcgctcaccggcaacccgcaggtcaagttcctccactgcctgccggcgttccacgacgatcagaccacgctgggcaaacagatggctgccgattacggcctgcacggcggcatggaggtgactgacgaggtgtttgagtcggcggcgagcgtggtcttcgaccaggcggaaaaccggatgcacaccatcaaagcggtgatggtggcgacgctttcacgctga

SEQ ID NO: 239427 - DNA, 324 bp, Klebsiella pneumoniae
atgagaaaacgactgttaaccgcggcgctgacgctggctttactcagcgcgcccgcgctggcgttgaccctgagcgaagcgcgccagcagggacgagtgggggagacgctgaacggctatctcgcgccgctgcgtcaggataaagagacgctggcgctggtaaagcagattaacgccgcgcgcagtgaaagctaccagcagctggcggatgacaacaatctgccggtggatgaagtggcgaaaatggccgggcagaagctggtggcccgcgcgcagcccggggagtacgtccagggattgaacggccagtggctgcgcaaataa

SEQ ID NO: 239428 - DNA, 1059 bp, Klebsiella pneumoniae
atgcgcatgaataaacttcccggatatggtcttcccgagttggctttctggcctcagcctaaatatgaacgaaataattggtctatgttctgtctgaaacttcgtgatgatggaactcttgcttggtataggcgatatgttgatcgaggtatgccaaacctcgcctttgatgacatctacgataactatcttgatgcaagaaaagcggcggaagaactaaataaaaacatagctttcaatatagatgatctacctttatctcagcagcaaagagaatcactacgcttaaaaattgataaggcgctcacttcaaaatcgcgactgatggatgaagagcatatgatgctaaatgaggccattagaagacacgcgaaagatcgacgtttgtcatcagacgagctaattatcaaacctgaagggttaatcgtacgtccctacctgttagacgtactacacgagatgccttacttgcattgcattttcctacccacctttcagacatgtttcagactaacagaacctaacacctgggagcaagtgcaaagccccagagcaaaatcatccaaaatttgctaccaggaacgtatcgccagagggtttggtttgtcaggcacagcacattggggtaaaacaaaagcaactattcgctcaatgcttctgccacgtgccaaccagctactacaactcgccagcgtaaaaagaatgctggatgaggctctccggaatggacaaaaggtaatcgtcgttggcagctttgttttctggttcgaagacataaatcaggtagggtggagtgttaaagaagcgaatgacagcgaaattacctcaagaggcaatacactctggaaagaaggtacaatcatttcaaaaaatcacggtcgaatagtcgtgctaccgtatacaaaggaaaacggtgagcatgtaaaaggctacaccaagaacgcccccaacgacggcaaagcgattccgaggcataaggatgagtatgttgagttgccatttgaagttctggatggtgacttgatgttcagtctgttcggtgagcttaactacgaataa

SEQ ID NO: 239429 - DNA, 1149 bp, Klebsiella pneumoniae
atgaacaagctaagttatctggaaaagttgctggatggggttgaggttgagtggaaaacactagagaaagtgcttaaacgaactaaaggcacaaaaataaccgctgggcagatgaaagctcttcacaaagataatgcgccgcttaaaatttttgcaggaggaaaaacagtagcctttgttgactttaaagatattccagagaaagatattaatagagagccatcgatcattgttaaatccagaggtattatcgaattcgagtattacgataaaccattctctcacaaaaatgagatgtggtcatatcactcaaataatgatgcgataagcataaagtatatttattacttcctaaaaacaaatgaaggatatttccaaaaaattgggggtaaaatgcaaatgccacaaattgcaactcctgatacagataagtttgaagttccaatcccttgcccggataatccggaaaaatctctggccatccagtctgaaatcgtccgaattctggataaattcactgcacttacagctgcacttacagctgaacttaccatgcgtaaaaagcagtacaactactatcgtgaccagttaatgaatcttgaggaaagggaagatactcgagaaatgagtataggtgatatttatgattttcagtatggaacaggcaatacaattcctaaatctggagggcaatatcctgtttatggtagcaacgggattgtaggctcccatgacaaatataacagcgaagactcgcctgttattggccatataggtgcttacgcaggaatcgttaattggggccagggtaagcattttgttacatacaatggagttatttgtaggcacaaatcgaaggaagttcttcaaaaatacgcctaccatttattacttttacaagatttcgggtcaaaatctaatagtgcatcacagccttttgtttcatataacatattaaatgctcctattgttttggttccccctttacaagagcaagctcgtatcgtcgccatcctcgataaattcgatacactgaccagttcaataaccgaagggcttcctcgtgaaatcgagctacgtcagaagcagtacgagtactatcgcgatttactgttcagcttcccgacatcggaagctgccagcaactga

SEQ ID NO: 239430 - DNA, 348 bp, Klebsiella pneumoniae
atgagaaagcttaaaattggtctggcgctaggtgcgggagccgctcgcggatggtcgcacattggcgtcatcaacgccctccagcgggccggtattgagattgatatcgtagccggttgttctatcggttcgctggtaggggcggcgtatgcctgtaaccgactcccggcactcgaatcatgggtctgctcattcagcaactgggatgtcctgaagctgatggatctctcctggcgccgggggggactgctgcggggggaaaggtattcaatcattaccgccgcattatgcccgtcaccgagattgaacgctgcgagcgccggtttgctgctgttgccaccaatttaa

SEQ ID NO: 239431 - DNA, 450 bp, Klebsiella pneumoniae
atgtctcagttaaccctggccgactgctggcctcgccgtttttccccctcctcgctggcgctgcagttttgcgaggatccctcccaggccgaacagccgctgtttgccaaagccagcgccggcgaggccgtcgcccagctctggcaggcgccgcagggattggtggtgccggggagctatcgtcagtttacggatctgccggcggtcagcgcgcattttgccgcgcgcggctggccggtatggcttcgccgctccggcggcggtctggtgccccaggggccgggcattatcaaccttagcctcgcctggccggtgcagcagccgctcggcgaagccgccgaaccgatctatcattcgctgtgcgcggtgctgcagcgtaccctcgcgcgcttcggcgttgccagcccccccccgggcggtaaacggttccttttgcgatggccggtataa

SEQ ID NO: 239432 - DNA, 1110 bp, Klebsiella pneumoniae
gtgaataataaaatctctttagcgaaagaagtggcatgggccagccagaatatgccgcgtaccctgcgtcaggtcgccgcgctgcccgacctcagcggcgtgcgtctggcctgctgtatgcacctcgacatgaaaatgatcccgctggtgcaggggatcctcgacaagggcgctaaggtctttttaaccacctgtaaccccaccaccgtgcaggacgacgtggtggcctggctggtggagcgcggcgccgaggcctgcgcgtggcgcaatatgagcgatgccgactggcaacagtcatgggaaaaagcgattgcctggcagcccactcacctgtgcgagatgggcgccgatatcaccaccctgctccaccagcgcggcgagtatgggaacatcgtggcgggtctggaagccaccggctcgggcgtcaatcggctgggggatattcagccaggctatccgatctttaactgggacgatctgccggtcaaagaggggctgcacaaccgccatatggtcggtctcaccgcctggcacaccttcttccagaccactcacctcaccctgcatgagaaaaaagtgctggtgatcggctacggcctggtcggccagggcgtcgcggcggcggcaaaagcttttggcggtcaggtgatggtggcggagatcgatcctgcccgccgtctgcaggcggcctacgacggctggcacgtggtggacctccaggaggctatcgcctcggcggacgtggtggccacggcgacaggcggtaaaaacgtggttaatcgccaggcgctggaccgggcgaaagcgggagtatttatccttaacgtcggccacgtggcggaagagatcgacggcgattacctgcgccagtacccccaggaagaggtgatgccgtatatcaacgcctaccgcatggccgacaaaaccgtctatctgctggccaatggttcgatgctcaatctgaccgctggcttcggcgacagcctgaacgcctttgacgtcaccctggcggtgatggccagcggcatccgccatattgtcaccgagggcatgcgcgccccggcgaaggtttatctcctgccccaggcggtctggcagcaggccctgtaa

SEQ ID NO: 239433 - DNA, 474 bp, Klebsiella pneumoniae
gtgtttcaggcattctcccggatcatcaaagaggccaacgaccattttgtcattatagacactgcgcccaccgggcatacgctgctgttgctggatgcaaccggggcctatcaccgggaaatggtgcgccagatggggcaggctcacgatcacgtgataacgccaatgatgcagctgcaggatccggagaagaccagagtcattatcgtgacgcttgccgaaaccacgccggtactggaagcggccgggctgcagcaggacttacgccgggccgggattgaaccctgggcgtgggtcatcaataacagcctcgcggccgcgaagccgtcctccccgttcctggtcacccgtgcccgtcgcgaactgccgctgatcgacgacgttgccgggcattatgcacagcgcattgccctgacgccactgctgaaggacgacccggtaggcgtgggcctgctggctgaaatggcgggctga

SEQ ID NO: 239434 - DNA, 828 bp, Klebsiella pneumoniae
atgccaaaaacccgaaaacacctcaccccgaccgaagcagaggccaaggggcttctatgccgtaagcacctcaaggaacgcctccgcctcatgccgggactaaacaccaagcccgctggcagtgtctggcaaggtcagggggcttatgatgtgtacaacccagccgagtgcgtgccgtggcgctggatgcctgggcgtgcccaagtccgtcgccagcacgtcgcagcgcaggcaaaagacctgatcgccgcaggctgcattgtgctcgacaccgaaaccaccggcctcggtgatgacgccgagatttgcgagataaccatactcgacgtgaccggcgcaccgatcctcgacacgctggtacgcccgacccggccaatcccggtcgaggcgacagcgattcacaaaatcaccgacgccatggtggccagtgcgccgagctggcccgaggtggccgagcagtacgccgcagccgttgctggccgaaccgtcgttgcctacaacgtcgcttttgatgcgcgcttgctgcggcagacctatcagatacacggaatcaccgcgccagtgttgacgaccgcttgcgcgatgctgatgtatgccgagtggcatggagagtacgaccggagccgcgaccgctggcgatggttgaagctgatcgaggctgcgaccgactgcggcgtggcagaagacggcgcacaccgcgcccttgccgacgcccgcatgacgctgggtgtgctgcgatacttgcagcgccgcacgaacggacggcgaccggcagggccgaaagtggccaccgtcccgcaggaggctttgccctctgttttaggatga

SEQ ID NO: 239435 - DNA, 195 bp, Klebsiella pneumoniae; identical to SEQ ID NO: 36234

SEQ ID NO: 239436 - DNA, 366 bp, Klebsiella pneumoniae; identical to SEQ ID NO: 25794

SEQ ID NO: 239437 - DNA, 1686 bp, Klebsiella pneumoniae
atgaccaccctgaaaatcaccgggatgacctgcgactcgtgcgcggctcacgtcaaggaagccttggagaaagtgcccggcgtgcaatcggcgctggtgtcctatccgaagggcacagcgcaactcgccattgaggcgggcacgtcatcggatgcgctgactaccgccgtggccggactgggctacgaggcaacgcttgccgatgcgccaccgacggacaaccgcgccggcctgctcgacaagatgcgcggctggataggggccgctgataagcccagtggcaacgaacgcccgttgcaggtcgtcgtcattggtagcggtggagccgcgatggcggcagcactgaaggccgtcgagcaaggcgcgcaggtcacgctgattgagcgcggcaccatcggcggcacctgcgtcaacgtcggttgtgtgccgtccaagatcatgatccgcgccgcccacatcgcccatctgcgccgggaaagcccattcgacggcggcatgccacccacaccgccgacgatcttgcgcgagcggctgctggcccagcagcaggcccgtgtcgaagaactccgtcatgccaagtacgaaggcatcctggacggcaattcagccatcaccgttctgcacggtgaagcgcgtttcaaggacgaccagagccttatcgttagtttgaacgagggtggcgagcgcgtcgtgatgttcgaccgctgcctggtcgccacgggtgccagcccggcggtcccgccgattccgggcttgaaagagtcaccctactggacttccaccgaggccctggcgagcgacaccattcccgaacgccttgccgtaatcggctcgtcggtggtggcgctggagctggcgcaagcctttgcccggctgggcagcaaggtcacggccctggcgcgcaataccttgttcttccgtgaagacccggccatcggcgaggcggtgacagccgctttccgtgccgagggcatcgaggtgctggagcacacgcaagccagccaggtcgcccatatggacggtgaattcgtgctgaccaccacgcacggtgaattgcgcgccgacaagctgctggtcgccaccggccggacaccgaacacgcgcagcctggcattggaagcggcgggggtagccgtcaatgcgcagggggccatcgtcatcgacaagggcatgcgcaccagtagcccgaacatctacgcggccggcgactgcaccgaccagccgcagttcgtctatgtggcggcagcggccggcactcgtgcggcgatcaacatgactggcggcgatacggccctggacctgaccgcaatgccggccgtggtgttcaccgacccgcaggtcgccaccgtgggctacagcgaggcggaagcacatcacgacgggatcgagaccgacagtcgcctgctaacactggataacgtgccgcgtgcgcttgccaacttcgacacacgcggcttcatcaagctggtcatcgaggaaggtagcggacggctcatcggcgtgcaagcggtggccccggaagcgggtgaactgatccagacggcggtgctcgccattcgcaaccgtatgaccgtgcaggaactggccgaccaattgttcccctacctgaccatggtcgaagggctgaagctcgcggcgcagaccttcagcaaggacgtgaagcagctttcgtgctgcgccggatga

SEQ ID NO: 239438 - DNA, 762 bp, Klebsiella pneumoniae
atggtggaccgcatcaccccgcgtccggcggccgatctgccggcccgcatcaaagcgcaaaccggaattgatgacaaagcgccggtgatgggggagacctttatccagtgggtagtggagaacaacttccgcgatgcccgcccgaatctggaggcggtcggcgtggagatggtggagtcggtcatcccgtatgaagaggcgaaaatccgtattctaaacgcgtcgcacagctgcattgcctgggcgggaaccttaatcggccagcagtatattcatgaaagcacgctgaccgatgttatctacgccattgccgaccgctacgttacggaggacgttattccgtgtctcggcgataacggcattgatctgccgacctaccgggatgtggtgcttaagcgctttaccaacccctatatccaggacaccaaccagcgcgtcgccgccgacggcttctcgaaaattccggcgatgatcgcgccaaccttgcaggagtgctaccagcgcggcgtccgcccggaagcgaccgccatgctgccggcgctgttcttcgtctttatggagcagtggcacaagggaactctgccatatcagtaccaggacggcatcctggatgcgcaggcggtgcatgagatgttcgaggctcaggatccggtggctgtctacgcgcgcgataaagccctgtttggtgatctcgccaacaacgcggatttcctggcgctgatgcgcgagaaagtcgccgccgtttacacgctgattaactaa

SEQ ID NO: 239439 - DNA, 663 bp, Klebsiella pneumoniae
atgaataataccgataaattaaacaaaaaagtcagcgtatatatttccactcataatagacttgaaagattgaaaagagcgatacagtctgttttgaaccaagaatacagtaatcttgaattattagtatgcgatgatgcctcaaatgatggtacaaaagaatatatggaggaactatgttccaaagataatagagtaaaatattttagaaatgatgttaataaaggtgcttgtgcaacacgtaatttaggtatccgtcatgcaactggtttttttattaccggcttggatgatgatgacgaatttacatttgatcgaataaaattattcgttgaaaattgggatgatagatattctttcctaagttgtaatttttatgattgttataaaataaagcataagaaaatacattacaaaaaaaatcttaaaccaattatcttaacttataaggatattctttttaagaacttggcatctaatcaagttttcacattgactgaaagattgagatccattaacggatttgacgttaatgtaaaaagattacaagactgggatacttggttaagattgagtgcaaaatatggtgaatttatggtattgccatatgctacatctgtctcttatacacatctgacgctgccgacgatatgcagtgtgtag

SEQ ID NO: 239440 - DNA, 741 bp, Klebsiella pneumoniae
atgtctacagaacgtcctgaacaagaaaataaactcggatgcgaaggttttcactctcgtttgcgtgcgttgcttaagaaattcaaaagcaacaatgcgtttgcagtagccgctggtatttcaccatcaggactgaataggcttttggagggaggatatcctacacttcccattctcatagctttggctaaagctgggggggtatctgttgagtggctttccactgggggcgatttggttgaatctaagctaccagctttagttcagggtgatgtagtcagcgctacagtaactgatgtaaaaggaaataacgtagatcttgaggagtttgtctttgtacctaggtacaacgtatgtgcatctgccggttatggctcatggaatgatgacgagacccccatgtttacggtttcgtttcgtcgctactgggttactaatcatctcaaagcagaccctgcccaactctcagtaatcagtgtttacggtgattctatggaaggagttttgaacgataaagatataatacttataaatcatgcagataaagagccaagagaggggatttatgttttgcgtattgacggacagctaatcgttaaacgagttcaaaggttacctggttcgcttttgcgaatcactagcactaatccagcttatgagccgttctccatcaatctcaatgatgttccaagtgattttgatattgtcggaaaagtagtttggtatggtagggttgtctag

SEQ ID NO: 239441 - DNA, 288 bp, Klebsiella pneumoniae
atgcaaaagcgccgtaagtggacccagtccgaaattcagtttgtctgtgagaatgccggaaaaatgaccgcgcaggagatggctgagaaactcaaccgcagccgccaggcaatctgctcccaggcgaatcgctggggtctgtcggttcaggttcagactgcagaggatcatgatatctatctgtgtcgcgaactttataaggaagggcttaccattccggttattgccgaaaagatggaattaagcctccgtgccgtttcaaacatcgtttattcaggctgttattaa

SEQ ID NO: 239442 - DNA, 309 bp, Klebsiella pneumoniae
atggcaattgatgaacgcacttacctgcgagcttgcctgattgccggtggccgcaacgaacaggaagttgacgcagaactggaggaaatcttcgggcctggacaattcgattcagagcaattcaaaacactgtctctcagtatgcgccgggatatcctggaaagaacatccttaccagaagtggttgaggggttgaaccggattatttctggcgcgagtcatagcagggagtatctggccgcagcgatagcagccagcgcattagtcaatctgattacgtctaaatatccaaatcgaggtgacgactga

SEQ ID NO: 239443 - DNA, 402 bp, Klebsiella pneumoniae
atgcaaatagacctggatttaatgaaaaaaatgttgaatgttttcatcgaatcaccaaaagcctttatcaccctcgcggaaatagagtctgctgttagcgacggagaggcctttatattccatattggtttgatgcttgataataaattaattaccggagtcgattttgaatcaactccagcgtccgtcggtttagtggttgccaacacacggatactcactcgcccactgcgggtgcgtttatcgcaacaaggccacgattttgctgtaatgctcaaccagcagcctatactcgaaaaactaaaagaacaggcaaaacaggctccaatggacgttttagtcgcaatcgggaaagcatggggacgcaagctcatcagtcgtcacctcgatttggatatttag

SEQ ID NO: 239444 - DNA, 903 bp, Klebsiella pneumoniae
atgccgcaaccgtcagcagaaattctgcacgcgctcaccacgtccctgagcgctgccttcactaaaggtcttgcgggtgttacgccgcagtacctgcgtatcgccaccgaggtgccgagcagttccgcatcgaacacctatggctggctgtccgatttaccggaaatcaaagagtggatcggtgagcgacaactcgcagtactgagtcagcagggttacaccgttaccaacaggacctgggaaagttcaatccgcgttaagcgggaaaccattgaagacgatcagcttggtcagttcagcattattgccagtgggtttggtcgtaaaatcggcgttttcccggatacgctggcatttaaattgttatctgaaggcttcagttctctttgctttgatggtcagtatttctttgataccgaccatccgatggcgggaggcacttacagcaacatcgtgggcgacattgcgactgataccggcgagccgtggtttctgattgatgaatctcaggtgctgaaaccgatcctgtttcagaaccgccgtccgtttaaattcgtctcccttgatgacctggacaatccccacacgcttttgaataacgagttcatctatggcgttgatggtcgttgcaacgtcgggtttggtttctggcagaccgcagtgggttcgcgtgcgccgctgacgacagcaaactacgaaaaagccgttgacctccttctgggcatggttcgtgacgatggcgaaccgctgggcatcaatccgaccacgcttgttgtcggtcgtaaaaatcgggctgccgccaaaaaaatcattgatgccatgctggttgatggtggcgattccaacatctactacaaagacgtggatattgtgaacagcccgttcattaccaccccggcgtaa

SEQ ID NO: 239445 - DNA, 1674 bp, Klebsiella pneumoniae
atgaaatatattagaacgatgacgcagcagaagcttagtttttggctggcgctgtacatcggctggtttatgaacgtcgccgtttttttccggcgtttcgatggttatgctcaagagttcactttctggaaagggctttccggtgttgttgaactggttgccacggtatttgtcaccttcttcctgttacgtcttctgtcgctgttcggccgccgtatctggcgcattctggcgacgctgattgtcctgttttccgccgcggcgagttactacatgacgttcctcaatgtggtgattggctacgggattatcgcttcggtgatgaccaccgatatcgacctgtcgaaagaggtcatcggctggcacctgatcctctggctggtggcggtgagcgcgccgccgttgctgttcatctggagcaaccgctgccgccatacgctgctgcgccagctacgcaccccgggccagcgggttaaaaacgtgctgatcgtggtgctggccggactgattgtctggggacccatccgcctgctagagctgcgccagcatgatgtggagcgccattcggaagtggatatgccgagctatggcggggtgatcgccaactcttacctaccgtcgaactggttgtcggcgctgggtctgtacgcctgggcgcaggtggatgaatcctcagacaacaaatcgctgattaacccggcgaagaagttcacctacgtcgcgccggaaggtctggatgatacctacgtggtgtttatcattggcgaaacgacccgctgggaccatatgggcatcctcggctatagccgcaataccacgccagagctggagaaagagaagaatctcgtcgccttccgcggttactcgtgcgataccgctaccaaactgtcgttacgctgcatgtttgtgcgcgagggcggggcggaagataacccccagcggacgctcaaagagcagaatgtctttgccgtgctgcatcagctgggcttcagcggcaatctgtacgccatgcagagcgagatgtggttctacagcaacacgatggccaacaatatcgcctaccgcgagcagattggcgccgagccgcgcaaccgcggtaagagcgttgacgatatgctgctggtggatgagatgaagcgcggtatggcgcagggcaacgcctccggtaagcatctgatcattctccacaccaaaggctcccactttaactacacccaacgctacccgcgcagcttcgcccagtggaaaccggagtgcgtcggcgtcgacaacaagtgctcgaaagcggaactgatcaattcctacgacaatagcgtgacctatgtcgatcactttatcgtcagcgtcctcgaccagctgcgggataagaaagcgattgtgttctatgccgccgaccacggggagtcgattaacgagcgtgaacacctgcacggtacgccgcgcaagatggcgccgccggagcagttccgcgtgccgatgatggtgtggatgtcggataagtacctggaaaatcccgatcacgccgccgcgtttgcccatctgcagcagcaggccgcgatgaaggtgccgcgccgtcacgtcgagctgtacgacaccattatgggctgcctcggctatacctcgccggatggcgggatcaatgagaacaacaactggtgccggtggaaaaagtaa

SEQ ID NO: 239446 - DNA, 1515 bp, Klebsiella pneumoniae
ttggtgagcatcgataacgccaccgtgagggagttagcagagaataacatcttcaggaaaatgacccgtgcggatattaacacgatgctcaacacccctggtgccgaggtcgatgttgaatacgctttacaggcccttatcgatgagggtcacaaatcaatactctttccgcatgatgttaagggcatttatattcttgctggaaatgtcaccgtacccgcccctgtaacgttgatttcattttctccttgcgttaaaccgtacacaattacgggcgattcgtcgtttctcaataaaggtgctgtcattcgaaaagcggcaggagctgattatatttttgggccgggaaccgtccctcgcttctacggcctgcttctcgatggcagagacagcagaagaccgctgtttaatcatgagaatcagcggcgcggaggtatgctgtttaactgcggtatttatcgttttctgtacggcattggtagttattcctatacctctgttcaggtgggaatgtcttccatatgcgccaaccaggacggagtttataacctgattgattctcgcctgattaactgcaccattaacgcgaatacccggaatggtgtttatctccgcaatggtgctaataacaaccttttccagaatatccgaaatgaatggaatggaggggtgggatatttatctgatggctccgtcggcaacattatcaatggtgaattggttgaccgtaatggctcggcgaatttcgctgtgcttaatggcggaggttttctcattggggatgtattctcccagcgaccgggccgaacctcggcggcaggttcctcctataacacccatttttacatggagggcgcaggcagctatatcatgctcagcaatgtcgtgacacgaaccggcgttgatgatgatggccagggaaaactgacgccagaaagggtactgacaaccggtggcggctccacggatatgacttttattgccaatggttgtgatttgtccggatacaccctatccgcgttgcggcaaattaccactgccgagaaaatgattttcaggggaaataaaggcgcacctgacctgataactactggtctgtatcagttccagaacggccggggtaatgttggcggggcgaagagcaatcaggttctgacgtccggcgttggttctgtgttagccctcagttttcaggaaacgggattagccgatcccacgacagcccaggcaacagttccgttatgcagaacgctcctgattgaatcgctaacatcaggcggggtatcaggaaaattcaaactaccgtttcagataaggcgcgtggtacaggccgctaatgttgacctgtatacctctgaagcccgttcatcgcccacgggagcctacgctgtcactggagcgacaggtgtcaatgtatcactggcagttaatgctgatgccacactgacaaccgtcacgctcaccagcgttgacggcatcgggcggttcctgcgcgtgacaattctggacaactaa

SEQ ID NO: 239447 - DNA, 402 bp, Klebsiella pneumoniae
atgaaaaacacagagctaaacgaccgtattcgtcgcagaagaacagaactcgatatgtcacagcagaagctggctgatgctgtgaaggtttcgcacgtcaccattttcaaatgggaaaatggtgagacagaacctaaagggcaaaacctgttcaagctgagtaaagctctgaagtgctcccccacctggctcttatacggcgatgaagatcaatcgccactgcccgcagaagaattaccgaaagagcttgatgctcgtcagttgaagctactggatctctttgattcacttccagaatctgaaaaagacagacatttgactgaactggagtcgcgcgtcgaaggctttaacaagctatttgaagagctgttagctacaagaaaaaaatcacaaaaaaaataa

SEQ ID NO: 239448 - DNA, 1032 bp, Klebsiella pneumoniae
atgccaaatgcacaccctgacctgtggcagcgctaccaggccaccaaagcggccagtaccgcgaaatatgcccgcgatatcgccgcggaaatggggatcagcgaagccgagctgaccgccgcccgcctcggccatgatgccgtgcgcctgagcgatgacgcccgggcgctgattgccgccctggagcgcgtcggcgaaaccaaatgcatctgccgcaacgagtatgccgtgcatgagcaggtgggccagttcacgcaccagcacctcagcggccacgccgggctggtgctgaacccgcgtgcgctcgacctgcgtctgttcctcagccagtgggccagcgccttccatctgaacgataatggccgtcagagcatccagtttttcgaccaccacggcgacgccctgctgaaagtctatgcgaccacgcagaccgacatggcggcctgggagaccctgatcgcggaatatcgggtggcggcgccggcaccgctgaccctgcgcccgctggagccggtgaaatatgccgataccgccgacggcgccgccctggagaacgactggcgcgcgatgaccgacgttcaccagttcttcggtctgctgcgtaaatatcagctttcccgccagcaggccttccgtctggtgagcgacgacctcgcctgccgcgtggatcgccatgcgcttccgtcgctgctggagacggtgcgccaggagggcaatgaaatcatgattttcgtcggcaatcgcggctgcgtgcagatctttaccggcgccctggaaaagctggcccccatgcgcggctggctgaatatcttcaatactacttttaccctgcatctgcgcgaagagagcctcgatgaagtgtgggtgacccgcaagccgacttcggacggacacgtcaccagcgtcgaactgttcgctaaagacggcacccagattgcccagctctacggccagcgcagcgaggggcaccccgagcagacgcaatggcgccagcaggtagaccgcctgacccgtgaagggcagcccgcatga

SEQ ID NO: 239449 - DNA, 753 bp, Klebsiella pneumoniae
atgaggggatctctcagcgcggtgtccgcgctgacggatatcgaattagaagtccacgccggcgaggtggtcgcgctggtcggcgacaacggcgcgggcaaatccacgctggtgaagatcctcgccggcgtccaccagccgacctccggcaccattgagtttgacggcaaccccgtcaccctcgatagccccggcaaggcgctggaatacggtattgccacggtgtttcaggatctggcgctgtgtgaaaaccttgatgtggtggcaaacctgtttctgggtcatgaaatttcgccgttccagctcgatgaagtggcgatggaagtgaaagcctggacgctgctgcaggagctggcggcacgtattccgtcggtacgcgaaccggtggcatcgctttccggcggccagcggcagaccgtcgccatcgcccgttcgctgctgctgaaccctaaaatcattatgctcgatgaacccaccgcggcgctgggcgtcgcgcagaccgcggaagtgctcaacctgattgagcgcgttcgcgagcgcgggcttggcgtcatcatcatcagtcacaacatggaagacgttcgcgccgtcgccgaccgtatcgtggtgctgcgtctcgggcgcaacaaagggatcttcacgcccgatgcttctaatcaggatctggtcgccgcgatcaccggcgcgacggaaaacgccgtctcacgccgggttgaacgtaaatcacagccaacgacttccggagcgatgtaa

SEQ ID NO: 239450 - DNA, 807 bp, Klebsiella pneumoniae; identical to SEQ ID NO: 235221

SEQ ID NO: 239451 - DNA, 498 bp, Klebsiella pneumoniae; identical to SEQ ID NO: 154001

SEQ ID NO: 239452 - DNA, 381 bp, Klebsiella pneumoniae; identical to SEQ ID NO: 21648

SEQ ID NO: 239453 - DNA, 654 bp, Klebsiella pneumoniae
atgtgtgcaatggatcgtagagaaagagcactcattcgtcaattacatttccctaacgacttaagagagaacatttcattattgaaatatcccgtatgtatacgttttgaagacggttcttttataggaacaaatcacagcttcgagcgatttattaaattatcatattgttcatgtgatgaatggtttgagcatttgactttagaatccaagttacaactatcaagatctgagatggattcatatttttcaacttatggtgtaagttatattaataatgttttaattagtgctatgtcatggagcatggttatcgaaacactcaatacaaacgaaggttgttttttcatctggcgatttattgagtcaaatgacaaaaatatttcaacatctttgatttctaaatctaatgatgggttgatgtttttttctggggaatatgtagatattgaaccctatcttgtagggtttagccattattattctgcagcagtgacaaaaattagtatatctaaatccaagaagaaaacgatgaattttttcaaaatgaatgggtttagttccagagatcactggttggatgaaatgctcaggtctgaaaaaatactatttctatatgatagagtaaaaggaatattaaaaaacaagtgttaa

SEQ ID NO: 239454 - DNA, 867 bp, Klebsiella pneumoniae
atgcaaacttaccagacaggcgatagcctgattttcaaagtgccggagcgcgagatttccctgcagccggcagcgctctatccagaggcgttcccggtagcggaggcggaggccgttattcagccgattgcgctgtcaatccacagctgggtggtgcagaccccccacgatctgattgttatcgataccgccaccggcaatggtcgggagcgcggcggcaatccgctctatcatcaacttaacacgccgtatctggagaatctccgcgccgcaggagtgaacccggaggacgtgaccctggtgctactgactcacctgcataccgaccatgtcggatggaataccgtctggcaggacgatcgctgggtgccgctgtttcccaacgcccgctatctgtgctcggcaaaagagctgtcgcgggtgaaaaacagcgaacgctaccgggcgctgtggcttgacagcctgctgccggtgattgaggccggccagctggagaccgtcgatgtggcgacccggccgcgggtcggcggacggatcgactttattcccacccccggccacagtccggaccatgccgcgctggtcctcgccgccggagatgactacgcctgtttctccggcgatcttctgcattccccgatccagtttgcccatccgcagtggaattcagcgttctgcggcgatccccggcaggcggaagtctcgcgacgggagatgatggcgtggggggcaagccatcatgctcaatggttcaccgggcattttgccgggccttcctgcggctggctggagaaggataagcaaggtgactatcgctggcgagaggccgggaaacaggctgcagataaggggaacagtgatgaataa

SEQ ID NO: 239455 - DNA, 129 bp, Klebsiella pneumoniae
atggagctgaactggcatggcggtggctaccagatggccccaaagggtggcgtactgaagaatcgttgctcgatgaattttctaaactacctgaagatacaatcgaatttgatttcacagatgggctag

SEQ ID NO: 239456 - DNA, 855 bp, Klebsiella pneumoniae
atgcaggtttctgaattcatttctctgatttctcccaaaaatgcccctcataaggttgtgttacctgattttactggtctggcaattcggcttgatgcacaaatcaggaaccagtttcatcaactgaaagaggatgagcacttccttcgatatcggcagttgtcggaaaggtggtatcaggcgggctctattagtgacagaaacaaccgcagtaagcgttttgagaagatcatggatgactcacttgattttttgctttacagccaagacgtcatgcctaacatcaatccagatgatctccaatggcatgattacgaaaaggctagcagtaagggtaaaatgtactgtgtagcgcttctgttccatgtcattgcacgggctgcatatgaacccgaatctgtgggtaaagatccgacacttccagaatattgccggtggatgaaaaattggatagagaaaacattaggtcatgattttttagatagaatgatgatctattgtgcgctgtttgccccagcgtattttcccgcgttacaacgtctgagcggagagaaagaaacgcgtgatgtccatgaattcctggctgagcatgttcgcactttagctcaaaaaaattcttcagaggtaaattatagagatcaacggcaattcacgtttggctacaccatgttcacgaagcaacaatttgaatttctggacatgatgcgcgatgtccattaccggattgattgtattgaacagctccttctggaccttatagaacgtaaggttgtggatttcactgatgcatctgttgcaggcacgtggattgagaagcaaattcagcggcttgaatcaaacgacgtaaagcagtaa

SEQ ID NO: 239457 - DNA, 165 bp, Klebsiella pneumoniae
atgatggagatattctggaccatgctggccagccaggacaggaagcgcattcgtgaatacattgcggagcagaacctgatagcagccattgaactggacgaacggattggttatttcggacgaacgcaccggcttacgccggttttacatctgtactacatgtaa

SEQ ID NO: 239458 - DNA, 270 bp, Klebsiella pneumoniae
atggcacaggttaatatgagtttaagaatcgacgctgaactgaaggatgcttttatggctgctgcaaaaagcatggaccgtaatggctctcagttaatccgggattttatgcgtcagaccgttgaacggcagcataatacctggttccgtgaccaggttgaggcaggacgtcagcaactcgagcacggcgatgtacttccccatgacatggtcgaatcctctgctgcagcatggcgagatgaaatgagcaggaaggttgccggtaaatga

SEQ ID NO: 239459 - DNA, 234 bp, Klebsiella pneumoniae; identical to SEQ ID NO: 21645

SEQ ID NO: 239460 - DNA, 123 bp, Klebsiella pneumoniae; identical to SEQ ID NO: 154003

SEQ ID NO: 239461 - DNA, 345 bp, Klebsiella pneumoniae
gtgaagatgatcattttcgctttgcttgtgctggtggctgtgctcgttctgttacttctgcgcaaatatacccggctggagttcgtagggcatgccagcctgctgctgaaaacgtggtctgtaaagctgggagctatcggcgcgctggttggtgtatgggcgcagtcgttcccggatgctgcgctgcacgcctgggcggtgctgccgccggatatcaaaaacatcctgccgccaaacatcgttgcgttgattagccctgcgctggtggtgctggccgtactatcgcaatacgtacgccagccagcattgaaagaaaaggccgacgaactgaaggagcagcaatga

SEQ ID NO: 239462 - DNA, 981 bp, Klebsiella pneumoniae
atgcgtatctttgtagacgacggctctaccaacatcaaactggcctgggttgaagacggtgcagtgaaaacgttaattagtccgaatagttttaagccggaatggtctatgacgctgcagggactgactgatgccactgtacccgcttccgcaaactatgagattgatggagaaaaatacagctttgatcaattgagtccggatgcagtgcgcaccacagaaacgcgttatcagtacagcgacgttaatgtggttgctattcatcatgcgttgatgcagtcaggtattgctccacaacctgttgatattgttgtgactttacctttaggtgagtatctggatgagaacgatcagccaaatctggctaatatcgaacgtaagaaaaataatgtccggcgaactgtaacagttcaggggcgtgaaaactttaccattcgtaaagtcagtgtcttgcctgagtccgtgcctgccggttttgacgtgctgaaagatctgaatgatctggagtcgctgttgattgttgatatcggtggaacgacccttgatattgcacatgtccgcagcaaaatgtcaggtttcacaaaaacctattgtgaccccaagactggcgtctccatcattactgaagcagttaagcatgcgatggatgtgaatgtgagtacacgaaccagttcttattttgcagatcgtctaatccagggccgggatgacaatgaattcctgacccgttatatcccgaatgcagaacagcgtgagcggatcctgacagtattacgtgaccgggaaaaaaaactgcagcatcgtgtggcggattcagtaggacgctttgctggttttactcatgttatggttgttggcggtggtgccagccttgtggctggggcagtaaaaaaagcgacaggagtgggtgataaccgtttctttgtcagtgacaatcctcagttcgatctggtgttgggaatgatggcaatgaagggatga

SEQ ID NO: 239463 - DNA, 348 bp, Klebsiella pneumoniae
atgaggaagagaatgcgaacgatcaccacacgtgaacagttattagtgaacggaaaagtcagggaacggattgccacacatatcgtgacaggcgctcacgggtatgaaacgctttgcacaagtggttataacttacaatacaataaggaacgggtactgattgaaaactgcgaaaaggtggctgatggagaactgcctgtcacctgccacacctgtttttctatatggcaggatgtacaccggttcaaacctggtgactttgacacagaatcaggaaagggaaatttcactgatacggagctcacgaaaatcacaattggacaagaaaaaacgccgaatgcgtgttga

SEQ ID NO: 239464 - DNA, 204 bp, Klebsiella pneumoniae; identical to SEQ ID NO: 9795

SEQ ID NO: 239465 - DNA, 222 bp, Klebsiella pneumoniae; identical to SEQ ID NO: 9794

SEQ ID NO: 239466 - DNA, 987 bp, Klebsiella pneumoniae
atggcgtttgcgatcatgagggcgaagaagctcaacagcatgggcacggtggcggctgcgttgcagcactgctaccgcgaccgcgagacgccgaacgccgatcaggagcgcacaccggacaacgatcacctggcggccagatcgaccgatgaggcgatgggcaagctcagggagcggttgccggagaagcggcgcaaggatgcggtgctggcggtcgaatacgtgatgagcgcctcgccggagtggtggcagaccgcaagcgccgaccagcagcgggagttcttcaagcgatcgaccgagtggctggccgacaagtacggcgctgagaacgtggtcacggccacgatccaccgggatgagctgaccccgcacctgtcggcgttcgtggtgcctcggacggctgacgggcgcctgagtgccaaggagttcattggcaaccggacgaagatgagccaggaccagaccagctacgccgaacgggtggccgatctggggcttgaacggggcatcgagggcagcagggccacacaccagcgagttaaaacccactatggggcgatccagcaggcaggccgagacgtgccacacctgacgcctgacgagctgaaaccccagaaggtcaagggggtgtcactggccgagaaggtgttcggagccgtggagacggtcgaaggggtggcgcaaaggttgaacgccaaaataatggggtctgtgcagccgatggccgagaaagccgctgtaagcgcccagaacgagcgaagagccaaggagctaagggaaaccctagcccagcagcaaaaacgcttacaggcccttcaggagccgtttaaggggctatccaaggatcaggtagcgggactgatccggcaggcggtgaaattgcggcaggagaacgagcaggagaagcaggagcgcgcccagcagatcaaagagcgattcaaggccaagcgggaacgggagcgcagcgaccgcagcaggggccgttaa

SEQ ID NO: 239467 - DNA, 663 bp, Klebsiella pneumoniae
atgggaaccgccattaaaaagagaaatctggaagtaaaaacccagatgagcgaaacaatctggctggaaccttcaaataataagacggtttatctgcaaatcaaaaatacctccgataaggatatgagtggcctgcaggcaaaaattgccagcgccgtcacttcaaagggatatcaggtcgtcagtaacccggatacggcgggctactggatccaggcgaacgtgcttaaggccgataaaatggaccttcgtgagtctcagggctggttaagccggggttatgagggcgctgtgactggcgccgctttaggggcagggattaccgcttacaactccagttctgcaggggcgactctgggtgtaggacttgcagccggtctggttggtatggctgctgacgcgatggtggaagatgtgaactacaccatgatcaccgatgttcagatcgcggaaagaaccaaaactcaggttcagactgataacgtggccgtattacgtcagggaacatccggcgcaaaagtgcagacaagtactgaaacgggtaatcagcacaaataccagactcgcgtcgtctctaacgctaataaagttaacctcaagttccctgaagcccagcctgttcttgaagaccagctggcaaaatcgatcgctaatattctgtaa

SEQ ID NO: 239468 - DNA, 408 bp, Klebsiella pneumoniae
gtggctgatgaaaaactgacggatcaggagaaaggatttatctccagcaccaccatcccggtgttcaaatacctggtcgacccgcagatgctcggggtgtctaactcacttatttaccagctgacagactatatcggctacgacatcctgctgcagtacattcaggaacttatccagcaggcccgggcgatgatttcaaccggtaattatccccagtcgacaatggatatgatcatggaaaacctcaaccaggcgagtgtgcagattgccgctttccagtcccgtgttcaggtccagcaggacgccttgctcgtggtggacagacaaatgagttacatgcgccagcaggtctctgcccgcatgatgacccgctaccagaataactatcattttggggggaatctgtaa

SEQ ID NO: 239469 - DNA, 639 bp, Klebsiella pneumoniae
atgaaattaatgaatctgtttatggtcatgcttttgctgaccggacgagcagtgttggctgaaacttcctctgttacagacagggaatggctgaagcagcaggagaacctcagcgaacaactgcgccagcatccggataaacagctgcagcaggagcttgaggcgcaaatcagccgcaatcctctgcccaaatctgaccgccagtttatcgataatctggtcagccagcagaaagcggcgaatcaggaaaaaccggcagaaggggcgctgtactttgtctccttctcgatacctgaagaggggctgaagcggatgctgcacgaaacccggcagtatggcattccggcgacactgcgcgggctcgtcaataacgacatgaggaccaccaccgacgcggtgctgcagctggtgaaagacggcgtgaccgacggcgtgcagatcgacccgacactgtacacgcagtacagcatccggagtgtgccgtctctggtggtacggtgtcaggccgggtatgacgtggtacgcggtaacattcacgtcaaacaggcgctggagaaagtcgcacaaaccggtgactgcgcacaggtggcacggcggatgcttgatgcgccctcgaatgccgccgggagtcagccatga

SEQ ID NO: 239470 - DNA, 243 bp, Klebsiella pneumoniae; identical to SEQ ID NO: 7701

SEQ ID NO: 239471 - DNA, 324 bp, Klebsiella pneumoniae
atgggcagaaatatgtcagcagcacgtaccgatggctttattcgtaatattcattcccgcaatccctttgatgttatccgggctgatgtggtgatcagcaggctggaaaagcaggctcattggggatgtggtctgcactatgaaatttatgaagcgaatttgtttgatatggcgatgaatcatctttcccggcttcctctgaaggatcgtccggtattcattggtgctgctgcacgaaaggggctttttctgacgatggaagaaaccaggctggcacgggaagcgaaagatgctctgatggctgaacttgctctggaatactga

SEQ ID NO: 239472 - DNA, 333 bp, Klebsiella pneumoniae; identical to SEQ ID NO: 95392

SEQ ID NO: 239473 - DNA, 612 bp, Klebsiella pneumoniae
gtggcaaagcaaaagttcaaaatcaccaactggcccacctacaataaagccctcatcaaccgtggctccataactttctggctggatgatgaagctattcaggcctggtatgagtcagcaacaccttcttcacgaggcagacctcagcgctattctgaccttgccatcacgactgtgctggtcattaaacgcgtattcaggctgaccctgcgcgctgcgcagggctttattgattccattttttctctgatgaacgttccgctacgctgcccggattacagctgtgtcagcaggcaggcaaagtcggttaatgtcagtttcaaaacgcccacccggggtgaaatcgcacacctggtaattgattccaccgggctgaaggtcttcggtgaaggcgagtggaaagtcaaaaagcatggccaggaacgccgccgtatctggcgtaagctgcatctcgccgttgacagtaaaacacatgaaatcatctgcgctgacctgtcgctgaacaacgttacggactcagaggccttccccgggtcttatccggcagactcacagaaaaatcagggcagcatcggcagacggcgcttacgacacccggctctgtcacgatga

SEQ ID NO: 239474 - DNA, 489 bp, Klebsiella pneumoniae
atgaccatgaataataaatccggactgcgcgccgtccacatcaccgatgttatagacacccggcaccggcggaaaataaagcgcagtctttccggctttaatggcatcctcaaccgcgcgggacacgtccacatccaccccggcggcatatttcagggtctggatatccgtttcatttttaataaaatcaaaaatggtcgcctgctcctgaaagcggctttccatgctctgataaccagcggaaatagtctccccccaacctgccgggcttttcaggtcgccgcgcagcgagtcgatggcaccatctatattttccccctgcagctccaaaagcgctttcaggtattgcgtacggttggcaagctgtcgcgcctgcatattagcgacaccatcaacaccgcccagcacccggtcatttcgtcgcaggagataaatttcttcttcccactgggaaatctcgttaattttcatcgctggcattcccggtaa

SEQ ID NO: 239475 - DNA, 597 bp, Klebsiella pneumoniae
atgagtgaagaaaaacgccctgtactgagcctgaaacgaaaaccggcggagaacagtacggcacccgcggaggcgacacctgtccctggtgtggtgcgccgtaagaaggtcgtggtggtttcgtccccgccggcctggaaggcaaagaaagagaaacttgagaaggttaaacaagcggccgaagccgccgcgcgtaacgcggcgccggcgccggttaaagcggtaaagacgccacctccggtgcgttatcttcgcctgctgccgccggaacaggccattatgacgctgaaggcattctggccacagctgttcgacggaaactcaccccgtctgctggcaacgggcatgcgcgaacagctgtttgccgacattgtgaaccgtgacctgccgctgtcgcataaacaggtgattaagtgcctgaagagtctgacccggtctgcgggctatctgtcccggatgaaggagggagccgcccgctatgatctgcaggggaacgccgtcgcgaccgtcactgcaggggaagcgcagtacgccagcgagcgcatgatgaaagaactcctgcgaactgagcgtatgcggagccagtcagctggctga

SEQ ID NO: 239476 - DNA, 378 bp, Klebsiella pneumoniae; identical to SEQ ID NO: 146978

SEQ ID NO: 239477 - DNA, 396 bp, Klebsiella pneumoniae; identical to SEQ ID NO: 100678

SEQ ID NO: 239478 - DNA, 198 bp, Klebsiella pneumoniae; identical to SEQ ID NO: 226861

SEQ ID NO: 239479 - DNA, 255 bp, Klebsiella pneumoniae
atgtcgcagtggaatattgcctctttttcaaaggaggagcaggacaaagttgccgtcgataaggtggctgctgatgttgcctggcaggagcgcatgaacaagcccgtcatgccggaacttgttgaacgggaacagcctgaacacctgcgcgaatatttccatgaacggttccgcgtacatcgactgaacagtcagcagctgccgcgcgcaaatgcacccgaatataataaaccgggcgatgatcagcagaattga

SEQ ID NO: 239480 - DNA, 708 bp, Klebsiella pneumoniae
atgcaggcatctgttgtctactggctgtcggcaaactatcgggccagcggcacggctgtcgccatggatgaatctccagctgatgttatgcgcaaggcgatgaataagctggtgaagcgctggaagcggcggtttgatgacatggcgcaaaagctggccgacaggttcgctaacgacgccatgaaaaacgcggatgcgtcactggccacagccttcaaagatgcggggtttactgtcgagttcaagatgtcctcgcagatgaataacgctcttcaggcgaccatcgccgagaatgtcggccttatccgatccatccccgagaagtatttcaccgaggtggaagggctggttatgcggtcggtagcgcgtgggcgcgacctgtcctatctcaccgatgaactccagaagcgatatgggattactcggaaccgtgcggcgttcatagcgcttgatcaaaataacaaagccacctcggtattgcagatagcaaggcagcgctcccttggcatcgtcgaaggtgaatgggaacactccggagcgggtaaagagccaaggccgggacatgtagctgcaggaaaacgaaaacagcgatttcggcttgataaagggtgttatatcgatggtgagtggatattccccgggcaaaagccaaggtgcaaatgcacgcataggatagtgatccctaatgcgttcttgcccgcaaagtaa

SEQ ID NO: 239481 - DNA, 861 bp, Klebsiella pneumoniae
atggatttatggactaaagatgagtttgaggaaaggctgatagcgtcattgcttatgattacctctggtacttattgcggaatctctggcaggaaaggctcgtcaaaagaaaattcaaatggcatggagtcattcaagaaggcaatttccaacagggtttatatcccttacgatgaaggagagttcatcttaaatggcgtaagcttagctaagccagcgaaacggttctcatctactatttcatatgttcccgggtgtgatgcgcttggtttaacatcggttgagtttgtaaaccagctgccaaaaaatattattcgcacgggtggtggtgaagcgctaaaaactacactcaatatccttcaggatggtgaggtaaggaatgagattttttatctaaccctcacaaaagatggcgtgcttcataactgccttaccagaatgaagaatggttacatttttcgcccaactgacaagcgcggtgatattgattgggattttcatgacgacgagatggtagacggaaaccatcccgtcaatcgtcaaacgcttattacagccatgcacctacagtcgatggacgagatttttgaagactggtgcgtcattgctaaaaccgaagggaaagaaatcggttttggcattaccaaggagcatattaaatccctattttacgcgatgagtacgccactcacggcgacgggaaggcactcacccatattgcactgggtttcctcgcacaggcgcaggatgcgcagcggaaccgatttggatgtgaaaaagcatttgcgtggggccacagcatttacttgggaaggaattagatttgagattattgagccggtaaagcgcagccagcagtaa

SEQ ID NO: 239482 - DNA, 537 bp, Klebsiella pneumoniae
atgaaggtagaaaaaagcgatgttctggcatttaccatttccgatgttgaacgcctcgaccctgtcagggtgatgattgaaaactatgagccaggaaagggaagaattactgtcacctgctacggccaagcatggactggcgcatggtttgcgatgggcggtgacactgttcaggcgttcattaagcgtgtcagcaatgactacctgatcgggtgtttagctccccggcttgaaagctcggttgacgatgataacgacgccaaccttgaattcgttaaatcgcaaatcatcaagcttcgccgcgaacatgaaattgataagggtgatgcccgtgaaatgtggacagaggccgaaaatgcggaggatgtgaaggcgaactgctgtgattttatcgttggggacaaacttttgaaattgtttggcgacgacccatggtatgcaggatggccgtctgtacccaatccgaaatatcaatacctcgatcgtatcctgaatgcggttcgtgtcgggctggtagaaatggagcgtgcagcatga

SEQ ID NO: 239483 - DNA, 747 bp, Klebsiella pneumoniae
atgaagtctgtatttaaagtttcactggctgcactgaccctggcttttgcggtttcttcccatgccgccaataagaccctggttgtcgccaccgatacggcgttcgtcccgttcgaatttaagcaaggcgataagtatgtgggttttgacgttgacctgtgggcggctatcgccaaagagctgaagctcgactacaccctgaagccaatggacttcagcggcattatcccggcgctgcaaaccaaaaatatcgatctggcgctggcggggatcaccattaccgacgagcgtaaaaaagcgatcgacttctccgacggctactataaaagcggcctgctggtgatggtcaacgctaataataacgacatcaaagatgtcaaagatctgaacggtaaagtggtcgcggtgaagagcggcaccggctccgttgactacgcgaaagccaatatcaaaaccaaagatctgcgtcagttcccgaatatcgataacgcctatatggagctgggaaccggtcgcgcggatgccgtgctgcacgatacgccgaatattctgtacttcatcaaaaccgcgggcaacggtaagttcaaagcggtaggcgaatcactggaagcgcaaaactacggtatcgccttcccgaaaggcagcgacgagctgcgtgagaaagtgaacggtgcgctgaaaacgctgcgcgacaatggtacctataacgaaatttataaaaaatggttcggcactgaacccaaataa

SEQ ID NO: 239484 - DNA, 501 bp, Klebsiella pneumoniae
atggatcacgccgtgaaagatagcctggctctctttttgccggcgcaggcggatctgccgggtcaagcccgggttgccattgataatcgcctgcgcgctggcgaacgcctgcgggttgatttcactgccggtaaagcgccagccatactcgtgagcgccgatcaggggatagatgaggttggcgccggtgccaatatcaaggatcgtggcatccttcggcacctcgccgctatccccggccagcagatccgccagatgatgaatatagtcggcccgcccaggcaccggcggacagagaaagccgtcaggaatgtcccagtgtttgaccgcgtagaaatgcgccagcagcgctttattcaacgccttcaccgcctgcggattggcaaaatcaatggtctgctcacccagcggattgagcgtaatgtagccctgcaggtcaggatgggcctggcagagcgcgggcaggtcgtagcgttgatggtggcggttacgcgggtgtaa

SEQ ID NO: 239485 - DNA, 528 bp, Klebsiella pneumoniae
atggacgcgattgaactcaggatgggggacctacgccgctatatcattaccatgatcgacgagcacagcgactatgcgctggccctggcggtcccttcactcaacagcgatattaccagccatttcttcagcaaggccacaaagctctttcctgtcgctatcagacaagttgtcactgacaacggtaaggagttcctcggtaactttgataaaacgctacaggaagcctcgattaaacacatctggacctatccgtacacaccgaaaatgaatgcgacctgtgagcgatttaaccggacacttagagaacaatttattgaattcaatgaattgttgctttttgaggacctgaatttgtttaatcaaagaatggctgaatatctggtgctgtataacagcaaaaggccacataaatcactcgaactgatgacgccagtggactatattttacgtgagagtaaaaattgcaatatgtggtggacccatacaccgactccctcaacccggcaaaagcgcgtatactgctga

SEQ ID NO: 239486 - DNA, 1530 bp, Klebsiella pneumoniae; identical to SEQ ID NO: 134320

SEQ ID NO: 239487 - DNA, 774 bp, Klebsiella pneumoniae
gtgtatgcaagcataccagttgctgaagcttacactaaaatcactgagcaatcaaagaaatggtctcgcaaagaaaacaaaataaatcaagggtttttagccgttgataatccagctgacttggccattgaagcaatcagaggattaagaaccagccttcattttgcaatgatggaatcgagaaataacgttcttatgatctcaggtgcgagtccgaatgcaggtaaaacctttgttagttcaaatttatctgctgttattgcacagacaggaaagaaagttatctttattgatactgatatgaggaaaggatatacgcacaaattatttaatgtcagtaatgataatggattgtctgatatactttcaggtaaaatctcaatagagaaaagtattaaaaaaatatcttcagctggatttgactatattagtcgaggcatggctcctcctaatccagctgagcttttaatgcataagagatttgcggaactaataaattgggcaagcgaaaactatgacattgtagttttggatactccaccgattctcgcagtaacagatcctgctgtaattggacactatgcaggtacaactttacttgttgcccgttttgaactgaatacagttaaagaaatagaggtaagtattaagagatttgaaaatactggcattcaagtaaaaggttgcatattgaacggtgttgtgaagaaagctagcagttattatggctatggctatagtcattatggatactcatataaagataataactaa

SEQ ID NO: 239488 - DNA, 738 bp, Klebsiella pneumoniae
atgcatgttgtcatcagcactgtggaagaaaatatgaacaacaacaatctgattatcgtcgcagaagacgatgatgacatcgctgccatactgacaggctatttacgtaaggcaggtatgaaaaccttaagagccgaagacggtgagcaggcaatcaatcttacccgtctgaacaagcctgatctcctgctattggacatccacctgcccgtgtacgatggctggaatattctcaccacgttaagaaaggaaacgaatgtaccggtcatcatggtgacagcactggatcaagacgttgataaactgatggggctacggctcggggctgacgactatgtgataaaacccttcaatccatctgaggttattgcccgggttgaagctgtgcttcgcagaaccagaccggttgcagagtctacacattcacggcctttaagaacgccttttttaacgatttatcctgatgagttttacgttgaaatcactgcacaaggtgaggtttccacgccagtattaaccaccactgagtttaagcttttaacctatttggcgagaaacccgagaaaagtctgttcacgtgaagagttactcgatgcgtgtttacctgagggagactcgctggatcgtactgtagacagtcatatgagtaaacttcggaaaaagcttgaacatgccggattgaagggcattccggaaagcatccgaggattaggctaccggttgggtgacaaaaaatga

SEQ ID NO: 239489 - DNA, 822 bp, Klebsiella pneumoniae
atgaggccacggagagaaatttttgcaaaagattatattttagagactgtagaacaatttaaacgatgcgttgcattaaatactattgaacgcaatgaaatggaatgggcgtatgatgttttaactgaatattttgattcaataattattaatggggagaaaagtgtagaaaaagcatatcatatttttagtaaagcttcttctgtatatttggaaaggaatcgtagtctatctaaagatttcaagtttattccgtatagtagagaaagctctctacagtcaaatatcagctatgaagaattaaagaaattatttcttcaaaggcgttcagtccgttggttcgaccaagataagaaagttgaagcgcagagtttaatggatgctatagagcttgcaagtttagcaccttcagcttgtaatcggcagccatttaaattttacttcacggtcgatcagaacaaagctcgagaaatagcaaaaattcccatgggaactgcaggttttgctgataatattgttgctcttattgtaattgttggcgatctttcttattatccttatgaaagagatcgtcatgttatttatattgatgcttctctagcagcgatgcagttaatgttagctttagaaactttagggttaagttcatgccctgttaattggcctgatatagagtcctttgaagtaaaaatggagaaaaagttggggcttacaaaaaatttgagacctataattttattgccagtaggctatgcagatcttactgggctaataccatcgtcgtcaaaaaaatcttcttcagaattggctgttcagatttaa

SEQ ID NO: 239490 - DNA, 1149 bp, Klebsiella pneumoniae
atgatcattgaaataaaaggtgttcagtttgtgaataaaggtgcagaattaatgatgcacgctattattcagcaaatgaaggtccgttggccaaaagctgaatttgttttacttccacataatcattctccttattacgatagggtcaatgtgggttcactgcaaaagttcaactttagaaaaaacaccttagatttgaattttattagttatttaatacctagtaaggttcgaaactatttgaagaaaagctatggtattgttttagaatctgatgttgatgtaatattagatgcatccggatttgcgtatagcgataaatggggatctttgctaattaaacaaatgagcaaagaggtgcttagatataataaacataataaaaaatatattttcatgccgcaagcatttggaccatttactaatgctagtgataaaaatctgctcaaagcatcatttccaaaagcggatctaatttttgctcgtgaaaagacatcgtttgattacgttcatgaattttccaaacaaaatcttaaaatgtctccagattttaccaatcttgtaaaaggtgtgatccctgattattataaagaaggtgataagaaaattgttatcatccctaataataatatgatgaataataaaaacgataatttactatgggctcgtaattatattaatgtactgtcaaatgcagtcaaagcaataaaaaatcttggttatgaacctgtcctactcaatcatgaggggaaattagatggggatatatgtaaaaccgtaaaaaataatattggtgattctaatcttgaaattataacagaaggtgatccgcttaaggtaaaaggaattatcggtgcaagcgctgctttagtaagttctcgattccatggatgtgttagcgctctatgtcaaggtattccatgcttaggtacaagttggagtcataaatacgaacgtttattcgaagattatggcagagagaaatttttactgactcctgaaatgacaattgaacaaatccagttgcttcttgaggaatgtatgaacaaaaataccaccgagtttgaagcatacaatgagaaaatacaagaattaaaaaaagattccgaaaaaatgtgggatgagatatccataattttggataaataa

SEQ ID NO: 239491 - DNA, 300 bp, Klebsiella pneumoniae
atgacaaaaccaacatcaaccaccaaaaagccacgcaagcagcacactcctgaatttcgtcaggaagccctgaaactggctgaacgcattggggtggcagctgccgcccgcgaacttaacctgtatgaatcacagctctacaactggcgaagcaaacagcaaaatcagttctcttcttctgaacgcgagcaggacatgtccgctgagatcgcccgtctgaaacgtcaactggcagaacgggatgaggaactggccattctccaaaaggccgcgacatgcttcgcgaagcgcctgaaatga

SEQ ID NO: 239492 - DNA, 888 bp, Klebsiella pneumoniae
atgcttcgcgaagcgcctgaaatgaagtatgtcttcatcgaaaaacatcaggctgagttcagtatcaaagccatgtgccgtgtacttcaggttacccgtagtggctggaacatctggcatcagcgtcgttatcaggtaaaccggcgtcagcagttccgccttgtctgtgataacgtagtccgggaagcattcagtgacgcaaaacaacgctatggcgcgccacgcctgacggatgagcttcgtgcccagggttaccggttcaacgtgaaaaccgtggctgccagcctgcgtcgtcaggggctacgggcgaaagcttcacgaaagttcagtccggtcagttaccgcgaacatggtctgccagtctcagagaatctgctgaagcaggacttttacgccagcggcccgaatcagaagtgggtgggtgacatcacgtatcttcgcactggtgaaggctggctttatctggccgtggttatcgatctgtggtcgcggtcagtcattggctggtcgatgtcctcacggatgacagcacagcttgcctgcgatgcgttacagatggcgctgtggcggcgtaaacgtccggaaaacgtcatcgtgcatacagacagaggcggtcagtactgttcaacggattaccagagcttgctgaaacgccataatctgcgggggagtatgagcgccagaggttgttgttacgacaatgcctgtgcggaaagcttcttccatacgctgaaggtggaatgtatccacggagaggactttgtcagccgggaaatcatgcggacagcagtgtttaattatattgagtgtgattacaatcggtggcgtcgtcacagtgcctgtggcggtcttagtccggaacaatttgaaaaccagaacctcgcttag

SEQ ID NO: 239493 - DNA, 1020 bp, Klebsiella pneumoniae
atgcagtatacccggctcgggaagagtgacttattggtctcccgtatctgcatgggatgtatggggtttggcgatccgtcaacgggtcagcatcgctggacgctggacgaaacagccagccgggacatcatccgccacgctctggaacagggcatcaatttttacgataccgccatcgcctatcagaacggctccagcgaacggtacgttggccgggcgctgcgggagatggcaaaacgcgaggaggtggtgctggccaccaagtttctgccacgaaccgccgcgcagattgccgaggggatcagcggaaaacaggctataacccgctcgcttgaccagagtctgcgaaacctcgggatggactacatcgacctctacatctaccacatctgggattacaacaccccggttatcgacgtgctggaggcgctgcacaccgcagtgatcgccggcaaggtgcgcgcgattggcatttccaattgctatgcctggcagttggcgaaggcgaacgcccttgccgaacgcgaagggctgacatcctttgtttctgtgcagagccactacaacctgattatgcgtgaagatgaacgagagctgttcgggctgtgcgcggaagagggtatcgccatgactccctatagcgcactggccagcggccgtctctcccgcttagaaggccacacgcggcgagcggtggaagatgattatgcccggggcaaatacgacggcacagcagagcaggaccggatcattattgcccgcgtcgccgaacttgccgaacggcatcaggtctccatgaccgaaatttcgctggcctggctgctgactaaagtcaccgccccggtgatcggcgccacgcaaaagcatcatgttgacggcgcggtcaacgctgtagcccttcaactgagcccggaagacatccgttatctggaagaagcctaccagccgcacgttctcacaggcgtgatggcgcaaaacacgccgcaagccaaagaccatcatcaggtgtggacgcggtaa

SEQ ID NO: 239494 - DNA, 414 bp, Klebsiella pneumoniae
atgaataacgcgctttataatcagatacgcatctttcagagcattgcgcgcgagggcaatatctcggccgccgcgcgcaagctcgaaatcacgccgccgtcggtcagcaatgcgctcaggctgctggaggagcatattggccaccccctttttgtgcgcactacccggcgtatcgagctgacggaaaccgggcaacagctgctggagcagaccgccgcggcggtggagacactggaaaagtcgctggaaatcatccgcgaccagaatcaggagccctccggggcagtgagaataaccctctcgcgctttgcctacctgcttattctcaaaccggcgatggcggcattttgtcagcaatatccggggatccagctggaaatatcggtctatgacggtaccgtcaatattatttaa

SEQ ID NO: 239495 - DNA, 1176 bp, Klebsiella pneumoniae
atgagcctgcaaaaaacctggggaaacattcacctgaccgcgctcggcgcgatgatgctctcctttctgctcgtcggctgcgacgacagcgtcgcgcagaatgctgcgcctcccgccccgacggtcagcgccgctaaggtgctggtgaagtcgatcagtcagtgggatagttttaacggtcgcattgaagcggtggagagcgttcagcttcgccctcgcgtctcgggatacattgataaagtgaattacaccgacggccaggaggtgaaaaagggccaggtgctgttcacgatagataacagaacctatcgcgccgcgctggagcaggcgcaggcggcgttggcaagagccaaaacgcaggccagcctcgcgcaaagcgaggcgaaccgcaccgataaattagtccataccaacctcgtctcccgtgaagagtgggagcagcgccggtcagccgcggttcaggcgcaggccgacattcgcgccgcgcaggcggcggtggatgccgcgcagcttaacctcgacttcaccaaagtgaccgcccctattgacggccgcgccagccgggcgctgatcaccagcggtaacctggtcaccgcgggcgacaccgccagcgtgctcaccaccctggtctcgcagaagacggtgtacgtctactttgacgtcgacgagtcaacctacctccactatcaaaacctcgcccgccgcgggcaaggcgcgtccagcgataatcaggcgcttccggtggagattggcctggttggcgaggagggttacccccaccagggcaaagtggattttctcgataatcagttaacgccgagtaccggcaccatccgcatgcgtgcgctgctggataactcgcagcgtctgttcacgccagggctgtttgcccgcgtgcgtctgccgggcagcgcagagttcaaagccacgcttatcgacgacaaagcggtactgaccgatcaggatcgtaaatacgtctatatcgttgataaagatggtaaagcacagcgccgcgacattaccccagggcggctggcagacggtttacgcatcgttcagaagggattgaatcctggggatagcgtcatcgtcgacggcttacaaaaagtgtttatgccgggtatgccggttaacgccaaaaccgttgccatgacctccagcgccacccttaactga

SEQ ID NO: 239496 - DNA, 918 bp, Klebsiella pneumoniae; identical to SEQ ID NO: 200899

SEQ ID NO: 239497 - DNA, 723 bp, Klebsiella pneumoniae
gtgacaatttcagagtatggggttgagtcaatcaatgattaccagaatggtcaggtttatccatccattgatacagcagcccgaacacgtgtttgtaagcaggatacagaaaacggaattaatgtactgacgttcagcccggaaaactttgcggtgaacaccattaatgcctaccgggttcttaaccctcaacagtttaatgcaaaagacgcactgtctttcgcaatgcttatcaaagccgaagcaagtgattacacgtcaggatacagggctatttttcatatcggtatgaataataatgcaggatctaacgtaccaatgatccgcctgcaattcaccagtgatactgcgttcggaattgtggcgcggcactcctcgcctgaagagacggcagaacagataggtatcaatgggcttaatacaggatacaatgtattattcgttgaactcgattatgttaacaggcgtatcaggaccaaacttaatgacgcgccgatagtaacacgaacagcattcccggggtccagcgggcagaatgttgtatctgcgtcagctgtggttggtttggctggatacctttcggcatcagggcaggcaggaagaacaacgatgttctccggtaaggtgagggaaatgagtattttttctggtcctctgtcagatgcagaaattatgtctgttactgactggttgctgggtaaaagggaaatactgaatacgtaa

SEQ ID NO: 239498 - DNA, 819 bp, Klebsiella pneumoniae
atggcaactaaaggtccttacgaaatacgcaaaaatctggaactcgcttccggggacattctttaccgcgaggccggagtttacgacaccactctaggcctcattgatttcggtgatacctcgctaggcggcgggaaaactgaagggtataccgagaatgaccaaatcagaaacgtgtgctacgtggacgattatgcatatccgaatatggctatgctctatgatggcggcggcattcgtgttgacgagcataacgggagcaaaatcacgctgccggagtcgttcattatccctgccacctgcacaaaacaattagttcgcatgtggtttaaactcccgacgtcggacatcggagatacaaccgttttatacaataaccaattgctggttattggcgggacatatgcatcaaaccagtctctgacatacctgggggcaaacaacaaggcggatgggacgctcaacaatatggtagttggtgggtttggtgtgggtgttgattcaggctcagctattgccaacgccgttaaaactggccaggttgttcagctggcgtggctggccactaaaatcgacgataagtttgtatcgtttcgggtgttcgcaaacggcgcttacgttgcagatttaacacctgtcgcatttggtagtcgcccggcttcaatccctgtgcggcaactgaataataaaggggcgtcggaaaaatcggtacgtaacaccacatatcgcgtcgctatcgacgatctgactgatagcgccctcgaccctgccgatattgttgctatggattactcctgtaatcgcacacgttttagttga

SEQ ID NO: 239499 - DNA, 2076 bp, Klebsiella pneumoniae
atggcctttaacccggagctggggagcacgtctcccgctgtgctgctcaataacgctgagcgcctggataagctggtcaatgggtctgcgctgactgagccggatcgcgctggcgttgagctggatacctggcgcggaatgatggcgaagaatgaagcccttacagaggagacacgacagaatctgattcctctaagccgtcagtacatgaccctggctgatgctcaggctgatatcgcgaacataccagagggcagcacaacttatgtacgtagtgcaggcggtaattcgctggcagacgagtacatcaacaacggtggaacgctggaggccacagggcgcaaaatgccgtcatatgagttgattgaaccgctgatcaacctcatcgaatctgttttgtatgccgacaatgacgagtattcccgctctccggcagattctgcaatcatggacaaaaaccaccgctggttattgcagtggcatggtgatgaaatctggctgaagaacgcggatatcaaaggcactctgaagattaaagaccttcaggtctccggtgacgtctcttttgacgatgcgacaatcaacagactgagtgtttccagcctggacactgatacgatttctattggcggtgttgaaataccggtgtcgttcgcgagtcccgatgagtacgcccgttcgcctgcagactccgcaattatggataaaaaccataggtggctgatgttctgggagggcgacaagttaaatctcaaaaaccttgcagttaaatatgggttgaccgccgggaaaatcgataccagcgagctgagcatcaatggcgttcgggctcctctggattatctaaatcctgacgagtattcccgctctccatatgctgaggtggttgttgataaaaacctgcgcattatggagttcaccgatgaccacggtcatgtcgtcattgccggccgtttaattaatcctgagcctcctgccagcgattcgtatgaggtttatgcggacgctggaaaattatatcgcatcaataaaaccacgtctgaccgcgagttaatcgattcgaacacgaataattctaacgtgcaaaatacacctgaaatattcacgttcgattcgaatcgtgacgatactgtcatcggcaataaatggtttagcgcatacagcccctataaaccagctgcatatttcgggcgacgggcgattgttggtttcggtcattcattcatggctaacccgcgattcctgcgcacgctgtctgatttaaccggtctgccgacctacaattttggccggtctggcgggctgtcgcggactgttgcgctgcgcgagggagcctacactgtttcgtatacgccggtgggtggcagcattcctgcgtctggttctgtagcattaactcctgctgacccgggtgttttgcaggttgttggtaacgcctctcttactgaggttgtgaagggtaatatagccggggttgacggctctctcgcgtgggacggaacaacgctgacgtttacccgcgatgtcgctggcgccgctgtcggcgtctcatcacctgcgccatttatctattatccatacaccattgattccacgaataccgtggcgtcgggtgtgcggtacgatgagcatggtgacgcgattaaccttctctggttagggaggaataatgctactcaatatggtcaagtactgagtgatgcgaaagcgattattgaacatctgacagcacataataaacgctttgttttattacctgagtttcagatggcgtcggaggtaaaaggtacgtacggaaacggcgggattttatatctcaacagtgaatataaaaaactggctccggataattactgcgaaatagatggtgtggacctgctcgctaattttaatgctcactacaacccggcgtacgcgccggacgtgactgatattgacaacggcatcacgccaagatctctgcgccaggattcgctacacccgagccagacgctacaggttaatgctctgtatatcggcgcagacgttaacgcgcaatttgtttatcaatttctgattaaaaaaggttggttataa

SEQ ID NO: 239500 - DNA, 240 bp, Klebsiella pneumoniae
atgccacgcctttacgaaatcgaaacagcctgccgggcagcgataatcatcgagccaaacggtaggcgcctccttacaaccagacggtttttggcggagttggagaaggtaaactggcactggtcgccacggcaggctaaccagtggatagagcactatgtgacgacattccgggatgtctccacgcaggaaggcgatgagcgcacgttccagttatacaacccgaacggagggctataa

SEQ ID NO: 239501 - DNA, 345 bp, Klebsiella pneumoniae
atgatctggccgctgagtccggccagttacggtctgacgggtgttgcgctggccatcggcatggtaatcaccaccggcggacaaaaacctggcgtgcagctcacgggaattatcgtgtccgtcctggcgctgtgttgcctgaacggattatcgcacctgctgagtctgccggcagacacgctgttgttcgccactcttcccacactcgtatttcccctgatggccctgtccctgagcattcatctgtgtccggaaggctgcccgcgcttcatgccacgacatttcttctacattgcctatatcggccatcttctggtgctcctcctcctgttgcacctctggtga

SEQ ID NO: 239502 - DNA, 234 bp, Klebsiella pneumoniae; identical to SEQ ID NO: 160274

SEQ ID NO: 239503 - DNA, 1014 bp, Klebsiella pneumoniae
gtgaatgacaagcagatttctgttcactggtctgagcttccggccgaagagttaatccgtttctggcaggacgtcgatgccggcacacaggataattttcttactgagccggtcaaaaagcggacccgccgtaagcgcggtgaacactccacaaaagccaaatgtgaaaacccgtcctggttccgtcctgagcattataaaaagctctccggggaactggggcatgcctacaaccgtctcgtgatgttcgacaagcggaccggccgccccagactgcgtgttcacgtttcccgtcatcccctttttgtcacgggtcgccgtaaggcaggacgcagatatggtttccggccggaacggcggagcctgatcgactccctctggcccctgctcatcagtttctgtgatggcggcaagcataccgtcggcatatgtatctccaggctggccagagagttaagcccgaaggacgctaaaggaaatgtcatcccggaaacggaggtgacagtgtcacgcttatcccgcctgattgaagagcaggtacgctttggtgtgcttgggctggcggaagagcgcacctgggatcgggaatcccgctcctggctgccgacctatgtctatatcacccatctgggattccagatgctgggcgtcaatatggacaagctgtttaaggagcaggataagaagctccgtcagagcgccgagcgcgagcagctgatccgggacggggtaattaacgaacatgatgatgttcagccccactctgcgcgtaaatgctggtctgcccgtaagcgccgtgaagcactgatttaccgtcgtaaaaaaggcgctgagcgtaaacgtgccaataatctgataaagctgccggtggatgaacgtctttatgccatggaaaagtgggtgttcaaaaccctttctcatgatgaggcatactggtgtacacctgaacgactgacacaactggcgattcagaacctgtaccagctggacctggcactttcaccgccggaatag

SEQ ID NO: 239504 - DNA, 789 bp, Klebsiella pneumoniae
atgaaagcaaacacaatagcggcattaatagttacaacatacattggctttggttttactgcccacgcctcagcacctcagccggtattcagcccggagcaggaagcacgaatcggcgaaattgccgcagactacctggtggcacacccggaaatcctggtcacggtcagcagtaagctgctggagcagcagcagacgcgtaagcaaaatatgtttgcactcagcgtgatggataatcagaccgctctgttgcaggatcctgacaccccggccttcggcccggaaaaggcgaaagtggcagtcatcgagttttttgattaccagtgcgtgttctgcagtcgcttcgcgccggagctggaaaaagtcatgaaagcacagccggacgtccgctatgtctttaaggagtggcctatctttggcaaccgctggccagaatctcttcaggccgcacagcagggtctgtcggtctggaaacaaaaaggagcacaggcgtatgtgacctaccataacgccctttacgccactgggcacaacgagggcgccctcacagagagcgatatcagggcggcggcgtcaaaagccggactggcaacgccagcgaaggacgaaaataccgcatcccttgagaaaaacagcagcctggctgaatcgctgggcctcaccggaacacccgggattatcgtgatgccggtcagtggtgccacacccgacaccatcacggttttcccggaagccgttaccgctgaaagactccaggcagcaatcctgaaagcctcacgcgcacagtga

SEQ ID NO: 239505 - DNA, 5502 bp, Klebsiella pneumoniae
atgatgtcagtcgccccagtagcgtcagccggcgaggctgcaggctactacagcaattccgataactactattttctgggcagcctgcagagcctctggatgggtgagggggcaaaagagctgggccttgagggcaacatccgtggcgatgatctgacggccgtgctcgagggccgtctgccggacggctcacggcttggcaaggaggttaacggacagcacgtccaccgccccggtcatgacctgaccttttccgcccccaagagcgtgtccattctggcactcatcggcaacgataaagaaatggtggaagcacataaccatgccgtccgcgtggcggccggctatgtggagaagctcatctcggcccgcgacacgaaagacggcgttacgtccatcgtacacaccggcaagatggtggcggccgcctatacgcatgatacctcgcgcaatcttgatccgcagttgcacacccatctcctgattgccaacatgacggagtatgcgggcaaatggaaagccctggccacggactatatccataacgcgggctttatcgaaaccgtcatgaagcatcaggtcacgcttgggaaaatttatcgcagcgcgctgcgtgagcgggttgaagcgctcggccatgaagtggaagaagtaggcaagcatggcatgtgggagattaagggcgttccggaagacgtcagggacgaatattcctcccggggcagggaaattcagggtgccgtgggggctgaagccacgctgcgcagccgggatgtggccgccaaagacacccgcagggcgaaagtcgacccttcgaggatgcgcctgatggaacgctggctgggccagatgaaggagaaaggatttgacctgaaggcgtatcaggaaagcgtggtgccgcgtgatgcaggtcttcgtgagaacgcgcctcagccggagcgagatcacctggctaagccggttcctgccgggcctgaactggcttctctgcagacgtcgtccacggcagaaaagagcgtcgatacacctgctcaacccgcagaacgggagagccagtcccgtcagcctgtaccacagcagactgacacgctgagtcagccggcgcagaccggacccgaaaagacgccggcgaccaggagctttcctgcagcgcagctggacactgaaataccccgcccggaactgactgaggctgtccgtctggccatctcgcagctcagcgacagtaaaacgcgcttcacctttggcgagctgatgatgaccacggcggagctgagcgaacagctgccggagattcaggatattcgcgtggccatcgatgcggcgctgaaggacggcatgattgtgccgctggacagtgagaaaggggtcttcacctcccgtattcacctgctggatgaactctcgatccaggcgctgagtcaggaacacctcaaatccacaaaagtcgtcagtttcacccgtccggcgcagtacgcgccggcggcactggaagtggtggagaaagacgccctggttctgatgaatgccccgtcaggcgtggcgggtatccgtgacctgaccgcgcagctggccggtattgccggcgcgaacggtcgtgacgtgcaggtgctggccagctctgccgagcgcgccatttcgctggcgaaatccgacgatttgcgggagcggatcatcagccgtcagcatgttctgagcggtgatttccacctgaaaccccagagcacgctgattatcgaaggggcagagcgtctgggattaaaggagacgctggtactgctgggcgaagcgcgtgcgcaggacgcacagctggtctttctcgacagtgccgggcgtcaggcgaacggtaatgccatgtccgtgctggagtccgcgggggttgcccgctcccgccgcacggagccggcgcccgggctggaggccgaagtggtcagtattccgaacaaacgcgaccgttacgaggcgctggccaaccggtttgcagagctgagcggaggaactgataacgtcaccgccgtcgtggtcggcaaacgtgaacaggcgcagctgacgggtctggtacgtgaggcgctgcagaacgcaggacagctggggcgcgacggcgtggagatagaggcccggcagccggtgtggctcgacagcaaaacgcgccggatgcccggttcataccgtcccggcatggtgcttgaagatcgcacggacgcaaaagagcgtaagtcctatgtgattgaccgggtgcatgaggacacgcgagtcctctcgctcatcgacggggatggcgtgctgacccggatgaaaatcggggatatcagcgctgactggcgtctcttcagccgtgaaaccctcagcgtggccaccggcgaaaaactgctgtccgtggcgggtgaccgtgagcacagcctgaaggccaaagatcgtcttgaggtgaccgggataagtgaaaaggggattgaggttaaacggggggaagacaccctgacgctgccaaaagaccagccgctctatctgtcacatgcttacgtgaccgcgccgggcggacgggataacgacaccggcgtggtgctggccgcgctgaacagccgcgacatatcgacccagaccatgaactcgctggcacagagtggccaccgggcggaagtgttcacggccgaagtgcaggaccgggctgaagcccggctgcagcgcatgaagaccagtgcctctcccgtgcagctggtcagaaacctgagcggtcaccaggacgtcagtcaggcggttgattcactgcatgacagcgtccggactgacgcgggcctggccgtctggcgtgccattaacgaccagcgcaccgtggtgatcagcgagcttaagctggcaacggaagcgcagaaatatcatcccgacctcgaggccatcgggaatgaaattggcgcgatgattaaaaatggcgagctgttgtccgtatccgcagggggagagccggtactggtttcccggtccacctgggagatggagaaagccattctgcgcgtggtggaggaagggaaaggcacacagcagccgttgctggaacaggtaccggaggccgtgctgaacggactcaccgatggccagaaaaaggcgaccacccttgtgctgggtaccacggatcagtttatcgggattcagggctatgccggcgtggggaaaaccacgcagctgaaggcggtgatatctgcactggagaccctgccggcggacgttcgtccggtgatgacggggcttgctcctacgcaccaggcggtgaaagagatgaacgacgtcggtgtccgggcgcagaccatcaaatcctttatcgttgaacatgaccaggcgacggccgcaggcaggaagcccgactataaaggacaggtgtttcttatcgatgaatcctcaatggcaggcaaccaggatacggcagccctgttccaggccattgccagcggcggcggtcgcgcggtctcgatgggggatatcgaccagtttgaatcggtcgacgtgggcgcaccgtttaagctgatgcaggagcgcagcccgatggatgtggccatcatgaagcaaatcgtccgtcagaaagacctgcagctgcgcggtgccgttcacgacatcattgataaccggatcgatgcggccctgcagcgcattgaaacccagccggctgaccgtgtggcgcgtagcgcttcagccgcgcttccggaaagtgcgattcaggaaacggagacgcctgttaacgacatcgtggccgactggacggaccggacgccggaggcgcggtcccgtaccctcattatcacccagctgaacgccgaccgtcgtgcggtaaatgccggcattcatgctgtgctggctgcccggggagagctgggggagaaggccattacggtgccggtgctcgataaaatcacccacacccgtcatgagttcaataaaaccgatgcatgggaagccgggatggtggttaaacgcggcgatcgctaccaggacgtgctggccgttgaccgcaacggcagtacggtgacggtacgcgatgaggaggggaagattgggctgtattccccgaagcaactcatcaccggcgacgtgcagctgtttcgccgcagcgagagggaagtccgcgccggcgatctgctgaagttcacggcgacagacaaggagcagggacagatggccagccagcgctatacggtcgagtcggtcagcgaaacgggcaatattcgtctgaagggggaaaacggccgcatcaccatcaatcctcaggccgtcagggcgcagcagcatattgattacggctgggctgtcaccggctacggtgctcagggggccagtagcgattatgtcattgcgcttgagggcacggacggcgggcgtaaggcacttgcctcccgtcgcgccttctacatctcggcctcgcgcgtgaaagagcacgtccagatatacaccgacgggaaggcggactgggttaaggcggtaaaaacgccggagcgggatattaaaacggcgcacgatgcgctcgcaccagaaacgcagcgtaaacaggcgaaagccatctgggcaatgggacagccggtgaataaaacggccattggccgcgcctgggtgcgccatcagggtatgcaggacgcgtcactgacggcaaaaatcattccggccacccggcgctttcctgaaccggcgctggcgctgccggtgtatgacaacaacggccggagtgcgggcctggccctggtttccctggttgccagcccggaagggcggatgacacagggggagacccggatggtcatgacagaacgtgcccgtggtgcggtactgcagcggagtcagtccggaaacacgattgtggccagcgacctgactgccgcgctcgatgctgtccgcaaccatccaaaggacggtgtggtctggcagaccagcgatgaaccgccttcagcctaccttctgaaagtcagtggtggaagtctcaggcgcgaggaggaaggacttgctcagcgtatcaacgccaaagagagtgacatcctgctttcggcaaaagctgaacgtaatgaaaccgcatcagaaacagtggatcttaaagctgccctggctcaggaagaagcaagacgccagcaacaggagcctcttatcagtaaggcactgttacaggagaatgcgacaaaagatgtggaggagaaattcatgtatacagatccggatgttattcacattcggcctgatatgctcacggacagtgatggtactgaatccgtaaaacctgacagtcgggtattgaaacaaattgctgccagtgacagtaacgccgccagtgaagcaggaagggaacttcgtcacgagagccagcctgaaactgcccgtttaggcaaagaacagcatgcagcatcactgattgttaatcagcttgccaacagtgaacgggatattgttcgtcagccggacgccggcgaacgtgggcgtatgccggaacatgacgaacacaccctcacccgaaccattcagaaagaacgttaa

SEQ ID NO: 239506 - DNA, 2601 bp, Klebsiella pneumoniae
atgagcttcgcaggaaaaaacctcacccagggcgggcagatgaccgcctaccgctggcgcatgttcattcaggtgaacaactggataggattctggatcttcatcctgttcgccgtactgactaccgccatctttctctggcgaatccctcaggaagccctggataacggttccctgtggtggttcgccagtatcaacagcagctttattgaccttatgccggcatcgggaacgccaaaaatctacgacgttcactactggtatgcgccgaccgcgacggcaatggtgctgaaaatgaccctgccgcagatttataccgacccgtacatgcaggcgatgggcgaccagtgtctgcgcgagctgcaatgggcggctggcgccagcgggctgttcagtatggtggtgtttatcgccgtgacctggtttatcgcgaatatcggccgaaaggagagcgaggacgaatatctctccggcatgcagctgaccgacaagccagcggaagtgaataaattactgcgcaaaaacggtgagatctctgatctgcgcgtaggcgacctgcatatggtcaggatggcggaggtactcaatttcctgatgcatggcactatcggggtggggaagtcgacgctgatacgctggttactcgactacatccgcaaacgcggtgaccgggccatcatttacgactcaggttgtaccttcacagaaacccactataacccgtccaccgatatcatccttaacgcccacgacgagcgatgtgccaactggcagatgtggggtgagtgcgttgacgcggtcgattacgacaacctggccgccagcctcattccggtagaaggggaatccgatccgttctgggtatccagctcgcgaaccatttatgccgatcttgcaattcgtatgtcgacggacccggaacggagcattgagaagttcctcaaaaccctgctgtccctcagcatgaaaaatctgcgtgactatctggccaacacgccctcagccaacctggttgaggagaagatcgagaaaacggccatttccattcgctcggtggtaaccaactacgccaaagcccttcgctatctgcaggggctggatgacggaacgaagccgccgttcaccatccgcgagtggatgacgcaggagcgctatgacagcagctggctgtttatttcaacccaggcacgtcaccgcaagagtgtacgcccgctgatctcgctgtgggtatctctggccacgctgatgctgcagagcatgggggagaacagcgaccgccgcgtatggttcattatcgatgaagcccccagcctgcagcgcatccccgagctggccgagacgcttgccgaggcgcgtaagtttggcggatgtttcgtgctggggatgcagaacatggcccagctggttcacgtttacggccgcgagctggccaaaagtatcttcgacctgatgaacacccgtatgtacggccgctcaccgagtgcggagatggccaaagtggtggaagaggagctgggcaaccagcgtaagcgcaaaatccgcgagcagaacagctacggtctggaccaggtgcgtgacggtgtgtccctcggtaaggacgaggtcaataacccgattgtcgactacgagcagatcatgcgtctgccgaacctcaacttttatgtgcgcctcccgggggagtatccggtcgtccgtctgaagctgaaatatcgcgcgccgaagaagcggcaggcaggccttctcgagcgcaatatccgcgatgcactgagtccggagctggagagggttattcaggagaacgagcgcgcagctgcagctgcaggtctgacgttcccgaccggtgatgaagtgctggagaaggggagcgagacatcctctgcagacgacagtccagctcctgtttcttcttcaggatcatccggcgcgccggtaactccggccgccgaaaatgtggctcgtacccgaatggaagaaccgaaaccttcgcgcagcgctgcatctgaacggaagccagtaccagccagggagcccgtcacatcccgggcagaaccagtggttcagcaagaagtcactgagaacaacaatccggtgacagaccctgtcaccgaagacaaaaaagataacgtggtttctctgcgtattgtcgggccggctaaaagcacctctcaaacgccggacaaagcaccgatcttatccgatgtatccggtagcaaatctgtggctggctccgggcaaccgatgccggatgccctcaaagccttgcgaaaccgtcaccacatacctgaaccgcccgtcgcctcacctctaagcatgctgcagagggcacgccagcgcccggcctcttcggaaagcgatccgcagacagaggaaaacggcggtgagtccatgaacctcgacatgaaggtaacggcactgcctgacggcggcctgagtctgacgacggcagggaagtcagtgacaccgcagaccccggatgaagcccacagcacccaccggcagctggcgcaggaagaagagaacattttacttcaccgtcacgcggacgacccgggttacgacgaaaacgaccatcactattacgacagagagcctgaactatga

SEQ ID NO: 239507 - DNA, 312 bp, Klebsiella pneumoniae
atgatgcatcagagaaatgaacgtgcagattactcagctgaattctggtcgcttatccatctggaaagcgagctgatggcagcaagggcctggatgaatgtattcggttcacttcctgaggggcagggtatgaccattgttgctttctgggctggctatgaatttaccctttatgatctggagccccgggagtggcattcagcggtttatagggatgtggcctcgtcagtccgttctgtggctgcatacattaataaacaggactgggaggacggatgtcagcaggccaggtatgaactgagtcagatgtaa

SEQ ID NO: 239508 - DNA, 663 bp, Klebsiella pneumoniae
atgtccactgcggtgaagaagcgtaatctcgatgtcaaaactcagatgagtgaaaccatctggctggagccatcatcagagaaaacggtttatcttcagatccgtaatacctctgacaaggacatgtctggtctgcaggcacaaattacaaatgaactggccgccaaaggctaccgcgtcaccagttctcctgacgccgcctactactggattcaggcaaacgtgctgaaagccgaaaagatggatctgcgtgatgcgcagggcttcctcaagaccgggtacgaaggtgcggcaatgggagcggcactgggtgcgggtattacggcgtataactcgtcttcagcgggcgcaacgctgggtgtaggtcttgccagtggcctgattggtatggctgcagatgcaatggttgaagacgtgaactacacgatggtgaccgatctgcaaatttccgagcgcagcaaggcgaccgtcacgactgacaatattgctgcactgaagcagggaacctcaggcgtcaagctacagaccagctcagaacagggtaaccgcgccaaataccagacccgtgtggtatcaaatgccaacaaggtaaacctcaagttcgaagaggcgaaacctgtcctggaagctcagctggccaaatccatcgccggcatcatgtaa

SEQ ID NO: 239509 - DNA, 597 bp, Klebsiella pneumoniae
atggcattctcaaatggtgatgcaaaaaaagaaattgctgagattatctcagggattagtagtgatgaacgtccagtttcatcgccgaagaaggctttccagattgtagctatataccctgtaattatgatcctcacagccattctgatgtggtttgcttattatgtcagtctgattcaagcaggagataatagcgggctaggctggaagttctatcttgaagcagcacagctcgttttagggtatggaggatggatatctataggggcgacagctgttgtagcaatattcttcatactcataaattattctaccgtactggtatatctatctatacctgaagatatcaggaatcgttcgacattaatcacttccttaaggtccacagttaagaaaatagccttgtacctatggggtagcgccaccttgttatctttcgtagggatgataactgattggggagttttactggcagggagtattccagcagttttattcatatcaatatttgttactaatggatatcttggaatacagagcactcgttacggtctggggccattgatgtcaacggccagtaagatgatgagtagatag

SEQ ID NO: 239510 - DNA, 3321 bp, Klebsiella pneumoniae
atgcttgagatatataccatttatggcgggggaatgtggaaaacggcgctggacgccgttgtcacccttgtcggccagaatactttccacaccttactgcgtattgccggcaccttcggtgtcctggccgtactgcttaccttcatcaaacagcgtaacccgatggttttcgttcagtggctggcggtcttcatgatcctgacttccatcctgctggtaccgaaacgctcagtgcaggtcattgacctgtccgatcccggtgcggtctgggtaaccgataacgtaccggttggcctggcggctatcgcgtcgctgacgaccagtatcgggtataagatggcgtcagtttacgacatgctgatggccagacccgactcggtgacctacagcaaaaccgggatgctgtttggctcgcagattgtggcagaaaccagtgacttcgccacgcaaaacccggagctggcgcagatgctgccggattacgtggaaaactgtgtgatcggcgacattcttctgaatggtaaatacaccatcaatcagctgctcaattccactgacccgctgacgctgataaccagtaacccaagccctctgcggggcatctttaagatgacctccacctcacgtcagttcctgacctgccagcaggccgcaacggagattaaaacgctggcgaataccgacgtgaatccgggcagtgcgacgttcacctggctgacgcataaggtcttcggtaacaaactgaacggcgcggcgctcctgtccagtgcaatgggtgagagttacgggttcttctatgccgggggcatgacggccgcgcagatcatgaagaacaacatcacgaacagtgcagtacggcaggggatcaagggttttgccgctcgctcatccgatacggctaacctgcttaatctggccaccgagaacgctgcaacaaaacagcgactcagctgggctgcaggtaacgagctggcgacccgcacgctgccgtttgcacagtctctgctgatgcttatcctggtttgcctgttcccgctgatgattgcgctggccgcgtcaaaccacacgctttttggcctgaacaccctgaaaatatacgtttccgggtttatctatttccagatgtggccggtgatgttcgccattcttaactatgccgccaactactggctgcagagtcagtccgggggcacgcctctggtgctggccaacaaggatgttgtggcactgcagcattcggacgtggcgaatctggcaggttatctgtccctttccattccggtgctgtcgttctatctgaccaaaggtgctgcggcgatgggctcccaggtggcagggagcgtactcagctcgggcgccttcacgtcggcaggtgtggccgcgaccactgcagacggaaactggtcgtttaacaacatgtcgatggacaatgtcagccagaacaagatggatacgaacctgatgcagcgtcagggtcagcaaacctggcaggcggataacggctccacgcagacgcagacggccggtggtcatacggttatcgacggctcgggtgcaatgtcgaatctgccggtgaacatgaagctcagccagctggccagcagtggtttccaggagtcagcccgtcagtctcaggtacaggcacagactgctctcgatggctacaaccacagcgtcacaagtggctggtcacagctctcccagctttctcatcagaccggtaccagcgacagcctgataaaaggcagtgaaaacagccaggccactaacgcaacgcgcggtgccagtatgatgatgtctgctgcagagaattacgcgaaggcgaataatatctctacgcaggaggcttacaaccagctgatgtcaaaatctgttgaaggcagtgttaatgcgggagcaagcgttaaattcaacaccggcgatcaggcattcgggaaaattgggaaatgggcaactggagtcagtgcagaagcacatcttggtgcagaagttaaaggggcgagcggaagttcgcatggtacccaggaaactcactccagtaatcaggatatgcgacacgaccagaacagccaggcagttaatgacttccggcagggtatggatatggttaaaagtagccgaatcaccgagggtgcaaaccattccgagaatgcagcaagcaacaatgttcagcagtttgccgcaacactcaatgatgctgaaagccagtaccatcagtacaccaccagttcaacgcagagtaacgagttcagccgtatggccaccgttgctcagaaccagagtgcaagcctcgatacgaactatacgcaggagtttgtggactgggcggcgaataaatacggtgataaggctcagtccatgctgacaagtgcgccgtcggcgcgcgaagcggcaatggaattcgttaatgagcgtcttaaacctgaaattatgggcgactatcagcaggggagagcggatcttagaagcggtaatgagcatgcggcattcagcggtgagcatattgttcagccagcccatggcagtcagcaggtatcaggtacatccggtaatgtaggaggagtaagttacagttctctggatggcgatgctcatagccagggaggtgttggcaatgtccagacatcaggagctactcaggtcataggttatggaagccagcagggtgggcagattacacctgcaggtgaaaatatttctactagaacaaccgagtatgtttcgcgagggaatgagcaaccaacaaatcatgaaggacaatctgccggacagagaagcagctcgggtaatatcacctcgtcggtaagtatggttaacaccggaagacactcagctgcagatgaaaatgccggccatattgcagaatcacatccggagttccgtcattcaggagttgttagggagcaagggaccgtgcatggccaggaaagtgaagttactcataaccgttctggtattaatgtcggcggcgaaaaagtacgtggtgatgctatgcaggaggcatacaaagaaaatcaggctaagctgcatgaacattcctcgcagggttttggtccacagagtgagttacaacgacgagtggcggaacaaagatctgaaaatgagcataaaatcaacgaatctgctggagaaattggtaaaaaacaatccactgttcaggcatccagtgatatattgaaaggagagcttcataattcacaaagttcattctcgaatggtttaaataaagagaaaatcagtcagggggaatcatctcctgctgaacatgatgatgaaatgaaacgtagattagctgagctaagagaaaggaagacgggctga

SEQ ID NO: 239511 - DNA, 1365 bp, Klebsiella pneumoniae
atgattaaggcactgataacggcaggcgctgtctttctggctgggctggttgcactgccggcgaaggcggacgtcaacggcgacctgaacggtttcttcaataatctgggctacagcggcaacgtgactcaggcacaggcctggcagggacaggcggccgggtatttctcgggtggttctgtctatctgcgaaaccccgtcaaaaacgtgcagctcatctcaatgcagttgccctccctgaacgccggctgcggcggtatcgatgcctatctggggtcgttcagtatgatcagcggcgaagaaatccagcgattcgtgaagcaaatcatgagcaacgccgctggctatgccttcgacctggcgcttcagacgatggtaccggagctgaagcaggcgaaagactttctgcagaaactggccagtgacgtgaacagcatgaacatgagttcatgccaggccgctcagggcatcatcggcgggctatggccagtgacgcaggtctctcagcagaaaatctgtcaggacattgccggcgaaaccaacatgttttccgactgggcggcttcccgtcagggctgcaccgtcggaggacagggcgacaaagtcacggctaaggccggggatgctgagaaggatcaggtgctgaagaacaaaaaccttatctgggacaccctcagtaagaatggtcttctcggcaacgaccgcgcgctgaaggagctggtcatgagtaccgtcggctccatcattttcaacaaggatggcgatgtgacaattctgacgccgctggttgataaccgcgacctgattaaagtcctgatgcgcggggggacggcgaaggtctacggatgcgacgaatccactctgtgtctgggacctgttgtcaccagtctgacgatttctgagtccaacgctctggtcacgctggttaaaaacctgatgctctcaatgcagaacaagctggtcgacgatactgcgctgaccgatcaggaaaaaggctttgtgaacaccacctctgtaccggtgctgaagtatctgactaacgcccagagtatggggatgagcgccacgtaccttctgcaggtttccgacttcattgctcaggacctgatgattcagtacctccaggagctggtgaaacaggcaagcctgtctctggccggcaagaacttccctgaagaagcagccgcaaaactacgcgacaacatcattcatgcgcagggacttctcgctgacatgaagctgcagtcagcagccgatcagaacgcgctggacggtatcgaccgcaacatgcagtacctgcagcaacaggtatccaccattgtttcaggctcctatcaaagcaactatcactggggtgatcgctga

SEQ ID NO: 239512 - DNA, 405 bp, Klebsiella pneumoniae
atgaaattcaccagactgaaaacctgtgtccgcaatcgcttcattaaacagatgaaggactctgaggggagcaaagagtcccggcagtgggcgaatttattcacgctgaaactgctgtacagccttgttttctttatcttcgctgaaagaatttatgtgtggtgggctgacaacacgctggctgccatgccggagccgcttgttcgttctgaacagtttacactctcgctgctcatccattatccgcagtatctcctgtgggcgatcatgagtggtctgtttgcagtactggtactgcactgcattctgtgctgtgtgggcaaacttgaggaatccctgtactgccggataacccgaaaagacagcgggttggagcctgagagaacagaggtgcccaatgattaa

SEQ ID NO: 239513 - DNA, 264 bp, Klebsiella pneumoniae; identical to SEQ ID NO: 128764

SEQ ID NO: 239514 - DNA, 609 bp, Klebsiella pneumoniae
atgaacattaaaaccggactcacggctctgctgatggccataccgctgctggcgaacgccggggcgcgcgaggagttagtggcgcttgaagcgacaaaaacggcctctgctgacgctgcagccgtcaccgcctccaccattccggttcccgcgccggtaaacctgatgtcgctgccggacggtcgccaggcaaacatgaaggattatgcggtggtgctctttatgcaggcgcactgtcagtacagcgcgaagtttgacccgctgctgaagggctgggccgatgagcatgccatcagggtgtacccgtacacccttgacggcggcggggacgtatcttacccgaccccgatgatcccgcgtaagacggaccctaactctcccatcgcagatgagattgtcaccttcttcggaaacggtttgccaattgcgacaccgacggcctttatggtcaacgtcaacaccctgaaagcctatccactcacccagggcgtgatggaaatccccacgcttgaaagccgtatggccagcctgattcaggccgacctggataatgttgacccgaaatcgctgccgccgatgccggcaagtgcgcaggtcacccctcagtaa

SEQ ID NO: 239515 - DNA, 219 bp, Klebsiella pneumoniae
atgaatgcatcccttgttgcaggactgattttctggggcacgatggcgcgcgtactgagcgagctgatgacctggtcggttgagcatacgcagcaggggcttttatggctctgcaatggtatgtgggccggggcggctggcatggtggtgtatgccgtgtatcgctggttccgtgacgaaagagggcaaacgcataaggaaggcgaccatgaacattaa

SEQ ID NO: 239516 - DNA, 468 bp, Klebsiella pneumoniae
atgacaaaaatgcttttacccctcatccgtgatgcagggcgttttgccctgttcacccttgtcttcggcccggcgctgttgctgtacggtattgtgatagccatatcgctggagggctcgctggccgggcagtttgtgaaagaggcgcaaacgctaaccaaaggcgcgcccgatggtaaggtaatgcagtgcgttacgcattatgaaccggcaccacgaccccggctacctgaacccggcgaggaggccagtcctccttcttatcagctcccgccgatgtcgatttgccatcgtgaaccggttgacagcgaacgctggacaaagccgatggatgccacgcttttcaacttctggctgatagctgcgctcttcggcgcaactctgggttttctgacccatctgtatattcatcgtcgcgcctctgtgcatgaggggcgtgatatcttccaaaaggaaacacatgtatga

SEQ ID NO: 239517 - DNA, 783 bp, Klebsiella pneumoniae
atgaagcgtgtcctctgtggcctgctcatggcgctggcgagccatatggtgctggccgaggagattgtgacgccggcagagccgttcaccggctggtcctggtacaacgaaccgaaaaagccgccggagcagtccagaaagccacaacagcctgcaccgcaggccattccggatctcagcaaaatgtccccgatggagcaggcccgggtgctgaaaggatacacacaggaggcgcttaaccgcgccatcctgtttccctcacgggaaaacacggcgacgttcctgcgctggcagaagttctggaccgatcgggcatcgatgttcagccagtcctttgcggcggcgcagctgagccacccggatctcgactacaacctggagtatccgcactacaacagcatggcgccgtttatgcagacccgcgaccagcagacgcggcagagcgccgtggagcagctggcgcaacagtacggtctgttctacttctaccggggcagtgacccgattgacgtgcagatggcgggcgtggtggcggactttgcgaaaaccaacgggatttcgcttatcccggtatcggttgacggtcaggtggccgcctccctgccgcagagccgtccggatacggggcagtcccggtcaatgaatattacgcacttcccggcgctctaccttgttgacccccggagcaagaattaccgcgcgctgtcatacggcttcatgactcaggatgacctgtctaagcgattcctgaacgtggccaccggctttaaaccgaattcctga

SEQ ID NO: 239518 - DNA, 1860 bp, Klebsiella pneumoniae
atgaaaaaacgatttttaactgtactgatgcttttcccgcttctggctggcgcagccgatcctgcctttgaggcgggagcgagctttggcaagggtaatgcctccgccggtacgggggccctgaaaaatccgggaaccgttacaggtgcaataccaggctataccgctaacccaccggagaaagggtattacggcggcgtggatggcggcgatggcgggctggccagcaagggacaggctgccctgcaggggaatgatgcagcacagtcggtgatcagttccggtactaaaaacccagccccgacaattgatcctaacgcaccctttattaccataggaaaaaatgcggagggtacggcaggcgggatcatggatggcagcagccagcagtgtaaggagaccacggtgtccaaatcgacgtttgaaaactacacctgcagcgccgatgtcgcagtgtcaaaaacctgcacacgagacacgcaaatcgacggtcactatgaagaccgtacctccaccaaaacggtggtgatcccgccggaaacccttgagctgaataaacttaatgacaatacacttgaatttattctccccctgaatgaaccaggatcaacgatgctggagggaactatcacaacctcccagaaaaacagtgtctcaaacccctttttcagttccacgctaacgttctacggaacatcggtaaagcttaaaaacgtgaataatacgtttgctgttggtgtcggacagcaggttgtccctgcagatggcttacttcgggggacgctaaccaatagcatccctgactacattaagcagatgatgcagacgataatgcaggccaaatatggaaaaaatggcaatttcgcaaaaatctccgcaacgatcacgttggcaacaaccatcaaggtatggataccgtcaaccactaccccatctgtttgcccaaacagccccggggggaaactgaccggctcagtttgttctattcctggcggagacagacaggtcgtggttgagggaataacccagaccgttcacagcgattgctggcagtacacagacacttatctggtcagtgaaaataccaccggtacctgcgcttctttgatcggcaattccgcctgcactaaatccggcgaaacctgttcagagtatgtggacggcacctgttcccataaagactacacctatcaatgccagaccgtacattcatctaccggcctggtctgcggcggtgagtacatctgtaaatcaggtgattgcgacgagaccaacggcgcaggagataacggattcgatactgctgtggcaaagcttgctggtttggcttcagcagctgaggacgtgagggatgagagcagcaccatcgatgtaaaagcttttacgggcaagcccatgagctgccgtaaggcatttgcgggattctctaactgctgtaaagactccggatggggtcaggactcgggtctggccgcctgtaatgacgacgaactggctcttggaaaggcaaaggccaagaaaatcaccgtcagcgtgggtgagcgttgtgaccatcaggttctcggagcctgtatccagaaaagccaggtgtactgtgtttttgacggcaagcttgctcgcatcattcaggagcaggggcgtcgcgaccagctgggcgttaagttcggcagcggtgacagtccgaactgccgggggatcacggttccggagctgcagagtatcgacttcgacaaaatcaacttctcagacttctacgaggatttgatgaagaaccagaaaatccccgataccagcgcgcaggtcaagcagattaaggatcgcatcgccgcgcaggtgaaccagcagggaggtggtaaatga

SEQ ID NO: 239519 - DNA, 624 bp, Klebsiella pneumoniae
atgaaaaacgcttatctccgggcgctgacgatcagcgtcatgattgctttcgcgccgctggccctggcgagcgcccagaccgatatctccgtctccgaccatagctggatcaaaggtcagcaggatgcgctggcagcgatgaaggaagacctgcaggggcatccggcggccgcacccgtcttaccgcagcggcaactggacctgattaaccaccttcagggcgatatcgcagcccggaccaacacgatgggggaaaaagatacgttcccggctatttactttgtgagtctcggtattccacgtgaaggtctgctgcccatgctgaaggatgcccgccgttacaacattccgccaacgctgcgcggcctggttaataacgacatgcgacagaccgcggcggccatgtttgagctgagtaaggaggacaaagacgccggcgtgcaaatcgatccgacgttgttcacgcagtacaacatcacgacagtgccggctctggtggtgacctgccctggccactatgacgtcatcaggggaagcctgcccctgcagcaggcgctggagaaagtcgctgaaagcggtgattgtgcagtaacggcgcgccatcttctggaggctgcgaaatga

SEQ ID NO: 239520 - DNA, 999 bp, Klebsiella pneumoniae
atgaagcgtttttcatggcttgccggcgtgatgctggtcctgctgtcctggatgccagctcaggcaacggccgcagccagcaacgcgggtgatggccgctgggttaacccgataagcgatgtctgctggaagtgtctgtttccgatgacgctcgggaatattcagctggccgccggtccacaaaaggataccaacaacccggcttcgccgatccagatttgctcatatggtgtgttttatcgtatcggtctggccatcgggttctgggagccaatggcgatggtggacgtaacccgtgagcctggcgtcatggtcaacatgggcggctttaaaatcgatctcggacgaacgggaacgggaaccgccgggcagagtgaccggcccgctgccggcacgttctaccatgttcactggtacaaatatccgctgattttctggctgaacatcatcaccagcctggggtgtctgcaaaccggcgacatggatattgcctatctctccgaagttgatcctctctggaatgacagcacgctttcaatgctgattaaccccgaggctgcgctgttcggcaacctgatcgctcagggggcctgtgctgctgacgcagttgcatcatctgcgggtcttcctctgtcgccgctgttctggtgcgcgggaagtcaggggtctatctacccgctaacaggctttaccagcggtgagttttctccgctcgaggcctctctgctggtcggagagcgaatggccttcaagatgcatcgtgaggggctggtctggaactctgtgggcgcggacgtcgccgtatgtaaccagtatccatccccgatcatcccgaaagagcgatggcgataccagatggtgaacatgtaccccgaaccgggcaactgccatcccttcggggccagcacgcagctctggggcacgacgcataactcgccatcctccaaaaagaacttcggttacctcttctggcgcaaacgtaactgcgtattcctttaa

SEQ ID NO: 239521 - DNA, 324 bp, Klebsiella pneumoniae
atgactcaccctgaatctgtcaggccggtgacggttacccgtgaccgcaacggcttctggacgcaccctcattattttgcacctgccagtgaagaggccacacagactgagtttggcgactggatgcgccaggacaatctgatctgtgccacccgctggatggaaaacgacgcgcctccccaggtgatcgccgactgggaaaagggaaaacaaaacatcagtgactggcttccttccgcgccagagggggagggctggttcattggctccattcatgacactgaggacggcccggtctgtgtatggctgcgggaggtgaaatga

SEQ ID NO: 239522 - DNA, 1041 bp, Klebsiella pneumoniae
atggcgttaatcggctgcttcaccggccctcaggggcagcaggggctgcagggagtgctcacctgtttgcgcgataccgagggcatgaccggtattctggtcgtcgttgcgctgctcgctgcctggattgttgttcagtacgtggcatgtgcacggcgtgaacgccggatgtgggagagcagaccgggaaaacccctccctctcccacaatttggtaatgcctgtcatgcaactgctgtgcatgactttgcaaaccggaattattaccaggcgatgctggccgagatggaaaaagcgctgttttcggcaggctatgaattgacgcgggatgcatcgcgcagcacacggctggcaaatacagacagacgtgacatcagccggaaagtgactcgtgtgcgccacagctatatgaccccgctcatctcagaacagatgctgaatgacagcattgatgatgccatgaaaaatggttccgcagatgaatggctgaatctgcttatccagggcagtgagcgggaagggtggtatatcacccgaaccgcagaggcggcaggagcggtactaagcgacaggcaaaaatgtctctggccgctcaggcaggtgatgatcaccctgaagtcagacagcctcgtcattacccgtgatttcgttcaggggctgaacgcagcggccgacgctgtaagcaacatgccgttccccgacatggctgatgaaccagacctcagcgctgtgcctgtgaacatctgtggatttcaggtgacactgatgcgccagctctgcagcaccccgccgggatttttcccggatgaaagcggcagcagtgtaccggatgaattgttcagtcagatgcctgagctaaagtacggtgagaagcgtattgtcgtctttgcgcagataacgtcagcacctgcgaaagacgtcctggcccgattcatcagaaccgtcggcgaccgtattgcggcaggagaggaatatgcggctgattacgatgatgacaacgggtatgcctttatcgtcctgcggaccagaagaccccactga

SEQ ID NO: 239523 - DNA, 279 bp, Klebsiella pneumoniae
atgtcactgatacacaataacactgtgccccctgcgtctcagcacatgacaggccacaatgctgataccaaaggcggcgacgaaaccgtgaatcaactctgtcagctgtaccctgagatcgcttcatggcaaccggcgctgatcgccggtgcctggcatcagtggtgcgcgaataaccagcgtcagcctatagcgccggaggaacgggatgaggcgtttcccctgtacctcgtcaggcttatccgcaacagaatggaggagatgaacgcatggcgttaa

SEQ ID NO: 239524 - DNA, 393 bp, Klebsiella pneumoniae
atgactgcaacaacgttaggtgacctgtttcccgaaatgcgtcaggcggttacatcccctcgacgttacgccagaaaaccgcgcaaacccgctgagataacgccgcgcatgggaacagcagaacgactgaagacgctgtaccccgaaattgactcctggcatccggtactggtgaccaaagcctggctccactggtgtgagcagaaccagcaggacagccgggagccgtccaggcgtgatgaacgtttcccggactacatcattcacctcttactggagaacatgcgggccgaggacagcgcgaaacgtaaaaagggcacgacgctgtcactttccgagcgtctcgacaggttgtttgcaggcgaagggcaggagaacgctgaatgtcactga

SEQ ID NO: 239525 - DNA, 351 bp, Klebsiella pneumoniae
atgatatttctgcttgttctgtccgttataacgggtatcgcaggttgtgcgattacaacagcatggttaccggcgaacctgcgctggcagggagtccagtgcgcggtatttaccctgattattcagggctgcattcttaaggtcataccactcgacacggacggtagcggacttttgattgctgccggactgatgctttcccagtggttcgccccccttatcgctaaagagacaaggaaattgagagtgcatttcaggataccttcagtgcccggttatctgctgatgtacatcctgtgcctggtgctgatcggtgccagctggtttcccatctggatggttttgagatga

SEQ ID NO: 239526 - DNA, 636 bp, Klebsiella pneumoniae
gtgaaaaaacgactgcagctgacggccatgatgctgctgatgctctccgccggcagcggggcgaaagatctcggtacctggggcaacgtcttcgagcctgcagagcaggacatgctggcgtttatccagaatcgcctgaagggaatggagcagacgggcgaactggaccgccttcgcaaagaggcaacggaaagagtgaaggagcatgcggtacgtccgacgccggtggaagggctcacaaaagcgaaggaataccgcagctttgcctgggacccgacatttaccgtgaaggaaacgatcacagacatgcagggcaacgtgatcgcccgcaagggtgacacggtcaatcctctggataaggtgcccttcagccaggtgctcttttttatcgacggcgatgacaaggagcaggtgaactgggcacgacagcagctcgccggccagaccagcgtgaaggtcatcctggtgaacggcaacatcaaagaaaccagtgatgcgctgaatgaacgtatctacttcgaccagtctggcgtactgacccgtaaattcggttttgaacacatccccgcgcggatatcgcgcgacggccgcgtgatgaaagtggaagaaatacctgttaagggagacggtaaatga

SEQ ID NO: 239527 - DNA, 414 bp, Klebsiella pneumoniae
atgagtgaacaacaggacaagccgtatgacggcgacaccgtccgcgacggtgtaacgatcgccagcaaaacatcccgctgggttaaagccggcatgcaggggctggcgggacttctggttatgacaggcgtggcatatgtgacggcgaaagccgtcaccccggaggtggtggtcttcgacatgaagggaacggtggacctctttaagcagcagtccgcgcagctgccgctcgatgaaggtcgggcaaaagcgatgacagtgcagttcaacgcagcgctgacggagagtctcacggagtggcaggcctcacacaacgccatcatcctggtgaaaccggcggtgataagcccgcagcgcgatatcacgaatgaaatccgtgttgatatcgcacgacgcacccaggggggccagtga

SEQ ID NO: 239528 - DNA, 2610 bp, Klebsiella pneumoniae
atgagttttgtcgacagcctgatggatatgctgaaaaacgggaaagaggaagacggggcagcaacggcccgcaacaacctttcccagacctgggactatccgtccctggtcgctgcgctgccgtaccggtattacgacgacaggaatgaaattttcgtcaacgccggctctgcgggcttcattatggaggccgccccgcttcctggcgcgaacgagcaggtgatggccgcgctcgatgacatgctgcgtaagaagcttccccgccagactcctgtgaccgtcattatgcttgccagcaagtgtgtcggggaacgtatcgatcgcggcgtgagtaacgacatgtggaaaggggagatggccgaacacctcaataaaattacccgcgcgttctggcagcgttccgcgctgcacggcctggccaacgaacgggaatacccgctctacctgcgtaactaccgtatctttattgtctacggtcagcccattaagcgcgcttcccaggttcagcgggtgatggatgacctgattcagatacgtaacactatccgcgtctcactgggagccgcgcgcatcgacagcatgaacaccgatgtgcacgctttcctgtctgcggtacgcgagcagatgaactaccgtcaggaacaggtgctgacgtcctccggggactacaacgaggatgagaagctcaaccgccaggtggttgatcccgggattgacctgaaggtgcatccatcgcatatccggatggagctgccggaaaccattgacgcgcgcgggacacgcctgccggcatcagcatgtcggatcattaacatgcagcttgctaaaaacccgcgtcgattcgcgctctggcagggggctgacaatctgcagaacctgcgttttcccgacctcgggataccctgcccctttatgctgacctggacgacggcgctggaagaacagaccaaaagtcagagcgaggctttccgtaaagaccaggacctgtctaaaaaggccaactcagcctacgctgcactgttccccaacaccaaaaaggctgcagaggaatggcggcgtacccgggagcagcttcacagcaatgaaatcgcgctctgcaatacctacttcaacctgaccctgttcgccccggataacaataccgaggcacagaagtgtgaactggccgccgtcaacgtgttccgtaagaacgagctggaaatggtgacgatacagtaccagcagatgcgcaactggctggccagcttcccgttcgtcatgcaggaagggatgtgggaagacctgaagatgacgggggcaacgctacgctccaagtcatggaacgcggtgagcctgatgccggtcgtcgccgaacgccagctgtccaacgtgggtatgccactgccgacctaccgcaaccaggtggcattctacgacatgtttggtgaagagaacggcagtaccaactttaacatcgccgtcaccggcacgtccggggccggtaaatccttcctgacgcagggcattcttcgtgacgtactgaatgccgggggattcgcctgggttatcgacatgggggacagctacaagaactactgtcaccaggccggcggggtttatctcgatggctctaaactgcgctttaacccgttcgccaacgttaaggacattaatcattctgcggaagggattgtgcgcctgctgacggtactcgccagtccgacgcagccgctggatggcgtctgtgaagcaatcctgcagaaagcggtaatggatgcgtgggagaagaaggcaaacaaagcccgtatcgacgacattcataattacctgaccaatgaggacgtgaatcaggcgtcagcagataagccgaccatcatcgcgcgccttgctgagctggccatgctgctcgagacctactgcacctggggacccgacggagaatacttcaacgccgacaccccgacgctcgatggtgaaacccgcttcgcggtgctggagctgctgagcctggaagacaagccgaagctgctctcgtccatcctgttctcgctcattctggcgattcaggaaaagatgtaccacagcccgcgcgacctcaaaaaagtctgcatcatcgacgaggcctggcgcctgctgggtggctccaacccgcacgcggcacggtttatcgaaaccggctaccgcaccgtgcgtcgtcaccgtggcgcgtttataaccatcacccagggcattaaggacttcagcgccagtaaggaagcggaagccgcctggaacaacagctccaccaaaatcaccctcctgcaggatgcgaaggcgtttaaacagtaccttgccgataacccggatcagttctcggacatggaaaaagaagttatccgtggcttccagccagccctgcagaccggctacagctccctgctgataaatgccggtgaatacagctccttccatcgcctgttcgtcgatcccgtgacgcgtgccatgttcagctcgcgcggcgaggactttgctttcatgcagaaagcgcagaaagaagcgggggcaactgcggaagaagcggcgtatatgctggcggagaaaaaatacggcagtgaacttcgcgaacttgaagagtgggtgaaagcagcatga

SEQ ID NO: 239529 - DNA, 255 bp, Klebsiella pneumoniae
atgagcagccattacgttaccggcaagaacggcatcgatcacctggcgaaatctttagtccattcacggaaaggaacgacgcaaatcaccgccacacagtcagtcgataccgacgatgaaacgctggccgttctgagcgtgagctgtaactggcagattaagaccaccggtgatgcaccgcacaccggccagatgaacgaagaaaagctgcgtcgcctggagttaatccgggccgctgcggagggccgaaaatga

SEQ ID NO: 239530 - DNA, 555 bp, Klebsiella pneumoniae
atgaaaaatctactgggtgctgcactgctgtgcagcgcactgaccggctgcgccggtctcaattctgatttcgactgcaacaagaccgcgaccgaccagtgcctgactaccggtgaggccaacaagctggccgctcagggtaaaagtctggatgacctgacggcagagaaaaccgcaaaaaagcctgtgggtgaaaccctgccggcactgcgcaattcagcaccggtcgtgaatcccttccgtcctgtctccgccgcagcaaccggaatcaccgccgctaagcctggcgcacagcgccctctgaccactgcgccggcgaaatcgtctggttcgctggtcacgccgctgaccacgtccagtcatgccacccctgtgccggttaacacggcgggccgcgttccggttcagcgtattcctgacgccacgcagcgcctgtggattgccccctgggtggacacagacgacaactttcatcagccagctgtggtcgagttcgtgaaaaacaaatcccactgggatgagagctaccgcgttatcggggagggcggggaatga

SEQ ID NO: 239531 - DNA, 396 bp, Klebsiella pneumoniae
atgtctgccaacatggcacgctacccattactcaaaatcctgcaaaattaccgctatatcctcattcctgcactggtattcactatcgaactcacagtgtgggcagtgctcaatatcaaaggcgtgggtgatatgggctgggtctcctggcgagtgtccctgctcttaagcgtgttcctcgtatactttagcggcaccgcctttaacaaacgcgatgactggtactttatgtatggttcagtcgttccgtggggcggaatgctgatagtggcgagtatttatggctttatccagatggacctgaacttcctgacgctggatatgttttatgccggcgtgtttggcagccttgttgtgcagctggttttcactgtgcttcagtgcaactgcaaataa

SEQ ID NO: 239532 - DNA, 465 bp, Klebsiella pneumoniae
atgcgtgatgaagagcgtaataactcactgctcaggaaaatgcggatgcatattgctgaatgggaggctggccggcccactccgcaaggaaataagtacattttcctttggcttgcaaccttcatcgttgtactggtagctacggtttcagtgttccgcccgtcattgtttgcactgtgtttcctgattgcctggttttttctgagtcaggagatatttaagcgaattatcccgcgttacaacgaaagctgggaggaggtattcgacaggttactttctgattatgaacccctgaacctttctgcctgggaacacctgaagcaccaggctgaaacagaagggctgacggtcagcattgtcagcaactggtatcaggaagaagtgaggaccgtctggccagaaaagaaacttcacctgaagttccttcataaagccactgacggtaacgaggaaatcggagagtaa

SEQ ID NO: 239533 - DNA, 1410 bp, Klebsiella pneumoniae
atgaccatcagcctgaatgaaaacctgaaaacccgccacaagcaactggccatcctggccgccgtcatcattggcggcgcagctgcagcaggcggcgtaatgtggtacgggcaataccagcaaaaacaaaagcaacccgcaccggttgcaacaccaaacctgaccggcgttgtgaccgcgacgtttaacgaacaggtcaacgatgccgcgctgacacagcagcaggcaaagacctccgctcttgagcaaaaccttgccacgcttgctcagcagttcgcgcagaacaagctcacaaccgagcagaagctggccgagaaggacgctgaaatacagcgcttgaatgaccagctaacgaaagcccccggcagcaaccagaccactggccagcagacaccacctgttggccagaacggaacaccactccccggtcccgttgctggcggtcaggcccggccacccgaatacaccgtaaccccttcaggcacaccggccgccactggtgtgaatatggggcagggcgcagcgttctacccgggcggctctggccagagaatgacaggtggcctgtcgacaacaaagttcagctacgacagcctgaagaaaaagccaactaaattaccctggattccttccggctcattctctgatgctgttctgattgagggggctgacgcgaacgccagcgtcaccggtcagcagaataccagtcctgtaaccatccgcctgcagggcaacattcagatgcccaacaacaaggagttcaacgctgacggctgctttattgtgggtgagatgtggggcgatatctccagcgaacgcggaaacgtccgcacccagtccatcagctgcatcctgaaaaacggcaagcacgtggacatggagtttcaggggcatgtcagcttccagggtaaaggcggcattcgcggcaagccagtcatgcgaaacggcatgattgtcggctacgccggtgcagcaggcctcctgtcaggttttggtgaaggtatcaaatctgccgctacaccatccgtcggcctcggcgccacagcggatgtcggtgccggcgacgtgtttaagcagggcataggcggcggggccagcaaggcggccgacacgctgagccagtactggattaaacgcgctgagcagtaccacccggtaattgatatcggtgccggcaatcaggtgaccgttgtattccagaagggcttccgccttgaaaccatcgaggacgccgaggacgcgaaagcgaaagaggaactgcagaaagccggcaacgccgcgcagaacgccgtgactcctcaaccggcgagccagaccaccgcatcaagcaccacctcagtcggcaacatcaacccggatgacgttctccgccaggccagccagctgcgcctcggtgacaccatcaactga

SEQ ID NO: 239534 - DNA, 741 bp, Klebsiella pneumoniae
atgaaatttcgcatttcaccggcagctgctgctgtgtttctggcagcgggattatttaccagcggcctccgggccgcctcctcacccgcagccattccgtttgagaacgacgccgcctttaacgtcactctcagcaacaccaacccgagtaaggttgttgtagacggagaactcattaccagcatcagcggaccaaccggtgcgtatgaccagagccagaccgaggacggagcgcttattttgtctccgcttgttggccagaacttcaccctgtttatccagactgaccacggttcatcgctgagcctgaacgtcaggccgcagccgggtaacggcaaaacactgcgcttcaccccgatgtcaccaccacttcgcaagaacgacgatgcgaaggcatgggaagaagggcagacctatgaaaaaacgctggttgcgctatcccgcgccgcagtcaatggccaggtgccggacgactaccgggaatacccggtcagccgcatgccggcttacacacccgccagtgatgtacgcctgacgcctgaacgccagtttgtgggcaaccacctgcgggttgttcgcttccggatgagcaacccgggcagcatcacccgcagcctccgcgagcgcgatttctggcgcaagggcgtccgggccgtaatgctgtcgcagaatcagctctacgctggcggtgagggctatgcctggattgtgttttcagatgacggagacgcccgctcatga

SEQ ID NO: 239535 - DNA, 582 bp, Klebsiella pneumoniae
atgaaactgaatattaaaggagagcgcgataaacaactccgctatgcgtttattggtctttcagctttaactttactcatgagtgcagggaatgtactgacagggtcactggcatggtatttcgccacaacccagaaaaccatcaccacgccgttaacgtttaaccgcccatttgcatcagattctaaaagtgtcgatgcgaccggtctgacacagttcgccgcttcctttatttactggcgactcaacgttaccccggaaaacatcgaacataaccagaaaatgattcttggatttgtcccctccgccgaacgggacgtactcaagaaagccctggacatagaaactgagcgcatccagaaagcgggcatcaccacccagttcgacacgaaagaaattcgcgtcatggatgatggctccgtgcagtacagcggggtactgaaatcctccaccacaaacggcgcaatcatcacgccactgaaagaccaggaaaaaacctaccgactgaaactgagttatgacaacggtgtgattaacctccacagctttgaagaactcaagccggtatcttccactaactga

SEQ ID NO: 239536 - DNA, 303 bp, Klebsiella pneumoniae
atgaacggggaaggagataaatataacttcccggaaacaatgaaccagcagaaccgctatttaggcttaccgattgacgaattgattgttaccgcaccccttttagttttgggggtgcttaacaacctgtcactcgaacttggtgtaatcgcgggaatcctctggttcatcgtcagatatctgaaaaaagggcaggggtcgtactggttgcttaatttctgctactggcacctgccatcacttttattcaaagtaacctttcgccagatacctgactcaagtttccggcactggagggcatag

SEQ ID NO: 239537 - DNA, 354 bp, Klebsiella pneumoniae
atgttaaccaaaggcagtgcccttaacgtcggtaagggatgggcggtagcgtctttattccgcaaagcacgcgaaaatcgccaggctaaattttacttaaagtcagcaggcgcttttttaattgcacttatggccactcacccggcattcgcatctggtaccgaccttctttcctcgcagaacgccacggttaattccaccttcggctccggctcatcactggttaaatggttctacatcgccgaaatcatcatgggcctgtttatttacattaaggcccgctcaccactggtattcgtcggtatcgttatggcaatcatctttacccgtgtcgccttcggtatcgcgagctaa

SEQ ID NO: 239538 - DNA, 642 bp, Klebsiella pneumoniae
atgaaagttaaagaaaaaatgtgggatggtcgcggccgtccacgcaagttccagccaggtgaggcggtggagtggcgattgcgtgcaccggataatctgcttatggagctgagaatatgtgccagagctggcaacagaagtgtgaatgaggaaattattgccaggcttttgttgtcgctgaattatcagcccggcaagcctgtcattaaaactgcggagggtgaacggctcattgctctggcggtgagatttgaagagtggctagggcaattacttgatggtgaatctcttgatgatgctggagaaattaaatcctcgcccaagcaggagcaattgtggatgtggcgtgagggtgaaagagttttgcttccggggaaaacaaccggatatagcatgcgaattcctgaaaaccttgcagatgaaatcagggcaatggcaaaggtgcataaccgtagtctgaatgacgaaatgctcaccaggttaatgaatacgcttggatattttactgagagattgcttgaccagaatgaggatgcgcaggcgctgaaagtgttgtgtatggaatttgaaatttttttaaaagaaaaaatcacggaggtggaaaaggaagaccttccgtgggatgagggtgagcctcagtga

SEQ ID NO: 239539 - DNA, 387 bp, Klebsiella pneumoniae
atgccaagaaagaacatctactttaaagataaaattgacagagaaataaatgatattcttgagattgagttacaaaagggcgcaacaacgtctgacatgaactattcttcaatagtcaacgaattagttcgactcggactgatggtatacaaatcaaaggaagagggctcaactttcgatctcgatggtttccgacgcgacctcattaagaaagtctctggctcacgtgaaggtattatgattctcaccgcacttgtctctgatatctttgtcacgatgaaggggccagactctggagtgaagcttgaagaactgataaatgccaacatcagctcgattaacgatgcagaagataaggctgaaaaagaccacttcctgacggattaa

SEQ ID NO: 239540 - DNA, 540 bp, Klebsiella pneumoniae
atgaaaatatcgttactgcctgctgctttactgactctttcactatctgctggcgcagctccgcagatgtgctttgatcaggccgggaaagattaccaaattgatccgctgctgcttatgtcaatttcgattaaagagagccatcttgtaccggatgcgataaatggatcaaacaggaatggaacggaagatgtctgcggtatgcaggtgaacagttcccattacggtaaacttaaaaacttcaatattacccgtgagcgcctgttaaatgatccatgtatctgcgtttatacgggagcatgggtactggcgcacaactttcggtcatacgggaaaaactgggacagcgtggggatgtataatactggaccgagcaaaaagctcattttacagcgcaaggcctatgcacaggatatcaaaaatatatatcgtgtattactggccagaaaaaagttactttcagaacgtctcgcaccagctgcgggaaaggagcatgcaattaaaattgcagaaacagcatcgtcacatagcgtgcagtaa

SEQ ID NO: 239541 - DNA, 822 bp, Klebsiella pneumoniae
atggtcagtttcgaaagccgctatcggatgcctacctcgatccgcaaagaccgtccgctgacgaatgatgaattacagcgcatcgttccgagcgcgttttcatcggataaacacgattcacgctctgaacgttatacgtatatcccgaccattaacattcttgatcgcttacgtgatgaaggttttcagccatattatgcaactcagtcacgtacacgtgaccaggataaacgcgactttacaaagcatatgcttcgcctgcgccgtcatgaccagattaacggaaaagaagtgccggaaattattctgctgaatagccatgatggttcaagcagctataaaatgatccccggcatgttccgtcaggtttgcagtaatggtctggttgcatggaaggattttggtgaaatccgcgtaccccacaaaggggatattgtcgggcaggttattgaaggcgcttacacggtgctgaaaacattcgacgcggttgatgaaaatatagacctcatgaaaagcattcagctcactttgcctgagcagcgcctttttggtgcgaccgccctggaacttaaatacgatggaaaaccagcgccgattacaccggagcaaattattaaccctcgccgtgtgctcgacagaggccaggatttatggaccacgtttaacgtggtgcaggaaaatgtgatccgtgggggaattcgtggcagaacggaaaaagggaagatgaccagaacgcgggaagtcaccggaatagatggtgacatcaaattaaatcaggtgctctggaaaatggcggaggagtttgcaaaactgaaggcctga

SEQ ID NO: 239542 - DNA, 294 bp, Klebsiella pneumoniae
atgcacacacgaaacgtcaacgtcaaaaccgccgctcaagaatctaccggaagatgtgattcaaacctcaccatgtcccagttcacggatctgttttgctgggtcctggccgcatcggaaggggagccacaaccggcaatttttacgccgccagagaatgccactgagctgacgttaataaatgacgaatgcccggattatatctctgtctggtttgtagatggtcgcccggtggcagctgcaatgccgctggataattttcatcgcgttatttcttcatctcttactaaataa

SEQ ID NO: 239543 - DNA, 771 bp, Klebsiella pneumoniae
atgtatcttgtcaaaagctgcttcaaaaaggatcacgttaaaacacggcgcacactcaggatcggcagcctaattgagtacagagatacagagattcaacaaattgccgacagggaagaaggcacaataagtatttcttatgatttacataactttcatattgaccctcaactatttaacttcattaattacaatcatcacagtgaaaatagtgcgtttattaaagatttaataatcggtggtaatagcgcaataatccctggagctatagtattacataagtttactagcacatatacgttgaaaaacttcaaccgatttattttttgcatatcgttactagaaaaccatgaagatgcgcgaggtattttttctgattacgatgacttatggtatgtacatataaaaaacattaacaaatttgccgaaagcattgcctacgaactacttctaactattaaaagaaaaataaccagtcatataaagctatttgaagaaactcctgaccccaataaattatcggttaaatggaatgttaaaaacatcagttatgaggacagggtaatcaatatagataactctcacttgtacgtcaatgctcagcatgttattgatgcacttcggcatacgtatatgattaaacctaagacattcgcaaaagagaaagaagttaggtttgcgtttgatatttatgaagaaaacaaactgctacacccgttagaaaaatccataataatcgatgcaagcgcgatattatccatgatccaataa

SEQ ID NO: 239544 - DNA, 903 bp, Klebsiella pneumoniae
atggctgcacacactaacgtctgcgtgattggactgggttcaatgggcatgggcgccgcccgcgcctgcctgcaggcgggcctgaacacctggggcgttgacatcaatcccgacaactgtcgcgcactgctggcggcgggcgccaaaggcgcgggccccagcgcggtgccgttcgccgcggaactggatgcagttgtgctgctggtggtcaatgccgcccaggtgcgggggatcctgttcggcgagagcggcctcgccgcccatctgaagccgggcaccgtcgtgatggtgtcgtccaccatcgcctccgccgatgctcaggccattgccgaggcgctggcggagtaccagttattgatgctcgacgcgccggtatcgggcggcgccgtgaaagcggccgccggcgacatgacggtgatggcctccgggagcgatgccgcctttgcccgcctcgcgccggtgctggacgccgtggccggcaaagtctaccgcatcgggagcgacattggtcttggctcgacggtaaaaattatccatcagctgctggccggggtgcacatcgccgttgccgccgaagcgatggcgcttgccgcccgcgccgggatcccactggagacgatgtatgacgtggtcacccacgcggcgggtaattcctggatgtttgagaatcgcatgcagcacgtcctggatggcgattactcgccaaaatccgctgtcgatatttttgtcaaagatctcgggctggtgaatgacactgcccgggcgctgaccttcccgctgccgctcgctaccaccgcgctgaatatgttcacctccgccagtaatgccggattcggtcgggaagatgacagcgcggtgatcaagattttcaacggcatcaccctgccgggccataaacagtga

SEQ ID NO: 239545 - DNA, 336 bp, Klebsiella pneumoniae
atgacaagcaacacactgaacgctgttccggccaccgtgctggagacgatggcagaacgcctgcaaggccaggctgaaccgataaaaatccgcagcaacgacgatcacgccgcgctggctgcagatgtgctctggaaatttgcccgtaaaaccgggctgaacagggaaagcgaaagcgtgcaaactgtcatcacggattttctggccaatctgctgcacctgtgcgaacagtgcgagccggacggggctggcatcgagggatttaatgccctgctgaacatggccatgatgcactatgagcaggaaaacggaggggacagcgaagaacctgtttga

SEQ ID NO: 239546 - DNA, 792 bp, Klebsiella pneumoniae
atgtcacaactgagttttgaatccctgttcctggccgaccaggctgatccgcagccgcgggcttccgcaccggcccggatgctgtcgccagctgaggcgcgtaaagaattcgccagtgtcttccgtcagatggcgaaaaatatgcgccgttccgaagtgttccgcgacttcatcaccctcgcagccagcgagctggatatggcccgtattcgctcgccggagaacatcgaaaacagccgtcgcatctgcgaacggtataagccggacgatctggacgccatgaagcagctgttctgcctgttggtggaggggctggcgggtgaaattcatgatttcctcggcgctctgtatatggagcaggagctgggcgcggacgaaatggggcagtatttctccccgtcctgcatctcccgcatgatggccggactactcatgcccggcgctcaggagacgataaagcgtgaggggtggatgacgctcgatgagcctgcctgtggtagcgccggaatggtcattgcctttgcatactggatggctgaagcgggatataacccttcacaacagctgtatgccacctgcactgacatcgatccaatggtggcagatatggcctttatccagctggcactgctgggtatacccgcgaaagtcgtgaccggtaatacgctgaccctgaaagcgaaccgagtgcgttacacccctgtttattacttcaatgactggcagggccgtctggcatttcgcagtcgtctggatgcaatgaaaaaatttctggccaccgtggccgcctga

SEQ ID NO: 239547 - DNA, 201 bp, Klebsiella pneumoniae
gtgaaatttgacccgcaaactgtcgcacaggcgaaggcatttgtaaatgccctccgcgccggaaaacgcgctcgcgtacccgcgctgcgcttctcacagtggcagccgttcctgtccgtggtaaatgccgaaacgggctacgccaccgatgctgactgtggtctggctgtcagcgtctacccggcgcttggactggcttaa

SEQ ID NO: 239548 - DNA, 462 bp, Klebsiella pneumoniae
atgaacgttaatcctccgaccgctgcaccaatggcctttttcgttccgtctcataacgccgtttatgaccgcgcaacacagctggacgggcagtgggtgactcagcgtgaagcgaaaacgctggaatcccttcgccgtctctatccggatgctgagctgatctccgcgactctggtacaggaaaagctgaatgacggctatcgccgtccctgggtggaaatcaccgaggcccggtatatcgaccagctggaaacgttgccgccagtggactggtgcagggggtatggcggggagtcgttcaaatcgatggagtttacgggcggggatgtgacagcgatttttgtccggtatggcgcgcgtttctttgagtgccatgacctgcacacccgccatcaccgtgagctgattggcgacgtgatcgcacgtttctgtctcgatgcgtcgctgaattccgcgcattaa

SEQ ID NO: 239549 - DNA, 207 bp, Klebsiella pneumoniae
atgagcgttaacaccccgaccgcaaaggcctgttccggaaatgggcatatgtcaggcccggagcctaaaacagccactctcattgcgatttatggcaatgaggcgagctattcatggaacgttctggaggatctgaaagctgcaggtgcttcttatacccgcagaaacattatcgccgatatgttccgccgtctgggcgttcagtaa

SEQ ID NO: 239550 - DNA, 315 bp, Klebsiella pneumoniae
atgtacacacaaaacgtcaacgtcaaaaccgccgctcaggaatcttccaggaagatagggggaaaaaccgtgtcgtacacgttcctcgtcgctgagcagaaaaaaaactcagcggaggaaccggacgttctggagttcagcagcctggctgagctgaagaaactgcgcagaaactgccccgaaacgatgcgctgcacctatttctacgccctcagcagcggcgtcgataaacagttccgccatatccatgtggctgaagcagaccacttcaaacagtttgtgcgcctgatcgagcgcgcaggtatcgacatttaa

SEQ ID NO: 239551 - DNA, 198 bp, Klebsiella pneumoniae
atgcaactgtcaccggaaacccgtaacatcctgcgccagtataaaacgctcatcaacgaacgacgtcgcgaatccggactcagccccgtaaccacagcgaaagtgctggatgagatctgcgaatcggctacccgccagtgcgccgtctatctttgcggccacttcattctccagggcggacagggggatggaaagtaa

SEQ ID NO: 239552 - DNA, 411 bp, Klebsiella pneumoniae
atgattggtacagcaaaagagatcgccatcgaaatgctgcgtgatgacgataatgacggcgagaaatttgtattcgccagctggagccggaacgatattcgcggtctctgcattgactgggatctcagtgatgaagagatcgacgtggtgatggaaagactggaggcagagctgtatccctccggatgtgtccctctcatctacaacattgttgagatgatggtggaagaaaaacggaaacaccgtaatgtcaccattccggctgcggcgcttgcggtggtgatgcagcttgcagggaaggaaatggagcgtatcgctgtatgcgcggaggatggaggcggatcagcggcagaaaccctgaaagaagaaaatgacgtcatgttgagcctgcgcgcggcgctcgatgcctga

SEQ ID NO: 239553 - DNA, 429 bp, Klebsiella pneumoniae
atgaaccagaccgtgacctgtgatgctgttcgtcttgagggtgcgcagcgcctgactttcctgcctgatttgtttggcggcgattttatgacgtccgaggcatccgtgtacgcctatgcccagcgttactgccctgagtatcaggggggattctggcagttttaccggctgccggaaggtggcggatatatggcgcctgacgtggagagcctgaccctgtgcaatccggacaactggtttgagcagactgtcagcggggaagtggcggggatcattctcacggcgctggtactgaatcaccggagctggcaccacagcaaccatgaccatgaagagctgtgccgccacttctgccgccgttatgagcagcttatggcatttgctgatacccatccggaaagcgccacgatctggcgtgcccttgactga

SEQ ID NO: 239554 - DNA, 423 bp, Klebsiella pneumoniae
atgtacggaacccgcgaagaactttgtgtacagcttgaaaacatgttcacgtctgacgaacccctggtcctgctggtctggacggaagaggggattagcgtggcctgccgtgaagcccagccagaaccggacgggactgaaatccggaatctgatgaaggcgatcggcgaaatgaaaatgacgcaataccgccaggagggggtaaataatctgactgtcagcgatctcctggcccgtcagcgggaagtggcaaaccgtcaggtgagtgttccggcggtactcctgtcccgcgtcctgcgtaactatgaatgcgagctggaaaaccggatcggtatggcctgggaagccgggcggcaggagcctgaatccgtcaggaatgagctgaaggacgttcacgcattacaggagacgctggccgcgtaa

SEQ ID NO: 239555 - DNA, 222 bp, Klebsiella pneumoniae; identical to SEQ ID NO: 119533

SEQ ID NO: 239556 - DNA, 693 bp, Klebsiella pneumoniae
atgtcccgttttattctgggtgactgcgtgcaggtgatgtcccgttttccggcgcgtgccgtcgattttattcttaccgacccaccgtacctggttggctataaggaccgtaccggccgcaccctggccggggacaactcttccgaatggctccagcccgcctgtcatgaaatgtaccgcgtgctgaaaaatgacagcctcatggtgagtttctatgcctggaaccgcgcggatctgtttctgaatgcgtggaaaacggccggtttcagggtggttggccatatcgtctttgccaagagctacgcctcaaaatcgacgttcgtgggttacacccatgagagtgcctacctgctggcaaagggaaggccgcaaaccccggaccgtcccatcccggacgtgatcccctggaaatacacgggcaaccgacaccatccgacggagaagccggtgcagagcctgcggccgctgattgaatcgctcacgcgtccgggggctattgtccttgacccgttcgccggaagcggctccacctgcgtggccgccgccgaagccagccgccgctatatcgggatcgagatgcttgagcagtaccacgccgccggcgttcgacgtctggcacaggttgaacgggcaagaaggatgccggcggccaatgacggcgcgttttaccccgactatccggaggcggcatga

SEQ ID NO: 239557 - DNA, 468 bp, Klebsiella pneumoniae
atgttcagactgacctgtattgaactcgataacggcgagtttgccgtctatatcaatcaccattacctggggagtgaagatgccagcggagagcgactttctctgggggaggttctggagcagctctccctgctgccgggcgtggaattacagaccctgctggaacccgtaccggagtgcgatgactggtgctggaacgacatcgccgatcgcgtcctgccgtcgcgtcctgcatgtcgtgatgatgtgacggtggcagggctcatcgccaggctgaagcagtacccaccggatgcactgtgtatggggacgttctggctggaagatgattttctgtcgcttgatgacagtctgtcggaggaagaaattgcagaagccatgcgtatctgcgaccacagccacgatgcaggcatcggttttaactgggatacgctgcagttcgctatcgaccacgtgaaggggcgctga

SEQ ID NO: 239558 - DNA, 381 bp, Klebsiella pneumoniae
atgaagtgtaatactgcaattttgtttgtggcgctcacactggcaatgcctggtgctgtgaatgccgcagccacagtggcggttcttgaccagatggccacgaaaaagcaaaaggaacgtgaagaccagctcgaagccgtggaacgtgatgctttggcacagccagatgcatggaaagcgtatctacaggtgtctgacgcagtgcctgctgatgctcccatcatgctgcaaaaccgctaccgcagcctcgccatttcactggcactgaaggctgcaatggcctgttcgtcagacgctctcaagcttctcgagcgtaacgacgtaattgagtttcgcgtactccgatcatcgttagtctcagcctgcaaaacagctaaataa

SEQ ID NO: 239559 - DNA, 264 bp, Klebsiella pneumoniae
atgccagtgattaaacaaaaagcagagcagtgcattcataactttctgcgcgcccggaacgtgcctgaatctcagtggccggagcgggtaaaaaagaccggcaggggaatgatactggcaggcgtggccgtcgtggttcccggtgttctggttgataatatctccctgccggtgacaattgcgatgcaggtctgctacgcctcgctgatcggcctcggtgttctcctggcgtttgacgataaaaagccgaagaaccgatcctga

SEQ ID NO: 239560 - DNA, 663 bp, Klebsiella pneumoniae
gtgccggacggccagtattctttctatctgcacagcgacgatcgcaccgacatcgcggcgatggcgaccatcagcaccatctcacagcccctgcgtggtgacttcatccggaccgccgtcaccgctggggcggtgatgtaccagacggatgcacgtttaccggcgctgatcccggtgttctttgacgggtatctgagcgccatccggctttgtgccgtgatggcgctggtatccggcacctggtcttcactctcaggacttcctgatgagcctgatggtggcgtggcggctctggccatgtcaccggagacggaataccagcgccggcgttacaccctgacgcttcaggatgaccggagcagtgaacgggttgagcgtgtgctgacgggcgtgtcatcccgcctgcgcggagagctgctgagaaacctgattatcaccggtctggccctgcatacgaccgcaccggagctgccgcgtctgctggccagtatgccggtaccgcccggcacggtcagcgagctgcaggttctggttcagcagatggctggtacggctgacgtgagtatggctgcagtgccggagaaaccagcggagcctgccgcaccggtatccgctgaagcgaccaggataaagaaaaatatgcgccgggcattcggagactag

SEQ ID NO: 239561 - DNA, 1359 bp, Klebsiella pneumoniae
atggacctggtgtggaaaaaaaatccaaggggaaggcttgaaaggaaactgaatctggcagagagagaggcattgctgcatgtgttcagcaacggtcgaaaacccgctcaggctgatttacgtatagcaaattctgtgcttgaagaaatggaccgccgtaagttgtggttaaaatgcgattgcgtcgaacatgacccgaacattgaaggtccttttaactgcgaggttaacgttgccaggttacgccacgtcaagacgacaagacagcatgatgaacagtgccctttgttcaggctaaagaaaagtaaggacgctgataacactatcactgaaggaaaaaccagcccactaaatccggttggcggtaatgactggctacctgacaagaagaaagacaccaaaatcaccgctgtggaagggccggtagtgccccgtaagcgtcgacgcaaaactcttaaacccattccggctctaggccgaaaattgctgactctcattcaggcagctggcctgaaccaacttgaactagtacctgaatataaaagtccggggttagtcggttcggtcaaaagaataaaagaagttctggatgaacatacaatgggcaatggaacacagcttaatatgctgttcagttgcgcgccctggctgtccctcgaacggattaacgacatgctgactcagctggaagtctcactgcagactgatagcagtgataaggagtcatgcgtgtatatcattggtattgcgaccgatgccagtcgggaagaagtaacctttagcgttcggagtaatacttttatccataggcctgaagcccgagtcagtatcaatggcgaaagcacctacaacactggcagtcgggccccatactgggcaattctggaataccgcagaggtagggatggcaaggtttactgccatgagggctatgcgcatgctgcgtatacgcttgataatcctgtgcctgtggatagcaacaaagaacgcgacacactgaaggtaataataaacgccagcagctatgctggccgtcaggaaaatcatccggatgctatcagcctcagcaagccacttttcacgtctaaaagcactaaaaatggggtggaggaggtcattcatcctgacttcatactgaatgtagttccgagcaaagaaaacatcgttaccactttgatcatcgaaacaatgggctctgaatccgaggagtatgtcgagcgtaaactgcaaacacatagctggatggagcaggaaggtgtgctcttaactgatcctccgggttggccagaaccttcagacaggacatttaacagcttcctgctcaaacacatttttagtgcagggaaaatgcacaattag

SEQ ID NO: 239562 - DNA, 774 bp, Klebsiella pneumoniae
atgaccggactcgttaccctgggagggtattcgaccacaggggctcagttacctgtttctatcgactatccggcggcgctggccctgcgtcagatggctctggttcaggacgaactgccgaaatacctgctggccccggaagtgagtgccctgctccactatgtgcccgaccttcaccgcaagatgcttcttgctaccctgtggaacaccggcgcccgtattaacgaagcactggccctgacccggagtgatttttccctggcaccgccctatccgttcgtgcagctggccacactcaaacaaagggctgaaaaagccgccagaacggctggccgtgcgcccgtcggcagtcagactcaccggctggtaccgctttctgatgcgaattatgtcggtcaactggagatgatggtggccacgctgaaaattcctcttgaacgacgtaataagcgaagcggcagaaccgagaaggcacgcatctgggagatcaccgaccggacggtccgcacctggctcagcgaagcagttgaagccgcagcggccgacggggtgacgttctccgtgccggtgaccccgcacacgttccgtcattcctacgcgatgcacatgctgtatgccggtataccactgaaggtgctgcagagtttgatggggcataagagcatcagttcgactgaggtgtatacgaaggtgtttgcgctcgatgtcgcggcacggcaccgggtgcagttccagatgccgggcgatgaggcggtagcgttgctaaaaaaatag

SEQ ID NO: 239563 - DNA, 819 bp, Klebsiella pneumoniae
atgggaagcatgaaagaccagatgatggatattgaatctgaacgatttgataaatggcttgcggaaaattctccggatgttgtacccggctcagaagaatgggaacaggccgctaacctttattactgggaacaggagtatctcgccgatcaggctcagtgggatcatgaacacgggctgtttgtggcttccctgaacaatgttcatcagcgttaccttcacgccaggcaggagttgaaggggctgtataccctgctcgatacagagcagcctgaactggtgtacaggatgtctttcgtccatgccgtgacggtcatggaggcgtacctgatgtactgcgccagggctctgctggaagaggattttccgcttacacggttcagggatgagttttatatgaagtccgataaaatcaaaaatccggtaaaacatgctgcccgtgaaatggctctttctatgttccggcctgcggcgcagaattttgtttcccggatgacgtttcataacgtaaaaaccattgagcgctatttcgggactgtgcttcatataccgcccgtctggccaactgagccgctgggtatcatcgcagactggcgaaacgatctggtacaccgcaacggtgtggatgtgcatgatgtgcaacgagtgatatcagcgccgcagctgcaaagcgccctgcagaaagtgtcggatctgatagaggctgcagatcattccctgcgtctggaagtggactattttggtaactcgcgtaccgaagaaaaccgggaaatcattgcggaagcactgcgcatatccccgggcggagaatcatcctga

SEQ ID NO: 239564 - DNA, 303 bp, Klebsiella pneumoniae
atgaatacatcatcacatgaaagcgagcgcgtcccggtttcacttgaaaccgtctggcgggcgctgaccgccctcggtcatcagcggctctggctccgccctccggatgagcggagcgtgaacacttggctgatcgtcacctgggacggcctgacggtggctgagcgaatcagaaattccggaacgtggtggctggccggggatgcgaatgccatctacaccaatccggaacggatcgtcccggacgggctggaagagctcaccttgctctctgtgcagcggcgaatgaaggacggattctga

SEQ ID NO: 239565 - DNA, 237 bp, Klebsiella pneumoniae; identical to SEQ ID NO: 129639

SEQ ID NO: 239566 - DNA, 483 bp, Klebsiella pneumoniae
atgaaagtcactgaacccaaactgaatacgctgatcgataatctgaatgccctgatttgtgaggacagcctgctgacgcgccaggagcgcgaggatttggtccgggccgtcgccgccatcggtgccatgaaagcgcgcgtcagtatgaagaagtccagcgttccggcagcgtcgaaactaaaggaagagaaacaggaacgtgtgcccgacccacgttttccgcatgccggcgaaccctggcgggaagaagaggggacgatgctgcttgatgccctcgaatccgtaccggacgaagaggtgggcgttcatctgttctggctggccgaaaagctggggcgtaccccctacagtgtggcctgtaaaatagcggttctccgggacatgccagaagagtggaaagatcagtaccgcaaggtttcggatgatatccgcaagtcaggcctgagcatcagcgattatgttcagcataacgggctgaattaa

SEQ ID NO: 239567 - DNA, 1569 bp, Klebsiella pneumoniae
ttgcaacagtgcccgttttactaccagctcgcagggcagtttatcagcggtacggacgttgtcagcgcccgctggcagacgtccgaatacgcgccggtggacgataaaaagcggctgacggataaggcctggggggaaggactcgcgagggctctggccggaaaaccggccagcgtactcgcggccgccacagaccggggaaaaaccacggccgcgccgctgccgtttaacctgctgcgcctccaggtgtatatgaaccgcaggaacaaactgaccgcgcagcagacgctcgatatcacgcagaagctcaaggacagtaaatacattacctataaccgctccgactgttcttatctgtccgatgaacaattcaacgacgcgccgcaggtggtggcggccttaaaaacgctcgacatttttaacggccttaccaccgacacggcgcagaaaagtgcggcgtttgacagtaaaaaagtcaccgcccacaccgctattatcccgacgacgaacatgccggatttaagccgccttaccgacaaggaaaaggcggtttatctcgccatcgcgcagttttatctcgcgcagttcgtggcgaaaaagcgctatgacgagtcgatcgcggagattaaatgcggtgacgaaatgtttaaagtctcggcgcgtaaaaccacggatgcgggttttacgacgttcctgaacgacgcggaagaagacgacgaggaggacgaaaacagcaccgcgtttgaggccatcagccgcctgcaaaccggggcgacattaacctgccgcgaggtggtgatttcggagaaaaaaactaaaccgctgccgctgtttaccgaggcgaccctgctcgctgccctcgttcgcgtggccgattttgtcgccgatccgcgcattaaaaaactgctcaaggagaaggataaagacaaaaaagatgaacacggcggcatcggcacaccggcgacccgcgcggccattattgagacgctgaaaacccgcgattacatcaccgtggaaaagggcaaatttatcccaactgccgccgggctggcgttaattgatgccctgcccgactcggtgacgcagccggatatgaccgccgtttgggctgaaaaacaggcggcggttgaaaccggcgaaatgaccatcgagcgctttattgatggtctttacgcggaagtttcccgcctggttgagagcgccgatattgccatcagcgcgacggaaaaacagcccgttaaaacggcgcttaaccgcctcgcggttaaatgtccgtcgtgcggttctgagctggttatgacgccgaaaacctgcgcctgtacgggctgtcagttcaaaatatggctggaagtgcgcggcaaaaagttgacggaaaaacaggccgagaagttaatcggcaagggcaaaaccgacgttattaaaggttttaaatcgaagaaaaacgacgacacctattcgatgatcgtcacgctgaaaaacgtgcaaaccggggaactcggttttgaatatccaccacgcgatccgctgaaaggattgaacgtatctatgccgaaggagctgaaattatga

SEQ ID NO: 239568 - DNA, 393 bp, Klebsiella pneumoniae
atgaaccgtatccaggacgaattaacctcagagcgcgcgctgaaaaagtttttacgtgaaagtgattttgcctttctggagatgctgagcgcacgtatttcagtggcacttgatgaaaagcgcgcagagcatatcgagcaggaaaagctacgccgacagcgggaagaaaagcgcaatgaattgctggcgctgattgaatcggagggcttttcaccgacagagctggttagtacaaatcccgccaaaaagtcggcaaaacgcaaagctaaatatcagtattttgaaaacggcgtgcataaaacatggtcaggcgtcggacgcgtgccggttgtaattcagcaagaacttgacgccggaaaacctcttgaatccttccttattaccaccgactaa

SEQ ID NO: 239569 - DNA, 1908 bp, Klebsiella pneumoniae; identical to SEQ ID NO: 140623

SEQ ID NO: 239570 - DNA, 240 bp, Klebsiella pneumoniae; identical to SEQ ID NO: 140628

SEQ ID NO: 239571 - DNA, 492 bp, Klebsiella pneumoniae
atggaacttaagaagctagacgaatctttctatatcgataacccaatagttattcaggcgttagactttagcgcagaagcaaacgagtggatgtcacatgatggtaaagttcgcggtcatggtatcgtgcagattgccataggtgatttaacttttgccatacctgttcgttctaacatcaaacatgatgccagtttcattctcgaggttaaccgcggacgagacaagagcatcaaaggtatggggttagactactcaaaagccttgcttataagaaaatcggaacacgtaactaataatgtgtttgtgcttagatcaaaagatgcaggtaagaagttgcaaggcaagcaagaacacatcactaaacaatttactaagtatgttgaaaagtacataaaagccgttctgaagggcgatactaacattcttaaaagttcggattaccgtttttcaacactggttaattatcactctgagcttggtttaccttag

SEQ ID NO: 239572 - DNA, 294 bp, Klebsiella pneumoniae
atggtcaaacgaaagcaggtcgacatacacgaaatatatgaggcgctgaaatgcttaggtcatactcgtctctggctccgtgacaatggcaagtacaatcgccttattatcacctgggacaacctggtagcagccagctatgatccttatcttaaaagctggaactttcgcaaaaatgcctgtcgggtgaattacaacgctaaaaatgaaatacctccaggaaagtcgtcagttttgactgagcttgcagattcaggccatgcatggatgcaaatgcttgatggagattggtag

SEQ ID NO: 239573 - DNA, 780 bp, Klebsiella pneumoniae
gtgatcgccgaagtatcgactcaactatcagaggtagttggcgtcatcgagcgccatctcgaaccgacgttgctggccgtacatttgtacggctccgcagtggatggcggcctgaagccacacagtgatattgatttgctggttacggtgaccgtaaggcttgatgaaacaacgcggcgagctttgatcaacgaccttttggaaacgtcggcttcccctggagagagcgagattctccgcgctgtagaagtcaccattgttgtgcacgacgacatcattccgtggcgttatccagctaagcgcgaactgcagtttggagaatggcagcgcaatgacattcttgcaggtatcttcgagccagccacgattgacattgatctggctatcttgctgacaaaagcaagagaacatagcgttgccttggtaggtccagcggcggaggaactctttgatccggttcctgaacaggatctatttgaggcgctaaatgaaaccttaacgctatggaactcgccgcccgactgggctggcgatgagcgaaatgtagtgcttacgttgtcccgcatttggtacagcgcagtaaccggcagaatcgcgccgaaggatgtcgctgccgactgggcaatggagcgcctgccggcccagtatcagcccgtcatacttgaagctagacaggcttatcttggacaagaagaagatcgcttggcctcgcgcgcagatcagttggaagaatttgttcactacgtgaaaggcgagatcaccaaggtagtcggcaaataa

SEQ ID NO: 239574 - DNA, 291 bp, Klebsiella pneumoniae; identical to SEQ ID NO: 140654

SEQ ID NO: 239575 - DNA, 684 bp, Klebsiella pneumoniae; identical to SEQ ID NO: 140653

SEQ ID NO: 239576 - DNA, 147 bp, Klebsiella pneumoniae; identical to SEQ ID NO: 146417

SEQ ID NO: 239577 - DNA, 435 bp, Klebsiella pneumoniae
atgactatgcaatatgacctgaaccaaatcaacaaactgaccgcctccgacctggagtttatccgtcagcagggcgaggacgcgcgccgcgccctcagcgataccgtgaccggcctcctgtcgacaccagaaggatggcacgtctgcgccgaataccgcagcgagttcggcggcttcttccccgtccagtgccgcttcagcgcggacggcagcgatgactggcatctgtgcgtgtgcagccccggcgaagtctcgccgtactggcttctggtactgctctcctccggcggggaagtggtgcgtaccctttaccagagtgacacgctacagcctgaccggataagccagctgatcgcgcagctggcaggtatgcgccgctttaactgcactgcccgcaccgtggcgaacctgatgagcggggaggtgacagcatga

SEQ ID NO: 239578 - DNA, 2013 bp, Klebsiella pneumoniae
atggtcgccaccaatactacggcaaaaaaaccagccaggaccacccgtcagacaaaatctgcggaaaaaatcgcgcagtctaccgagcagaagctcgtccagctgctcgctgatacgcccgtgcaaaccttcccgtactcccgcctgtcacacacgggcttaaacacgcgcatcattccgcataccgatcaggaagtggaagagatggctgacagcattcaggcaatgggcatcctgcaaaacctgatcggtgcagaactgccggacggtacgatcggcattgtcggcggggaaggtcgccgcagaggcacaggcattctggtgatgcgcggtgtgctcgatgcggacacgccgtttgttccggtgaaagtcctgcccgtggagatggctgtggcggcctcgatgatcgagaacggtcgacgtaaaaacatgcatcccgccgagcagattatcggttttcgtacccttcagcaggaaggtaaaacggcctctcagatcggcgcactgatgggctaccacccgcgccacgttcagcgctgcctgaagctggcgaatcttgccccctccctgctggatgcgctggcgcgggatgcaatctcccttgaacagtgtgaagtcctgacacttgctgatacccatgagcgtcaggagcaggtctggaaagaggctgttgaacagtggcgcgatccagccgtacagactctgcgcagaatggtgaccgacgacaagatggccatcagtcacccgatgtttgagtatgtgggcgaggaagcctataccgccgctggcggtacgctgaccgccgacctgttcagcgacaaggacagcacctttgccgatgcggcgctggtgaaatctctgctggctggcaagctcaccgtgctcgccgctcgcgttaagcaggagcagggctggggctgggctgagttccgtatgacggaactgcgtgccagcggtgaggacggtgaacagtaccgttttgcgatgccgaaagctgtcctgacggaagaagaacagaagcgcgtcagtgagctggaagaacaaatggaagcgactgaaagctacgatgacgaatacgcgattcaggagcagattgatgatatctactgcgaggcgacttaccgcgaagccacgccggaatttcgcgccgcccacggtatctgggtgtcatgggatggtgacaattttcgggttcagcccggtatccgcaggctgaccgacgaagaccgggtagctgaagaacaggcgcgtgaggaacgtgaaagcaatgtgatcagacacaccacgcctgacattcccgccgacgcttatccggcaacgctggtaaaagctatgtcagccgaacggactctcgccgttcaggccgaactggcgggtcgtcccgacgtatcggtggcgctcctgacgtggacactgtgcctcagtatgtttgaccgcagctacggtaaacgcagcgaaccgctgaaagcctccgtgtcctcgaatcagtatcaccttgcatcactggctccatccggtgaagaagggaaggcgctgacggcgctcaaagcgcagaaagaggcgcttcaggcaacgctgcccgaaaactggcatctcgatttcacgtggctgctttcatggtcagcggagcaggtgaacaccctgctgggattctgtgccgcgcacggtatcaacggtattcaggaacgtatgtacaaccatacgcagaaaagcgaactggacgggctggaagcggcgctggactttgacctgcgcaaatggtggcagccggatgctgagagctacttcggcaagctcaccatcgcccagattggcaaagcctacgaagaagccggactcagtgcccgcgccggagagattgtgaagctcaagcgccgcgatgcggcgaaggccgccgagcaggatctgaatgctcagggctggctgcctgactggatggtgcgcacatcaccaaccgctgaggctgaagaagccaccgaaaccgacgctcacaccactgaccacgctgcttaa

SEQ ID NO: 239579 - DNA, 366 bp, Klebsiella pneumoniae
atgcagaaccttaacacccgtccggcgacccgtaaggtcgggcagagcaccgaaatcgtgaagctgctgcgcattcaggccagcgacacccacgtggtcgagtttgacaacgtggacacccgatttaatgactgcaacaactggcaggtgatggcaggaggcaaacgcgtcctgttcagcaaccgcatgtatgagcgtttttcagatgtgaaatcggggatcgtggcaacgatcaacgtttgtgaaaacagcggcagcgtaacggataaagcgatgctcgaaggggcaaaagtcatgatgcagcttcttgatggctatccgtcctttggagcactggcagcacacccgaaacgcattaccggttaa

SEQ ID NO: 239580 - DNA, 273 bp, Klebsiella pneumoniae
atgcacacacgaaacgtcaacgtcaaaaccgccgctcaagaatcttccaggaagatgggggaagaacaaaaccctgtttctgtcgcacgggagtgggtggctcaggccacttcgctgaaggcgggggtcaccgtcaccctgtccgatgcgtcccgatacggcgacgtgcaggtggagatccgcaccaacggaacgcttaactggcgcgcctggtcgtttgaaccggattttctttttgaactgaaacgcaatctgcaatacgtgcagctttaa

SEQ ID NO: 239581 - DNA, 1356 bp, Klebsiella pneumoniae
atgctaaaaattaaaggtaaatcattaggttctatactcaaaagcagaaatgaggctttctataactcgctatggttattatcagagagagtcattacaattctgtttacatttacagtaggcatctttttagcaaggtatttaggccctaatgatttcggtgtatacaattatttgatttcaataatcacattactttcgcctttaaccgcacttggattaaatgctgttgttgttagagatttggttgacgcccaaagagaggatcatgatgatacaaacgtcatacttggtacgagctgcgtcttaagatttttcggtggcttgtttgcgtgcgcatcactgctttttgtcgatatttattttaatattagccaaaataatacattatggctggtactgttagcttctgcgaatatatttagttgttttcaagttgtcgatttttggcttcagtcaaaagtaaattcgaaatattcagcaattttaagattatcaatatttattactagctcattagttaaattgataagtatcatatttttttcctgtgggttgaagacaatattaataattcaaactttcgaggttctggcttcaggggttttatatgtcccattatataagtaccttaaaggaaaaattttcaattggtcctataacaaaaataaagctaaaacactgatgtcaaaatcatggtggctaatattgtctggagttgcagaggttttgtatctcaaaatagatcagataatgttaggcatgatcaatggctattctactgttgctacttatgctgtagcagcgcgtctttccgaggcgtggtatttttttccaactattattacagcatcttttttcccgctactaattttagcgaaaaaagaaagcgaagaaaaatacaagcatacattattagacctatcaagaaaattatttttctgtgcattaataatatctatatttattacgataatagctcatacagcgataaacatactttatggcgaagcatatgccgaaagcgcaacgattctcattattcacatatgggcaagtttgtttgttttcatgagagctgtattaagcaaatggctagttatagaaaatatgttaccattttccttggttacacatattagcggtgcaattgttaatataattcttaatctcattctgatcccgaaaatgggagggataggttcagctattgcaacagttatatcatattcaatatcttcgtatttttctctattcattttcaaaagaacaagagtgatgggttggattatgactaaagcaatttttacatgttttttaatttttagaggtaaaaatgaaacaattcataaataa

SEQ ID NO: 239582 - DNA, 555 bp, Klebsiella pneumoniae
atgacaaaactagcacaaatggctggtatcaaagcccacagagttagttttgatatgacgtcattggctcccattgtattttcttatgcgcaaaagaatcataaaaaagttgctataatcggaagtgatagcgaatcaaatgcaaaagcaataaatataatattaacaaaatatcctgatttactgctggttaaagctaggcatgggtattttaaagatgaaacagatcgtgctcatttcataaaacagttatcagaattagagcctgatataattattgttggcatgggtacgccggcgcaggatatttttttgcaagaaatgtttatgagcaaatggactggcgtggctttcagttgtggtggttttttacaccaaacagcaaaaaatggtagtacttattatcctgatttttttaacaaatataatttaaggtggatgtatagaatgatcgacgaacctaaacttgtatcaagatatttgtttggctatccaaagtcgattctgttttttttattcgatctgatgcgtttcaaatttatgacaaaaaattaa

SEQ ID NO: 239583 - DNA, 354 bp, Klebsiella pneumoniae; identical to SEQ ID NO: 234983

SEQ ID NO: 239584 - DNA, 1947 bp, Klebsiella pneumoniae
atggccgaacttaacccgcctttgggaacgacgacgcctgaaattttcctggataacgtcatgcgcgctgacgaactggtgaacggtccggcaggtacagttaacgaccgagcaggtgaaccgctggatacgtggcgtcagatgatggcgaaaaatgatgaggtcaggcagaacatcattccgctcagtaagcagtacgcgacgctggcggcggtgcaggcagacatcgcgaatattcccgaggggagcaccgcctattaccgcagcccggacgacagcgccctcgcgattgaggtcatgaacgttggcgggacgctgaccgcaaccggacgaaaaatgccatcacaggaatatgtcgaatctgtcgatgaatatgtgacaaccagactatttagcgatgtgcttcccggcattcccttccttctacaggatgaggaaagcggtgtcattatgttcggcgaggatagtggagcaactcacgttccagggttatcactgaaatacggtttcgatctggcttattccgtcacacaaatacccggcgtagcgcatgttgaactggatgaaaatggaaacgttttgcgttgggttgacgattccggtgagactcatgacgcctcaccgggtagtggtgcagaacctacgcccgttgcggtatcttcaccggttatttctccccaggtctatgacaatgccctggtgagtgagattggctataacgggtggatcaataacgtcgctgtgaagttcgggcgggattattttttcagtggcgttcggctggggacgaccgggcctgagcgaatcctgggaaacctggctatctgccgccgacagggtgagcgtggaaaatttgggtgctatgaatttggccctcgcgctgctgttcttggcgatacggcatcaacggacgaccatgatgcaccgtcgattttgctcgatacgcgcgccggtgctgaagttcccatacagatttttcagtctgatcactccggggcgaatgtctggcttcggaagtggtcatcgcagacgttagatcctgcaaatatttccgggccagaggttgtatctgacacgtcaaatatgacctatgcccagtcctacagaaacccatttaatcagaatgagattcttgtatttgcccgtcggggatctacgaattcggcgcgctgggtcgcacatcactcaacagacaacggcaggacatggcaatccaatgcatttatcggcggttccgatttgtatatgaccacttgccagagtgtggacgggaacgccattcatctcgcgatccaacagcatccacgttcgaccgacacgcgcgtgttatatatgaaaatcaaatggagtgataaatccctcatcaattatagtggaatcacagcgctgcctgatattatgacttatggatatattgaccccttcttaaatggcatccctgatgtagtctttgaatcctctttaccaaccaacacaaaacggttgtttgaagtcaaggatgatggagtgtcgatattatttcttatcgctgaattcaatgcatccaactattcttatcgacgaatgaaaatgtcacaattttcgggagggacacctgtaatacatgatataggcgactgcggttctccaatgaataatgatgatgcgacgttttatgtgccaggtggaactatcatatctgcaactgatgttctggtttgtaactgggtaaaaattcccgcccttggtcagttaacccgatatgtctatgacggttctgcctggaatgggaccctgctggacgaggttaaagatggccgaaaaatctgtagacctctggttttccgagaatactatcaggacaatggcatactgaaataccatgacacaaatactgtcgtctacttgcgagggacatataacgcctatcgtgattttgatttagatgctgtattaataaatatctga

SEQ ID NO: 239585 - DNA, 327 bp, Klebsiella pneumoniae
atgaagtggcgctattccctgcgctggaaattgccgcacaagccctgcccaggtctactggagctggtttcagttgtcgtggaggcagggcaggcggcacctgaggaggtgatggcacgctgggttgctggctcaggttacgctgtttgcgtggattttctcggtcagaaacagatccagcgctggagcgatgaacggaaagccgcagtgagaaggcgcaatatgcaggcacggattaatcgtgttgcccctttgtttgccgatgagttaatcgagcgtgagctggctgcacgtcaggcatatttcaatggcaagtccgcccgatga

SEQ ID NO: 239586 - DNA, 375 bp, Klebsiella pneumoniae
atgaggtactggttgctcgttatcttcctgaacgtgctgttctatttaatcgttaagcatgctgcgccagaatggcatggtacgcctggttattatgcaggccagatcatctgcacactaatagctctggtcatcacatggcgtgatccgcctggctggttagatgaaatcctgctcggcgtaatgaaatacggcgttctgagtgccgggatcatcttctttgtctggggcgtcgggtacaagctggcattctgggggcagggtaattctgatgccgaatttgtaagcgcatttgacgtcattttgcccaatcttgcgctggtcacgggcgtagtgatcgcgggatggggatacctgagatatttcaggcgataa

SEQ ID NO: 239587 - DNA, 1134 bp, Klebsiella pneumoniae
gtgtacatcctggttctgccggtgttcggggtcttctccgaaatcgccgcgaccttctcgcgtaagcgtctgttcggttacacctctctggtatgggcaaccgtctgtattaccgttctgtcgttcatcgtttggctgcaccacttcttcaccatgggtgctggcgcgaacgtaaacgccttcttcggtattactaccatgattatcgcgatcccgaccggggttaagatcttcaactggctgttcaccatgtatcagggtcgcatcgtcttcaactcggcgatgatgtggactatcggctttatcgtgaccttctccgtaggtgggatgaccggcgtgctgctggcggtaccgggcgcggacttcgttctccacaacagtctgttcctgattgcgcacttccataacgttatcatcggcggcgtagtgttcggttgcttcgcaggtctgacctactggtggccgaaagcctttggcttcaccctgaacgaaacctggggcaaacgcgctttctggttctggatcatcggcttcttcgtggcgtttatgccgctgtacgtgctgggcttcatgggtatgacccgtcgtctgagccagcagatcgatccgcagttccacccgatgctggttattgcagcttgcggtgcggcgctgatcgcctgcggtattctgtgccagctgattcagttctacgtgtctattcgcgaccgcgatcagaaccgtgacctgaccggtgacccgtggggtggccgtacgctggagtgggcaacctcttctccaccgccgttctacaacttcgctatcgttcctcaggttcacgaacgtgatgccttctgggaaatgaaagagaaaggtgaagcgtacaaacagcctgctcactatgaagaaattcatatgccgaaaaacagcggcgccggcatcgtgattgccgccttcgctacggtatttggtttcgccatgatctggcatatctggtggatggcgatcgccagcttcatcggcatcgtagcgacctggattattaagagctttgacgaggacgtggattactacgtaccggttgcagaagtcgaaaaactggaaaaacagcatttcgatgagattaacaaagcagggctgaaaaatggcaactga

SEQ ID NO: 239588 - DNA, 846 bp, Klebsiella pneumoniae
atgttcggaaaacttacactggatgcagtgccctaccacgaacctattatcgtggtaacggtggctgcgattatcattgggggactggcgcttctggcagccatcacttacttcggtaagtggtcctacctatggaacgagtggctgacttctgtcgaccacaaacgtctcggtatcatgtacgttatcgtggcaatcgtcatgctgctgcgtggctttgctgacgccatcatgatgcgtagccagcaggtgctggcttcggccggggaagccggcttcctgccgcctcatcactacgatcagatctttaccgcccacggcgttatcatgatcttcttcgtggcgatgccgtttgttatcggtctgatgaacctggtggttccgcttcagctcggcgcgcgcgacgtagccttcccgtttctcaacaacctgagcttctggttcaccgttgtgggcgtgattctggttaacctgtctctgggcgttggtgagttcgcgcagaccggttggctggcctatccgccgctgtcgggaattgagtacagtcctggcgtaggggttgattactggatttgggcgctgcagctctccggtatcggtactaccctgaccggtattaacttcttcgtgaccattatcaagatgcgcgccccgggcatgaccatgttcaagatgccagtattctcctgggcatctctgtgcgctaacatcctgattatcgcctcgttcccaattctgaccgtcaccatcgcgctgctgaccctggatcgttacctgggcacccatttctttaccaacgatatgggtggcaacatgatgatgtacatcaacctgatttgggcctga

SEQ ID NO: 239589 - DNA, 1029 bp, Klebsiella pneumoniae
atgcgaatttttattgcacttagccttttaatggtctcaggcgcagccgtggctagtgaaaagttagtatgtgagtatgcagtgggggcgttgtctacaccgccaaatctgctcactaaaggtaatgcgaatgtgatattcgatggaaaatcctttacggcatataggctggatggttcttttgttgtaaccccaccattgactgaaaagaaggatgggatgatttttgttgatgataaaacaaaggtctttgctgccagtctggacagatctaactttgcagtgtctgacagaataaaaaaaaccacagagcagtgggctaaatgttcgggcgggagttcttacagcaatgaaagagatcaaatatcaggctcaccggtaagcacgtctgaaattgaaaagataaaaagattgcccggcattgctgaattacattgttctaactttattgataaaagatactctcaatccaaaaatatattctataaaataaaacccagtatattcgctaaaatgccgttagtttctggtggggatattacctgtgaggtgtcaagtaatatatggaactggaatgaaacaaatgtaatggcagtagagcatggtcttattgatcgcataccttatacattatatcactcagacggttcagggaatgttggcgtggcagatcaggcgtggtcgttcgggtgcgtaaaagattcaatgacggataaaaaacaatgcgagataaccaatgaaagcattaggataattaaaaaggcaaaaggatactcagctattgtaggtaatgatcatttcccagggcgaagtgcatatataagagttgggcaaggtaagcccattgcctccggcgataatggctactttccgaatgtcacaggaattgtcggcagcatcaatggcggtacaaagttgctcacaaggtataccaaatggccttatgattatgttgttgatactgaggttaatacaattggatttgagcaagcaaattttcttttaggtaagacattgtcagtatactaa

SEQ ID NO: 239590 - DNA, 432 bp, Klebsiella pneumoniae
atgaggattcttggttatcttgccatcttaataggcgtgatcttcgctgtttttgctctatttatggatgtaacagtagcaacagatgatggctacagagttaacaaccttggtttaatgtcttcacgacaaaattacatgatatttggcggattcgtagcgattgcaggaatcatcatcgttttggtcggtgagaagttcaaaccatccgcaaactcagtcaaatgtccatactgcgcagaattaataagcgctgaagcggtgaagtgcaaacattgcgggagcgacgtcaccccttcgaagacaatagttagcgctgacgatgctgaggccagtgataggttggctgacgtcaatgtaaagttgatcgcaggggttgtgctggcggtctttgcggcgattatcggcgcaataatttttcaccgtcaatga

SEQ ID NO: 239591 - DNA, 273 bp, Klebsiella pneumoniae
atgaaagataataggactgtaataaaaacacttgaagatgcattagaagcagtaaacgccttgatactctttactctggggtcagagcatatgagtgttattcaagggatgtatgatatttcaccagcactgaagatgcatcaagttaacgaaattttccttcgagagttaaataacagcataattcctgatacccgtgaaattgtcagcaatttgcatcctaatggttcacatgttggacgtgatttagtaatcactttaactagacactga

SEQ ID NO: 239592 - DNA, 336 bp, Klebsiella pneumoniae
atgaatattgaagtgttacagtacctcgaaagagacggtcgcgaacacgtagaagatctggttagcagaactaagtatgacagtgaggcaacatttgctgttatgagaatcctgattgctgaagatggcaatgaagaggtgctaacagacaagcaaaaatatcatcttcaaacttttatcgaaccattaatctaccgtgtcccttgctctggcatctatggcgaagattcctgcacaggtgatggctttgttgacgatgaatctctattgataagctatcaagaagatgactttaagtgtcagcattgccgttatgacagtgaaaggcaccattga

SEQ ID NO: 239593 - DNA, 294 bp, Klebsiella pneumoniae
atgtggagaggaaccgatcgcaccagaagccagatgatactgaccgagtatcaatacgactatcagaagaaaaactctcgatccgtttacctagtgcggcataacagcaaagcccagcaaaccgttctggagcaacatttgacgatagagcgcgatagcttcggtcgtttcaagccgactatcacgctgagcgacttccctgaagggctcagcgaccgcgagtcgatgctgaaacttgccgactggctgcaccgccttgatgtggctatcgaggataactggagccaacaatga

SEQ ID NO: 239594 - DNA, 579 bp, Klebsiella pneumoniae
atgggtacttggcggattatcaaatcacacgaggactatgaagtcgcgatggcaaggctcttggctcttgctgacacggaccttaaggaaggtactgatgattttgatgagtttgaactgttgagccttctcattggtcactacgaagattcgcactatccgattgataagcctacccctattgaggctatcaagttccgcatggatcaaatgggattaacttatgctgatatgagacagtatcttggatccgcttcaaaagtttcagaggtactgagcggtaagagaaaacttagcttaagtatgattagaaggctgcataacggccttggtatccctgctgatattttgatccaaaattctgatgaagttgaatggtctgccgtttcatttggcgttgaaaccttagctatagcttttagcgatgtgtgtaaacagccttccgaagtcactggtttcggtggcattgcttcgctgggtgttgtgctcgaagtaacgactcagcagcaagtaacggatacctttagcagtataaaagttaatcctgcgtctccagttgcacctatagaatgttactaa

SEQ ID NO: 239595 - DNA, 336 bp, Klebsiella pneumoniae; identical to SEQ ID NO: 216425

SEQ ID NO: 239596 - DNA, 525 bp, Klebsiella pneumoniae; identical to SEQ ID NO: 112799

SEQ ID NO: 239597 - DNA, 1146 bp, Klebsiella pneumoniae
atgccgtctctcttttctgttttcagcgccggtgaaattcgcttcgggcgtgggcagcttgatactgttgccggatgggttgctcagcgttcggagcgggtgatgctggttcacggctcttcttctgcacgcgcggctgtgctgctcggacaattagccggggccgggctcgatgtccatacattctccgtagcccgggaacccagtctggaagatatccggaatggtgttgaacaggctcgcgaagccagtattgaagtgatcgtcagtttaggaggcggtgccgtcattgatgcaggcaaagctattgcggctctggtgccagccaacggcagcatcattgaatatctggaagtggtcgggaacggacgtttactggaatctgctcccctgcccttcgtggccattccgaccacggcaggcaccggggcggaagtcaccaaaaacgcggtcattaatgttcctgaacaacgccggaaggtaagtcttagggataaacgcatgctgcccgatctggccgtggtcgatccgtcattaacagacagaacaccacgatcagtgaccctggcctcggggctggacgccctcacccaggtgatcgaaccatatgtatgtaaccgggctaatacattcaccgatatgctgtgccgtgatgctattccccgcgcgatgaatgccctgagaacactgatggagaaagaatgtgccgccagtcgggatgaaatggcctgggtcagcctgtgtggtggtctggcactggctaacgccgggctgggagtgatccacggtctggccggtccgctcggggggttatgtgatgctccccacggagcgctatgcggtacgctgctgccctatggcctggaattgaatctggaaaatgtcgcgtcagaagaaagccttagccgcctcgaagaaattcgtgacgccctggcgctcagctttagtgtccctaccacacaggctttcacagcccttgcggactggagccatcgccacggactgggtaccctcagggaactcggtgtaccttatgaggcacttgaggcggcagcagaagcggcactcaatgcctcatccattcgcgccaatccggcgaaactaagtcagtcgcagctgctcagtctgctgcataaggcctggtaa

SEQ ID NO: 239598 - DNA, 279 bp, Klebsiella pneumoniae
atgaatcctgagtcagccgaatttgtcattcataacaaaagtggtttgcatactcgccccggggctgtgctggttaatatagccaaacagttcagcagcgatattcagattgccaacgtcacctccgccgggaagccggttaatgccaagagcctgatgaagctgatgggaataggtgtacgtagtggtcacacaattcgtgtggaggcaacaggtgaagatgccagaaaggcaattgaagctatttccgaaggaattgcttcaggactgggagaataa

SEQ ID NO: 239599 - DNA, 327 bp, Klebsiella pneumoniae; identical to SEQ ID NO: 112802

SEQ ID NO: 239600 - DNA, 1446 bp, Klebsiella pneumoniae
atgagcaaagaacaagtttctctgcaagttaaaatacagagaatggggaatttcctcagtggaatggttatgccaaatattggtgtcttcattgcctggggtctcattactgcactgtttattccgaccggttggttcccgaatgaatatctggccaaactggtaggaccgaccatcacctatttattacctgcgctgattggctataccggcgggtataacgtctatggtaaacgcggaggtgttattggtgccgcagccaccatgggcgttgtgattggctccgacattaccatgctggttggtgggatggtgatggggccactggcggcctggctaatcaagaaagtggataagctgtttgaaggaaaggtgaagcctggctttgaaatgcttatcgacaacttcagtatcggtattgttgccgcgctgctgatggtggcgggttatgcggttgttgaaccaatcttctctgtcattttgtccacgctagcacagggcgtgtactgggcgctgaataaaggtctgattccgtttaccgcgatctttgttcaacctgcctgtgttctgttcctgaacaacgcgattaaccacggcatcatggcgccgctgggtatacagcaggtggtagaacacggcaagtcgattctgttcctcgtggaagcgaacggtggcccgcaactgggtgtcctgctggcatacatgttctttggtcgcggcatggcgagaaaatcagccgcacctgctgcgcttatccacttcattggcggtatcggtgagatttacttcccgttcgtcctgatgaaaccaaaactgatcatcgcgccaatcgtcggcagcatggtttccctgttcatcttccagacgatggacggtggtgtggtaggtatcccatccccgggcagtatcatcgctttcctgatgatgacaccgaaagggtccttcatagccaacattcttggttacggaattggctgcctggtgtccatggccattgccggtgccctgttgaaaatggatgctcgccgtgatgcggagctggaagcacaggaactggccgccgcagcgacagctgagaatgttgtggaagtttctgaaaacacgcctgctgctgcagcagtagatgcgcagaatacggtagtgcctggtgtgaagatcaagaaaatcatcgtggcctgtgatgccggaatgggctccagtgcgatgggggcatccgtactccgtaaccgcctcaaaaaggcgcagattgaaggtgtcgaagtcaaaaatgcttccatcagtaatctgcctgacgacgtggatctcattattacgcacttcgacttaatgaagcgggcgaaatccaatgtcagcagaccgaatgtttctttcatgggtatccgtaactttgtggaagcaacacagtacgacgaaattattcaccaggtaaaagaaaacaacgcataa

SEQ ID NO: 239601 - DNA, 435 bp, Klebsiella pneumoniae; identical to SEQ ID NO: 112804

SEQ ID NO: 239602 - DNA, 1158 bp, Klebsiella pneumoniae
atgaaagctgtccattttggtgcaggtaacatcggtcgcggttttatcggtgatctgctgaataactcaggctatttcattacgttcctcgacgttaataagccgatgattgacgcgattaacaagaacggaagctattacttttactggatcgataaaggctattcaaaacgtgaagtcaccaacgtcgccggtatttacctggtagacgaacaggatgcagctattaaggccattgaagagtgcgatattctcaccacctccgtgtgggcagataacctgccgaaaatcgcagccgtggtggcgaaaggtctgaaacagcgtctggtttccggtcagccgaaaatcaacgtcctggcctgtgaaaacgccctgtttgcctccgatcgcctgcgtcgtgaagtggttaacaccggcatcattactgacgcagagctgcatcaggtcagtaactttgtgaacacctccgttgaccgtctggcgctgaccaacgttcgtaacggtgaaacctgtcttgatatcgattccaactgtgagctgatgatcgaaagcagcgctctggttgatccgaaaagccagcctatccagggtgcagactatgtggaaaccctgaagccgttcattgaacgcaaactgtatgtcgtgaactgcggacatgctgcagccggttacctcagctacctgaaaggctacccgtatgtacaggacggtttcgccgatgccgaaatcgttaagcaggtggaagatctgatgtgggaatcggcacaggtcatgatcaaagaatatggctttggtgaagatgagatgaagcactacatcaaaaagaccattgccatctggacttccggtaccgtgaaagatgatacccgtcgcgtttgccgctctccgattcgtaaggtgaacgacaccgaccgtctggtagccccagcgaaagcatactggaatttgttcggtgaagaacagctgtacccgaaagtgatcgctgccgcttatgccttcgtcaacgaagaagatgaacaggcggttgaattgcagcgagctattgcgcagaacggcattgaagctgcaatcgagaaatattcaaacatccctgccacagcgccgctggcaaaacagattgttaaaaatttcctgacttttaaagaactgcagaaataa

SEQ ID NO: 239603 - DNA, 636 bp, Klebsiella pneumoniae
atgaaacttcaattagcactggacgaaatgccgttatccgaagcgctgttattcctggacaaagtaaaagagtccgttgacatcgtagaagttggtaccccgtttattatccacgaaggtttgaaggcggttaccgaaattaaacgctgtttcccgcaactggaagtgctggccgacctgaaaatcatggatgccggttactacgaatctgaaatggcattcaaggcgggtgcggactacgccaccgttctgggcgttaccgatatcctgaccgtgaaaggttgtgtagatattgcaaacaaaatgggcaaaaaagtcgttgttgacatgatttgcgtaccaaacatgccagaacgtatccgccagctggaagaagtcaaagcccatattctgtctgttcacaccggtgctgaccaacaggccgcaggacgcgagcccatcgaagatctgcgtgtaatggttgagcacactcgtgaagctggaatttctgttgccggcggtatcaactctaagtcggtcgcaaaatatgtagctctgaatcccgacatcatcattgtaggctcaggcatcactcacaaccctgatcctgcaaaagaagctgctgctatcaaagcggcaatgcgtaagggagcttga

SEQ ID NO: 239604 - DNA, 558 bp, Klebsiella pneumoniae
atgcaggcgaaagaattacgtgaaattctgcaggagctgactggtctggctgaacacgttaatcaggctgacgtcgacaagctgattgctgaaattgaaggagcaaacaaactgtttctggcaggtgccggccgctcagggtttatgatccgcgcctttgcaaaccgtctgatgcacctcggttatgagacctatcttgttggcgaaaccatcacgccgccggcgaaagaaggtgacctgctgatcatcggttctggttcgggtgaaaccggtagcctggtctccatggcgcagaaagcggttgcccagaaagcgaagattgctctgatctccatctatgatgactcaagcattggcaagctggccagcgccgtcatcaaactgcctggctcgacccgtaaaagtggtgaagggaaggggatcccaactatccagcctctggggtcgtcgtttgaacagttactgttcctgacctgcgacagcatcgtgctcaccatcatgcgtcgcaaaggcatcgagtatgaagacatgtttgctcgtcatgccaatctggaataa

SEQ ID NO: 239605 - DNA, 705 bp, Klebsiella pneumoniae
atgctggatacctttgaatcacaaaccaccgaccagttaggtcatttcgcctggtgtgccctggtggcattgggcttggccagacaggaaggtaaagcaacaaatcaggtgagtgaacacgtttttatttcaaactggctgaacaaagcctggaaagataaacgttttcctaaaagtatcgcaccagaattaaccggattaataaaaagagcccgggcggaagggatagcagccaatctggaaaaagtgctgtatgccctctttaaaaaatgcaccagaagcattatcgagcagtcggaattgtttcgccttaattttgccattgatggctttaagcgttatggctggaacaccattctgaccacggcgcgagactggaaagtgctgacgaaatgcgacccatccatggtcgaaggaaacgcactgattattgacaataaatccctgtattcatccttcaatgattccggatatttattgaagccgctggaactcaaagtgtttggtgacaaggctttttttattaatttactcaaacggttttatctgccggttgtggcgacaggggatgattcagtttttctgctgacaccagaaagaacggaatatatccgtaacacaattatcaggtccaagttgagtgattttcactcggcgaaaattcattcgaacacgacgcttagtctgtcttctggtataaggtga

SEQ ID NO: 239606 - DNA, 1152 bp, Klebsiella pneumoniae
atgatcaacagaatgatcctcaacgaaacctcttactttggtaaaggtgccatccgttcaattgtggacgaaatcaaaaagcgtggttttactaaagcgctgattgtgacagataaagatctgattaaattcaatgtggcgaccaaaattaccgcgctactggaagaaaacggtctggcctatgcgatttatgatgaagtcgtaccaaatccgaccgtaaacgtggtgcacaaaggagtggaggctttcaaacaggccggtgcggattacctgattgccgtaggtggtggttcgccacaggatacctgtaaagcgattgggatgatgatggctaacccggaatataccgatgtccgcatgctggaaggtggtgcccccacccgtaatccatccattccgatcattgccattcctactacctccggcactgcagcggaagtgactatcaactatgtgatcaccgacgaagaaaaacgtcgtaaatttgtatgctttgacccgcacgatatcccggtgatcgccgtcattgacccggatatgatgtccagcatgccagcaggtttgaaagcggcaacaggtgtcgatgctctgactcacgctattgaaggttacattacccgcggtgcctgggaactgacagatatgttccatatcaaggccatcgaaattattggccgttccctgcgtgattcggttaaagggctcgcctccggtgtggaaggtatggcgctgggccagtacattgctggaatgggcttctcgaacgtgggtctcggtctggtgcatggtatggcacacccgctgggcgctttctacggcaccccacacggggtggctaacgcggtattactcccgcatatcatggcatttaacgctgaacataccggtgagaaatatcgcgatatcgccttcgctctgggtgttaaaaacgcttatgacctgacgctgccggatgcgcgtaacgccgcagtggatgcggtggtgaagctgaataaagacattggcatcccggaacgtctgcgtgatgtgggcatgaaggaagaagatgcagatgcactggccaaagccgcctttgccgatgtctgtaccccgggcaacccgagagactgtgacgaagcaaccgtgaaagcgctgtatttacagttgtactaa

SEQ ID NO: 239607 - DNA, 2670 bp, Klebsiella pneumoniae
atgcgaatagatgatgtttatgcgaaactgaaacagttagccggcgaaaatggagtaagcgccaaagaaatcgccgacgccatgaacattggtcgttcaaatgtcagccatgaactgaacaagctggtacagcagggaaaagcccggaaaaaaagtggaaaaccagttctgtttcagcctgtgatacaacaggttgtgctgaatgaatcccgcaaagatatccttggtacccaccttaagcttaaccccagcctgaagctggccatcgagcaggctcgcgcggccgttctgtatccgccagacggcatgaatatgttgatcctcggcgaaaccggtgtaggtaagtccctctttgccgagttaatcgtgtcgtatgcacagcacaacaacatcatccctgctgaagcagagctaatcatctttaactgtgcggactattcgaataacccacagttgcttatcgcccagttgttcggcacgcgaaagggggcctatacggggattgacgagaaccgaatcggcctgattgaaaaagcgaataatagcttcctgttcctcgatgaggtccatcgtttgccacatgaagggcaggaaatgctgtttacctttatggataagggagtctatcggcgtcttggagaggctgatgcccttcgtactgccaacgtcaaaatcattgcggcgacgacggaaacccctgaatcacaccttctccgtacgtttacccgccgttttcccataaccatccgtttgccggcattgagggaacggacactgcaggagcggattaaactggtccattcattcctgcagaccgaatcaaaatcgatacaatgcagcatcagcatctccggtaatgccctgcgggccttctacatctatgactgcccgaacaatatcggccagctgcgcgctgatttgcgttctgcctgtgccaaagcatacgtcgattacgtcactggtattcgcgaaatcatcaccatcaccagtgactatcttcctcagcacgtcagcgcctttctgctcaatgaaaccgaacaccgtaagctgtggaacgaactgttagggggcaaaaccaaattcaccgtttttcatcccagtggggatattgaaaacgaaaatatgttctttctggatgagcagcagaaagggacaacattgcagaaaatggagctcagtacactctttggtgccgggccggaaagctcctacctgcagagcctgtatgcgaccaaactcagtctgatcaagagtaaggacgatatcaaaaccattcaggattacgttaccggtacaatttctgaactcactgatgagatcatacagctcagccagaaacgactggagaaaacctttgacatcaatttccagtatgccctcagtatccatcttgagaaaaccctgaaccggctgaagtttgaccaattgatcactcatcctcgactgaatgacatcaggataaaacataaccgtgaatttaacgtggctctggattgcctgcgcattatcgagaaaaaggtggacatctccatgcctatcgatgaagcggcatttctgaccatgctcttcatccattatgaagatagtgaagtgctgcgcgcgaagcaggtgagggttatgctcattatgcacggggaaagtgcagcaacttctatggccgatacagtcaatgagttactggacgtggaatatgttaaagggtttaatctttcgctgaaagtccagccgcaaattatccttgaacagattattgcctatatcaaaacatgggaggtcaagtctgaccttttcctgttggtggatatggggtcactgtcgaattttggtgcagtgatcctgcgtgagtgtggggtcaggactaagaccatgcagttggtcagtaccatgcatgttattgaagccgttcagaaagcgatgctaggcctgccacttgaggaaatttataacgaagttctgggggtgaactatcttctggatcaatcctaccgagctaagagtgaatttaaccgacagacgaagaaactggctattgtaatggtctcttcctcagaagaggatctgccggaaaccctgaccagcttgtcaaaccgcctgacatacaaacccaatattctcgaaattattccgattatctcttccgacaaacaagatattgctcagcggctgaagtccacatcgtatgtgttcgatattgtttcggttattaccaatattccaatcccgagtcagtggcgtaccctgcgtctcgatgaaatattgtgggaagaaaacattaccactcttcaggcgattatcgacattgaaaccacctatgtcctgctggttgaaccccttaacgggttactaaaaaacatcagtgcttcccgggttgttactgaagtgcgtaaagccgtactgaaaatttcggaagcgcaggggcttaacctgacggctaacgctcatatcgggattgccatgcatctgtcctgtcttatcgataaaaagttgactgatggacctgcttctgctcctgtccgtcaaacccgcgccgggaatcaagcgttttccagggatccggtattgaaggttttctcaaaagagttgcacgcgctcgagacaaagtttcagatagaattcagtgatgatgaaatcgtatatctaaaatcgctttttgagcagaatagcttttaa

SEQ ID NO: 239608 - DNA, 126 bp, Klebsiella pneumoniae
atggactggcctacagcattcagcatcgtcggttgcgcgctcgccattgcctggctgttcggagttaacgacatgaatagtgaatttgagttgtggcgccactgtcgtgtcctgattgtagtgtga

SEQ ID NO: 239609 - DNA, 297 bp, Klebsiella pneumoniae
atgagtacagttcatagtttaaaaattggaccgatgttttttgcagatgttttatctggtcataaaaaagctgaattcagaatcaatgaccgtgattttaaatgtggtgatttcctgttattgcgtgaatgggagggcgaatacactggtaataaactccttgtaaaaatcactcacatcttaccaattgataacttgattagtggttgtggtaattgggtgatgttatctatcactacaatcagtactaccgacatattatcgataattgaagcaatggcaggaggtgagttatga

SEQ ID NO: 239610 - DNA, 768 bp, Klebsiella pneumoniae
atggcaaaagaaattctcgcggttccaggtatggtttcctctccattacacaagaggacatataaagccgttcaggacattgatgaaaaactcactaaactgatccataagtggcgttttttcaatgcagggccacctatgagggttagaacatatgacggttcagaaatctgttatcaaggtctacaattcaaaggttctcccgtgcaggtgttttggaatgggtttatagagccctacatcgaaaacaatgcaattaatgtactggaacagacctcagctttagcaattgaatgtcaatttccagtagaggaatccattgaagaggctagattattattgttagtaatgattcggaggatttatgacgaaatggccgagaccgatcgaatattaagaggtgatggattcacctttccagaaaagaaaaaagttgatagccatgttgaaagcatgtctcaaaaaataaccgagcatgctgaaattgaaaagatgaaaaaaccagcacccacacataccacctttaacattgacactgtaaatagtcgttacgcccaatttggaaccaataatagtattatcagccaagacttgattgatttcttccgaacaatatccacctcaggtgaagaagatattattattttctctaagatgctcttaaactctattttatcaaaaaatcttatgaaccctgagacacacaaggaattaatatctatcttaaatagtaagtgttataaccacacagcaaccaaaaggagctaa

SEQ ID NO: 239611 - DNA, 510 bp, Klebsiella pneumoniae
atggattttgatgctatggcatacccagaaaagtttacaattgcaggcgttgaatataaaggccgaaggaactcagctaaaaaagaagttacaatcccatatacggaagagccagacgttaacattggcgatgaaattacgcaaacactaggaaagggagtgatatgtttaaaagttattgatatgtcatttctccctggtggaagccttaatgtaggaactaaacaccctcatatgcttacattaaaggtagaaaatttaactgctaatgagcacaaacctaaaccatctagccaaaatacgtttaacattggaagtgtatctggctctcaagtgcaaataggtgagcagaaccatcttgttgttaatatcagcattactgaacttgttgaaaaggttgcccaatcacaggatcctaaagcaaaatcaatcctcaaagatttgttaaataatagtacagttgctagtattattggtgcaggaacttctgttcttcttgctcatctttga

SEQ ID NO: 239612 - DNA, 261 bp, Klebsiella pneumoniae
atgcctattacggtccatgacataaaagagcattatgatcaatttgggcttcacgatatgagctcaatgccaactgcccaatacagacaggttcttgctaatggtgctcttttttggatagatcatcatgattttgttcgtagcacactttctgaagaaatcttagcaacgaataaagagcaacttgatgccctaattgaacaccttaaagagtatagggataagatgtctccaccaccaaaatggatgagtgagaattaa

SEQ ID NO: 239613 - DNA, 255 bp, Klebsiella pneumoniae
atgtctaagccacaactgcgctatatcgctaatctaaaaaatcttgaggagcatgaacaggaattgcgtactgccgcgcttagtgctgcccaatcaaaaatcgtggcgactatgctggtgtgttatcccaatgcaatggaggacggtgaaattaccgcgattggccagttatttgagtctttggccactaacctcgatagctttttgaaagcagagtgcgagcgttttgaaagttgttcggaggttaagtcatga

SEQ ID NO: 239614 - DNA, 822 bp, Klebsiella pneumoniae
atgggtatttatcattacactgatttgcaaggattgaaaggtattattgaaaataattctatgtgggctaccaatattcatttcatgaatgataaaaatgaatatattcacgggcttaactgttttcgtaatacaattgaacatttgggtgataaggttttagatgcgagattaaaatatttattccagcaagcccttgtaaagcatgtagatattcatcaacaccctgataactttaaatctaaacatgtttattctatatcgttttgtagagaatgcgatcaacttagccagtggagaggatatggcaattctcaaggtgtttgtttagaatttgatgaacaatctttgattaacggtattgatagcgaaggattaagttttctacacaatgacgttatttatacaagtgagacaagtaccgtagatgttaatgaaaagatacaagacctatttaaaaacattaaaagctcatctactgatattgatgactcctttatgactttcattagggtgaattcattaattgaatcaaacattccattcttcaaaaatttgggcttttcagaggaaaaggagtttcgttttgtttttagtccattaattaaattacctaaggttaattttcgtgtgggggcttatggtctaattccttatatagaaatgaaaatgctgagggaagaaaagctcccagtaaaaagaataattattgggccttctaaagatcgagatttgcttaaaacgggtgtttatatttttcttgaaaataataattactcaaatattccaattgaattttcatctgttccatatcgaagctag

SEQ ID NO: 239615 - DNA, 219 bp, Klebsiella pneumoniae
atgtataagtttatgagtaaagcagagcttgagttgatacctaatttggagcgcgttattcgtgaagaagaatgtttttggatgaccagtatacccgcttctactcgtgcgtttatggaaaagcgaggtcagtttcccaaacgaattatactagggccaaagataattgcctggaggttattagaggtacaggaatggataaaaacaagacctcaatga

SEQ ID NO: 239616 - DNA, 1233 bp, Klebsiella pneumoniae; identical to SEQ ID NO: 216552

SEQ ID NO: 239617 - DNA, 291 bp, Klebsiella pneumoniae
atgttctttggtgtgttctccatgctgcaggtccatgctgccaacgtcatggagggcatatttaaaggcatggtggcttcaacagctcccgcttccgtaagaacggcatcacgtgtcggagctgttggggggagttactcataccgccagcctcaggtgaataccaacctcgtcaatgtcagtttcccgaaagccagcgtcgggtgtaacggcatcgatattttcctcggcagtttcagcatgatcaatggttttgatctcctccctgaaaacagtaccaggctaaactga

SEQ ID NO: 239618 - DNA, 861 bp, Klebsiella pneumoniae; identical to SEQ ID NO: 19455

SEQ ID NO: 239619 - DNA, 159 bp, Klebsiella pneumoniae
atgcgcatccaggtttcgccagcggtgaacggcgggggcattgttggcaggctgttctgggattttgatggtaagccgattaccttaccgcagggaaaagaatgctatccgcaggaagggtttgtggcgtggcaccggcgggaggtgttcagggggtga

SEQ ID NO: 239620 - DNA, 156 bp, Klebsiella pneumoniae
atgatgatctcatatcaggaacttgttcgcaccttccttaatatacttatcgcgatgcggatatttaaaaagagggaaaggtatgaaaccttatggcttgtcttattctgtaactggttgcacctgtggattatgtcgttccaggggataccgtaa

SEQ ID NO: 239621 - DNA, 2193 bp, Klebsiella pneumoniae
atggcctttactcccccgctcgggagcacctccccggaggtgttgctggataatgccacgcgcctcgataaactggtgaacggcccggaggccaccatcccggatcgcgccggagaaccattagactcatggcgacggcaacaaaagaaagttgacgataccctggttaatttccaggagaacggcggcgctatgggtttcagttctttgcaggaactgctggcctttacacctgataaagccaatgttctggctgtcgataccagtacaggagaacaatatttgtggaatggtaccgagtgggtaccttctgaataccaggtcaataagcagattaaatcgcttaacgaaatcgttgagaaaagccacagcacgaagttctttcatcggtggaaggacaggatcggaactattatcgccgggtggaaaaacgatgatgtgggcggtgtttattttctgtcacggctgctgaagttcggcccgaatggtttttttggcgcgggcatgcaactgtcagaaaatgagatatcgaataaaaccatcgcattcaaaaaggggctggacggtaaaaccagaatcttcgataaacgcggcgtgatgctggcctcgattgagaacggcaaactgcagatggcaaaaatgaatattgaaaccatgctgcagttagctgttaagtccgggaatacttctctaaccatcaaaaaagatggcaaggggatcagcgtttctgacaagcggggagtggtatgtttcaggattgatgaaaggggttacgttcacggtaattttgtgaataaaggcgggagcgccactccggttttgactgaggaacagattattcagcagcttgaaacttcagcctttgcaaagcagtcaaaccgcttcaataaaattttcagttgctctccaaagtcccgtaaaaaagtaaaagtcattcttgtttacgggcagtctttcgccgctggcgcgcaaagcaatgcagcgctcacgactacgccgctttatggaaatgtgatgttgggtcagtcgcctcgaggatcattcttctctaaccctccggcagggagtgaggtatacgggccggttggcggggagaataaattttatcctttgcatgaagtttgtcaggacgtggacggaaccattatcccgcaaagtggatatggcgaaacgatttgttcaacggtaggcaatgagttcaagcgcctgcacaacgaagcaatgggggtcgccaatgacgatgacatggttgtttgtgtcggtagttgcggtgtatccgggcggtcgatcgcgcaactacagaaaggagcatccccggagctttacaacagagttgaaacctttcttgcaggcgtcgcggaggcctgtgcagctgatggggtggagtttgaggttatcggggtcatttacctgcagggagaaaatgataattccgccagcaccacttactatgccgcccagtcacagactatgcggcagaaccttatcaattcctgtaaggcggcatccgggcagaccttcgagccaatttatttgattaaccagattggtaacacctatatcaacacaatgggcgtaccacaggcgcagaacagactgccggagcaggccgacaaaaccattctggttggttcgtatcagggactgcctaatcccggcgcacatctctgctcgaactcataccgcaagctgggttgcctcttcgcgcgggaactatggcgctattactctggtaatggtgatttcacttttcggatactgaaagctgttcaccgcgaggacaaagtttatttgtctctaacgccacgggtagcgccactgaagttttctgctgttcacgataaatggacagagacactccacgcagataaagggataacgctctcagatggtgccgggacattttccccggaagattttagcgttgaaatagtttctgaccgtgtgatccgcattaatgccagtcgtgccttaaccggagcagtgactgtttcgttgggggataaaagccataacgggactcataatattagcgactcgtcaaatgaagtcggtggacttaactgggtatacggaataaacggtcagtatactcaggaaaatataccttctctcgttaataaaccttacgcgctcaataattttgccgccattcaacaaattcagtcagaggaaataaaatatgtctcttga

SEQ ID NO: 239622 - DNA, 1305 bp, Klebsiella pneumoniae; identical to SEQ ID NO: 216700

SEQ ID NO: 239623 - DNA, 1173 bp, Klebsiella pneumoniae
atgaagggtatgcagaagatcaaaaggggtaagagcttcgctggtgttgttcgttatgcattgcagccaggagtacatcataaaagcgatccagtcgtaattgggggcaatatgctgggtggctccgctcttgaactgattgctgaatttgatggcaccaaacagcttcggccagatgcccagaaacctgtttggcacaactcgcttcgcttacctgatggtgaatcattatcgaatgaccaatgggcaatgatagctgacgactatatgaagaagctggggttcaatgagacccatctccgctgctatgttctacatgacgattctgccggccagcacatacatatcattgcaagcaggattgacatggccggtggtaagctttacttgggcaagaatgaaaacctcatcagcacccggatcattagtgaactcgaaatcactcacggtctgacagtgaccaagacagcaccatccatctcaaataaacaaccgaagcggaaacgaatctctcgcaacgaacaaatgctatcagaacggactggggttccctgcacgaagaaatctcttcaacggaccattgatagtagtttggctgataagcctgaccttttgacttttatcaagaggctggaacaagcagaagtatcctggaaggttaatgttgcctctaccggtaagatgaacggcttttcattcgaatatgcaggaatcgctttcaaagcttcgcaattaggtaaaagctactcttggtcaaatctcagtaatcggcttaactacaaccccgaccacatagaagctctgcgagcgacaaaggaagttatccctgcccctgctcctgctcctgctcctgctcctgctcctgctcctgctcctgctcctgcaacagttttgaaaaacactgagagaaaggaaagtatcagtgaaaaaattgctgaactcgaactacgactcaaagaagacagaagaaacgaaatcgtagaaaagattcttcaaaaaaactcagtacaacagcaaaagcatctcaggcttatcggctggattccatttctcagaaggctcgcagagcttctcagaagctatgggaagagcattcttcacaaaacccatatgaccttctcaaatatctccgcaatgaaacctttaaacaaggcgagaaaaattcgtttatag

SEQ ID NO: 239624 - DNA, 507 bp, Klebsiella pneumoniae
atgagcgtgagtttgacgctgcaggagcgattgaaacagcaacatctcgcagagagcgagactattcaaagcctgacgaagcagcagctgagcagtttgcgaagcgagttgaacggcatatttcagcaagagctgaataccatgctggaagatatgcgcaggcagctgcacgacacgacagaggatatgcgccagagccggcagagcatgttgctgaccgtcgtgaaaaaccgggtgatattcccggccctgagcgcggttacgatcttggcagttatctttctgagcggttggggcctgagtacgtttcaggaaagccagatcatggccaactggcagcagatcaacagccagaaagccacgctggcgacgctggagagcaaaacagcgggtctgaacatcgttcaggacaagaacgggacattcgtcgtgctgcccaaaggggcgaaagtggacgacagcggctggacagtcgggaagcagcaagccctgcggatagtgaggtaa

SEQ ID NO: 239625 - DNA, 234 bp, Klebsiella pneumoniae
atgacggaactggaaacgcacttattgaacgccttgaagcgtatggagcagcaattcagcgagcagctgaaagcttccgagaaggcgcaggccgccttgcagagcatgttcgagcgtactgcggaagacaacgccacgctgttgaagcaagtcagcttcttagacaatcgggtgacagtattgtcggagcagctgaagcagttcgggaacctctacaggcagaacaggcgctga

SEQ ID NO: 239626 - DNA, 327 bp, Klebsiella pneumoniae
atgaaccaagacgctttaaagatccttgctaaaaccctcacaggggagcaattcaaagtcttgatgatgctgttagctgatctcgattatgaaaattacatccaaattgcccaagctgatattgccgacgctttaggtatgcagaaaaccaatgtaagccgttcggttaaggcgcttattgacctatccgtgattcttcaaggcccaaaagtaggacgcagttacagttaccgtctgaaccctcagtttggctggaaaggtactgtggggaaccacaaaaaagcccttactaacgggttgagcgttattcagggcgggcgtagctga

SEQ ID NO: 239627 - DNA, 306 bp, Klebsiella pneumoniae
atggatattcagcagaacagtcagattgaagcaaataagtccaaaattctggaggcagcttacgcaggcaaaggtgagatagttactctggattacgaagatgacttcggtatcagccgcaaagaacctgtagggcaagtacgcattgctttggctgaattagtaaaaaacgggttagttattgaaaaaggctgcccggacgatgggatcaacgttttaattacagcactcggtatcagtacatatgagatgaaactcttcgacaatcttcctcctgaccatccatctcggggtaaattcttttaa

SEQ ID NO: 239628 - DNA, 300 bp, Klebsiella pneumoniae
atggaaaagcgcgataacatgctgcgggtcaggttttctgacgcggaatttgaggcgctgaagcagctggccgaagatgcaggctgtaccatgtccgagctggttcgcgatcacctcggcagggtcagcgtgcgcaacaaagacgtcgatcgggagcggattgccatgcttaaccgcatcaatgccaacctgaacatgattgcccgctgggttaatacgcataaatcggcggcttcctcggttgaggtcgttgctcacctgatggatatagagcgccatattcgggagctgtcgcaatga

SEQ ID NO: 239629 - DNA, 186 bp, Klebsiella pneumoniae
atgagtatactttttatacttctgtggatgatcctgatggaaccattgccggactggaaaaaacaccgacaggcaaactctttcgtgtggcccgtggtccgggtggaaagattgctttttcttattaccttaatgattctggtgtggcaaaaaaaatcgctgatacaacatcgcgcggcgcgttaa

SEQ ID NO: 239630 - DNA, 150 bp, Klebsiella pneumoniae; identical to SEQ ID NO: 235983

SEQ ID NO: 239631 - DNA, 414 bp, Klebsiella pneumoniae; identical to SEQ ID NO: 235974

SEQ ID NO: 239632 - DNA, 192 bp, Klebsiella pneumoniae
gtgcaggttgaagcgctggagatcgtggtcaccgcattattgcgccatatggagcatgatgcccagcaggcattgattcaggatatagaacaggcgattgaccaggtgacgccctgtccgccggtcaacgaccatgatgcgatgctgctgcagcaatatctaaagaagctgttgcggcatcctcgtagctag

SEQ ID NO: 239633 - DNA, 258 bp, Klebsiella pneumoniae
atgtttacgatagagaaagaagttgcagttaatcaggtgacggcggatggaattgcagtcggtaccactacactaaaagttagcctgacatacaccatcgagaggatcgaacttgaaggggagaacggtatcgctttttacacggttacatctgacgctgatgctgagggtgtaaggaattacatcccatttacctattcaggtgccggcgatccgttatctgaggcggagtcagcgttaaagctagtcattgaataa

SEQ ID NO: 239634 - DNA, 513 bp, Klebsiella pneumoniae
atgtgtttgcttcatttgttatgtggcaaatatcattgtcataaaaatattcttcgtttttatgccagaaaaaatatattcagcacaaatccttgggatgttcacatacactatcacaggttttattttaaacaagttctgggcgatgaaatgacaacctcaactgatataaaaagcactccttctttagctattgtggtaccttgctataatgaacaagaggcttttcctttctgtctcgaaaagctttcgaatgtactaaattcattgatagccagaaataaaattaacaacaatagttatcttttgtttgtcgatgatggtagtcgtgacaatacttgggcacaaattaaagatgcctcgaccgcttatcactatgtgcgaggaataaaattatcaagaaataaaggacatcaaattgccttaatggcagggttacgctcggtcgatacagacgtaaccattagcatcgatgcggatctacaagatgatgtaaattgcatcaaaaaatga

SEQ ID NO: 239635 - DNA, 1818 bp, Klebsiella pneumoniae
atgaaaaataaaaacatatatgttaaaattccttttcattatggagttcataaattcaaaatatttaaaggccatagatggggagctttagatcattttttacttcaagagattagcctccaaccctatcctatagaagagctatcattaaaatctaatcttccacaacggctcataattgaaataatattgccatttatgaaattgggttgggttgaattagttgaattgaattctaaatacaacttcaggattaccagcaaaggaaggagtgttgctaatcgtgaggaactcccttatgaaagagagccactggaatctactcggaagtttttaatagatccaatcacagcaaaatgttatcgagtaaatgcaagaaatcaaaactatcagatatatcctacatcaagagcaaatgaattacttaagaataaacactcgatatcaacagaactcaaaattaaaaaccccaaacattcaccgttcacatcagacattctaaattgtgttgaagatactgacgaagaggttatagggtatgaggaaagagctaatgatagaccttattatcaaaatagaacttttgctatagcacaagttgatgaagcagataacataacgggtgttccatctgatatctcaaaagaattagccgcagatattatcgctgcagctaatatgaagcgaagtgaaataaatactaatatagactctcttagcaagaactcaaaaataagcacttataataccgagtcttttgaaaatagatttgaagaacactatattaatgaaactgaattccgaataatatcaggttcagacagccatcgagatcatcttatcgcgatgatcgataaatctgttagtagaatcattatccattcaacttttatacacttaaaaaactttgaatcaatctttcagaaattaactgatgctgctaaacgcggagttcaagttgatatcttatggggccaagaagaacccgatgatgagagaagtatcggaagttataaccaatttcttgagggccttaagtcttatagagaagaaattataaagcttggattaacctccctttttacaatacattcagatccaacaggttctcatgcaaaggttatagtatgcgatacaatggaattcggatattgttcaaccatcggttcatgtaactggttagcaagtggatttaataggtatgaatgctctgttttcgtaacaaatgataccttgacgactgaagtattagatattttgagcataatttctaaaggaaaatctagagtatctaacaacttaagcaaatctatttcagccatttcatacgaattgaaaaaagcttgtgagcatttatcatcagaagattctgcgaacaaaaatgtaagaattaaaatcatcacaaaaaatgagcatcatgattttgttttagatgcaagagacaaagcaacaaaatcaatatttattgcgagtcatagaattagtaataatgcagaaagacctattttaactcccttgataacatcaatgacagccaatagcagtcttaatattaacatgtattactcatctcttagcggaggtatcaattcacagcaacttgatgacatgagtaactctttaagaaaaaatggaattactttagagaagaagaaagatcctatttctcatgcaaaaatattatcatgggataatgacaacattttgatcacgagtcttaattggctttcagcctcagcttacggaaacccatatgatgagcttggcatctttatagaaagaaaagatatattttctttaatttcgcctaattactga

SEQ ID NO: 239636 - DNA, 678 bp, Klebsiella pneumoniae
atgactgaagaaattagcaatagcaatagcaatagcaactatcccaataaagaaaaaaaatggaaaataatcatcaaaaatatttttttctttattgcatgtttaattgctctttcaattagcatattttatctaatcaagaacgtaaaacattatctaaaacctctaagcaccgatataatccctgattacattagcatcctccctattattgcaggcggtctttttatagcactatggtatatttaccgaggtaaatccgttaaatcattaaatgatgcaatattatttgcatcagcaagctatgctttatatttatttttattcgattatgaattttataaaagttttacagatttgcagtacattgcagaacacctctatcaaattggtataaaagttttaatacttatttcaactgttggtaaaactttaataacaatagtcgaatttataaatgacagacataaagaaaaccaggtaataaagcaaaagaaattgaatgctgaacccaaaaatgatggaccttcggcttctgttatgaataatacaccatcaaatactgcaataccagacttaataactcacaataacttttattacaaattagttctatttgtagcgattggaatgacaagtgcaccttgggtttttatttatttacgcgactatatttaa

SEQ ID NO: 239637 - DNA, 165 bp, Klebsiella pneumoniae; identical to SEQ ID NO: 150354

SEQ ID NO: 239638 - DNA, 438 bp, Klebsiella pneumoniae; identical to SEQ ID NO: 196512

SEQ ID NO: 239639 - DNA, 1275 bp, Klebsiella pneumoniae
atgaccagtttgcaacaacgtgccgagttacaccgccagatatgggcgattgccaatgatgtccgcggctccgtggatggatgggattttaagcaatacgtgttaggggcgctgttctatcgttttatcagtgaaaactttgccagttatatgaacgctggcgatgaaagcgttaactacgaaaagatggatgatagcgtcataccggatgactcgaaggatgatgctgtcagaaccaagggttactttatctaccccagtcagttgttcagtaacgtggcagcgaaagccaacaccaatgaccgcctgaacgctgacctgaacagtatctttgtggcgattgagagttcagcttatggttatccgtctgaacccgacattaaaggtctgtttgctgactttgataccaccagtaaccgactgggtaatacggttaaagacaagaacagccgtctggccgccgttctgaaaggcgtggaagggttaaagctcggtaactttgacaagcatcagattgacctgttcggggatgcttacgagttcctgatttccaactatgcggctaatgccggtaagtctggcggtgagttctttacgcctcagcatgtttctaaactgattgctcagcttgcgatgcacgggcagacctccgtcaataaaatttatgacccggcagcaggttcaggttcattactgcttcaggcaaagaaacactttgataaccacatcatcgaagacggctttttcgggcaggagattaaccatacgacctttaacctggctcgtatgaacatgttcctgcacaacatcaactacgacaagttcaatatcaagctgggtaacaccttactggctcctgagttcaaagatgacaagccgtttgatgctatcgtttctaacccgccttactctgtgaagtggattggcagcgatgaccccacgctgattaacgatgaccgttttgcaccggctggcgtcctggcaccgaaatccaaggctgattttgcttttgttctccatgcgcttaactacctgtcatccaaggggcgcgccgctattgtctgcttccccggcattttctatcgcggtggtgcagagcagaaaattcgtcagtatctggtagacaataactacgttgaaaccgtgatttcattagcgcctaacctgttcttcggcaccacgattgcggtgaatattctggtgctgtcaaagcataaggccgacaccaaagtacagtttattgatcctctcctcgtaatatggacacgcgcctaa

SEQ ID NO: 239640 - DNA, 3123 bp, Klebsiella pneumoniae
atgacacagcagaccagaaccatcgccgaatccaataacttcatcgtgctggataaatacgttacagaatgggaagccggtgaccgctaccagagtgagtcggagttagagcgcgagctgattcaggacttgcgtaatcagggctatgagtttgtgcctgatttaacctcccagtcggcgatgctggcgaatgtcagggtgcaacttcagacactgaatcaggtggtgtttaacgaaggcgaatggcgacgttttaccgagcagtatctggataatccgagcgatacgatagtcgataagacccgtaaaattcacaccgattacatctgtgactttaccttcgatgacggacgactggaaaacatctacctgattgacaagaaaaaccttgtccgtaacaaggtgcaggttatccagcagtttgagcaaaccggcagccatgccaatcgctatgatgtcacggtgctggttaacggcttacctctggtgcaaatcgaactgaaaaagcggggcgtggcgattcgggaagccttcaatcagatacaccgctacagcaaagagagctttaataccgagaactccctgttcaaatatttgcagctcttcgtgatttcaaacggaaccgatacccgttactttgccaataccacaaagcgggataaaaacagctttgatttcaccatgaactgggcacgatctgataacaccctgattaaagaccttaaagactttaccgccaccttcttccagaaacacaccttactcaatgttctgttcaactacaccgtgtttgatgtcagcaacaatctgctgattatgcgtccctaccagatagcagcgacagagcggattttgtggaaaatcaacggggcttatcaggcaaaaaaatggagctccagagaggggggcggtttcatctggcacaccacaggtagtggtaaaaccttaaccagctttaaagccgcaaggctggcaactgaactggatttcattgataaagtcttctttgtggttgaccgtaaagaccttgattaccagaccatgaaggagtaccagcgtttctcgcctgacagcgtcaacggctctgacagcaccgctggactgaagcgtaatctggagaaagatgacaacaaaatcattgtcaccactatccagaagctgaacaacctgatgaaaggtgaagcagatttaccggtctatcagcaacaggtggtctttatcttcgatgagtgtcaccgcagtcagttcggtgaagcccagaagaacctgaaaaagaaattcaaacgtttctatcagtttggctttaccggtacgccgatatttgtcggtaaaaatgccttaggggatgaagacaccgccagcgtattcggggcagaactacactcttacatcatcaccgatgctattcgtgatgaaaaggtgctcaagtttaaagtcgattacaacgacgttcgcccgcagttcaaagagctggaaacggaaacagacgaaaagaaactcagcgccgccgagaataaacacgctttgctgcatccgatgcggattagcgaagtcacgcattacatcctgaagaatttccgtcaaaaaacacaccgggctttctccggtgcaacaggcttcaatgccatgtttgccgtcagcagtgtggatgcagccaaagcctactatgaagcgttcaggatcatacagcagtcggctgttgaacaggataagaactacaagcctctgaaggtggcgaccatcttctcctttgccgccaatgaagagcaggacgcggtcggtgatatcaatgatgaagggtttgatgtcacggcgatgaacagcagtgcgcgggagtttctggaatcggctatcggtgactacaatgccatgtttaaggttaaccatagtactgatggcaacaacttccagaactactatcgtgacctctctgagcgcgtcaaaaagcaggaagtagacctgctgattgtggtcgggatgttcctgaccggatttgatgccccgacactcaataccctgtttgtggacaagaacctgcgctaccacggcctgatgcaggcattctcccgcactaaccggatttataacgccaccaaaaccttcgggaatattgtcaccttccgtgatttagaacaggccacagtggatgccattaccctgttcgggaagagcaatacccgaagcgtggtgatggaaaaaagttatgacgagtacatggaaggcttcacggacacgcttaccggagaggcgcgacgtggcttcacagatatcgtgagcgagctggagacgcgtttcccgaaacccgcagacattgagtccgaaaaagagaaaaaagccttcgttaagctgttcggggaatatcttcgggtagagaacatactgcaaaactacgatgagtttaccacgctgaaagcgctgcaaactgttgacctcagtgacccggtagccgtggaggcgtttaaagccgggcactatctggatgatgaggctttcgctgtgctccagactgtacgcttacccgctgagcgtaaaattcaggactatcgctccagctacaacgatatccgtgagtggcagcgccgtgagcgtgatgcaaacaccaaagacaaaaacaccgttgactgggatgatgtggtctttgaggtggatttgctgaagtctcaggagattaacctcgattacattctggggctgatttacgagcatcatcaaaagagtacggataaagagaccctgaaagaggaagttaaacgcttaatccgcgccagtctggggaaccgtgcgaaagaggggctgatggttgattttatcgagcagaccagtctcgatgacataccggataaagagggcgtcattgaagctttctatacctttgcacaacaggctcagcagcgcgaggccgacgccttaatcaaagaagagagcctgaatgaggaggctgcccggcgctacatcagaaactctctcaagcgtgaatacgccacggaaaacggcacggcactgaatgagaccctgcctaaactcagtccgctaaacccgcaatacaaaaccaagaaaaaaacggtttttcagaaggtgtccgcctttatcgataagttcaaaggtgtcggtggaagcgtctga

SEQ ID NO: 239641 - DNA, 1227 bp, Klebsiella pneumoniae
atgagcgagctgagttatctggaaaaactgctggatggggctgaggttgaatgggttacattaggtgatgtgttcgacatatttgcgggaggtgacgtgccaaaagactcattttctgatgtccaaactgctgaatacagcattcctatattatcgaatggaattggtactaaatctctatatggttggacagatacggcaaaaattcactcgccaagtctaaccatatccgcaagaggaacgattggatggaccagttatagagaaactccatttttccctataatccgcttgttagttctaacgccaagaacccaattgaatttgaagtatgcttatcatttcatgaaaatgattgaaggtgattataaagtacctaaaacgggaatacctcaactaacaaagccaatgttaaaggatattacaatccccattccttgccccaacagtcctgaaaaatccctcgccatccagtcagaaatcgtcaggattctggataaatttaccgcccttaccgctgagcttaccgctgagcttaccgctgagcttaccgctcgcaaaaaacagtacaactactatcgtgaccagttgctgagttttaaggagggtgaagtagagtggaaggcgttaggcgaattagcagatatatgtgatggcacacatcaaacgccaaagtatacagaatctggcattccttttgttagtgtgcagaatataaaaaacatatacggaacagataagtttatatcagcagatgattttgcaaaatataaaatgaaaccctgcaaacatgatattttcatgacgagaattggtgatattgggacttgcgccattgttgataatgacgagcctttggcatactacgtaactctagctttaattcgagccaatcgcttcgcggtacttccaaagttcatttttcattttatcgaaagtggttttggtaaggcggagttgtacaaaagaacacttacaactgccgtcccaattaaaattaatttaggtgacattagtaaagtaacaatccccatcccttgtcccaacaacccggaaaagtccctcgccatacagtctgaaatcgtcaggattttggataaatttgactcactgacgaactcaatcaacgaaggcttaccacgtgaaatcgagcttcgccagaagcaatacgaatactaccgggacttgctgttcagttttccaaagcctgaagccgtaacaaactga

SEQ ID NO: 239642 - DNA, 585 bp, Klebsiella pneumoniae
atgagcaaggtaaaccacagcatcgccgcaaagccaattaataaagaaatgattgaaacctaccttcattttgacggtttggatttttactggaaggaaagaccgcttcacatgttcaaaagtgaggcatcttgcatttcatggaataaacgatttgctggcaaaaaggcaagccacacatcctgtaaaggctatcaggaaatacgcttgcttgggtcagtatataaagcgcatcgctttgtctggtgcatgcataacggcgacatacccaaggaaatgtctattgatcatatcaaccatgaccgatctgacaaccgtatagaaaacctccgtttagtcactcaggctgaaaataagagaaacgcaacagtcagaaaagacaactcttcgcatgcagtgggagttcatttcagaagggacattcggaagtggaccgcatacatcttcgatggggaaaagaaaaagcatttaggcacctttctagaaaggaaagacgcagagtcagcgaggcttaatgcagaaaaacaacttgggtttcatcccaatcatgggaaagctaaatgcgaggctcattatgacaactga

SEQ ID NO: 239643 - DNA, 126 bp, Klebsiella pneumoniae
atgagctataaggaaagagagttaacggttgagtttactctggccaatggcacctttgacggtaaaaaaggtaacacgctcatagcagaagggttcaagtgcgaggtgatgctgccaacttactga

SEQ ID NO: 239644 - DNA, 210 bp, Klebsiella pneumoniae
atgcttcagagagtgaaagaacttgaaaacaaagtcgcaacccttgtaaccgatgttgcaatcatcaaagacaagctagcttccaaggaagatattcagtcagtaaaaacagagctacataaggagttgaatgctcaaacatggaaaatcattacagctatagtgataaccgtgttactagctgttttttctaaatatttaattaaataa

SEQ ID NO: 239645 - DNA, 321 bp, Klebsiella pneumoniae
atggagaatgcaatagcccgaaacttagagccgccaatcctcaacccaattgagatagagggccttttgttaaaccgccttttgtccattagccagaagacttttgcagaaatgcgaggggtaagcgaatcaacgattagtcgccgtaagagtgaagggtactacgccgagatggcgaaagagatagcagcattgggcctgcaggttgttccgccagaggcggtagtagtttcccgtcactacctgcagtcagtagaaacgttggcggatatcggtttgcgtgcggagcggtgccgacctgggccgttagggtgggactga

SEQ ID NO: 239646 - DNA, 195 bp, Klebsiella pneumoniae
atgacggcatacggaacggagtttttctcaatgagagatgtaaaccgactcaggatccttcaggatgtcatcgaccgcaacctgcgtcctggtctggcagccgaaatgctcggtatcacgccgcgccattgcagccgtctgctgaaacgttatcgtcagtccgggccactgggcatgaatggctttgttgaataa

SEQ ID NO: 239647 - DNA, 357 bp, Klebsiella pneumoniae
atgagcaaattccctagccaagaaatggacaggtttaatgtaaggttgcctgttggcatgcgcgatgccatagccgatcgcgccaagcggaacggcaggtctatgaactctgagattgtccagatccttcaagatgcgctggagacagaaaagctgatagctgaaaccgacattgtcgattttgactcaacccaggcggctctggattcaaaatccacgccagaggaaaaggctgcgtttcttgccgaacttgagaaaagagatccctttaccgctgctattcttcgtgagggagaggaacataacagaaggcttgctgcaatcctcgggaagcgcatgggttactcaaatgagtaa

SEQ ID NO: 239648 - DNA, 1077 bp, Klebsiella pneumoniae
atggcggtgaccgttgagacgggcgggaagctggcggcgcagtcagaccgccgcgtaaacgttgtggccacgcggtcctatgactcaggaacggccagaaccatttcgggggcgctgctgcatgtcgggagctcgctggggctggagatggacgtcgataccatcaacgcactagagtccgcgtactggacgccacggggcgaaaatttcgatttcgccaccggcgacagtatctcggcgctggaaatgctgcagatgatagccagtgccgggaaatcccgcttcctgttaagcgatggccttgcgacggtcaaccgcgaggggattaagccctggacggggatcataacgccgcatgagatggtggaggagctgcagagcggatttaccgtgccgtccgacgatgattttgatggtgtcgacgtgacgtacatcaacggcgtcacctgggcggaggagactgttaaatgtcggacacccgataatcccacaccggtgaaaatcgagaactacaaactcgatggggtgctcaatcaggatcacgcctaccagatcggcatgcgtcgcctgatgaagtatcttcagcagcgggttacataccagaccaccaccgagctggatgcgctctgctacaacacgggcgatcggattgtactgacagacgatatacctgggaacaacacgatttcctgtctggtggaggcgatgacaacggctggtggcgtgacaaccttcaccgttacggagctgcttgactggtctttcgaaaacccccgtgcgctgatccgctatcaggatggctctgcatccggtctgatggtggcgagcagagtgggggattatcagttgtccgttccccatctgagtgattttgatgacccattgaagattgaccagacttcaccagccattgagccagtccgcctggtgttctgcggctcaacgcgtcatgtctatgacgccattgttgaggagattgcccctcaatcagacgggacgtgtcaggttaccgccaaagagtaccgcgcgtccttctacgactacgacaacgccagttatcccggcgacattgcataa

SEQ ID NO: 239649 - DNA, 2181 bp, Klebsiella pneumoniae; identical to SEQ ID NO: 235642

SEQ ID NO: 239650 - DNA, 123 bp, Klebsiella pneumoniae
atgctgggcatcaaccgtttccggcgtgacattcagacgcagggcaacaaaggacaggcccagctgctcaatataagaggcgtcagcctggttctgagacaccgcaaagggtgcacggaataa

SEQ ID NO: 239651 - DNA, 306 bp, Klebsiella pneumoniae; identical to SEQ ID NO: 215836

SEQ ID NO: 239652 - DNA, 498 bp, Klebsiella pneumoniae
atgaacagtcttttaacgctggcgaaggacttagagcagaaatcgaaagcgcagcagcagactaccggagagatgctgaaagccgcattcagcgagcacgagaagtctgtcagggcggaactgagcgaaagcgagaagagaatcagcgccgccatcctcgaccacgaccggaagctgtcctcagccatgagccagcgcacgaaagggatgctgcgcatggtcagccagacgtggctgaccatcgtcctggtgtccgtgctgctgatcgcctcgagcgcgggcattctgtggtggcaggggcagcagatgctcgacaattacacgagcatccgggagcagaaggacgcgctggagaagctgaacgcgagaacgtttggcgtgagtttccagagcgacagcaacgggcagtttctggtactgccgaaaggcatgaaagcagaaacgggctggacggtggagaacgggaagcggaacgccgtgaaactggtacgggagtag

SEQ ID NO: 239653 - DNA, 201 bp, Klebsiella pneumoniae
atgattagtgtcatcgtcagtgaaagtgtcatccagtgtattctggatttctacgcaaagaacaacgaagcagattaccagatggcgaaagcttgccaggatagtcatgagaaagacatgactgctatgcagcgcaacgttgttgaggaagccgaggcacgatgccttgcatcgatgaacgatccactacgatttctatag

SEQ ID NO: 239654 - DNA, 288 bp, Klebsiella pneumoniae
atggacgccgggcgttacgtttcgccgaaaggttacaatatgcagcaagcgttattacgcgacttttgcggcaagacacaggacgcgcgtaattgtatgaacctgttcgcagcagtggcttttaatgccacctatgctagggatgccgcggagtgttggaaggacgaagccaaagcgaatacacaggaatgcaaagacgctctagcgtataaccaacttattatgagtgactataaatccgccactgatgatatgaaacaccaacaagatagggctaacggatattag

SEQ ID NO: 239655 - DNA, 429 bp, Klebsiella pneumoniae; identical to SEQ ID NO: 196508

SEQ ID NO: 239656 - DNA, 666 bp, Klebsiella pneumoniae
atgataagaacagaatggttagagttagagccagaggttttaccactttctacacatagggggatgcttgaccagactcttttatttgaagctacaagcgttgatgaagtgaactggttgattaaaaatggtgttgatatcaaccaccgaaatttcgttggtaaaaccgcactgtggaaatcgggttattatgattatgaaattgaaataatagatcgattgtttgaagcaggtattaatccagatcttttaaattttgaaggtgagcatgttttatcgggaatgggttattttggacatcctgaaatatttatgaagcacaggggcaaaataaagtctactgacattcatatcagggatatacatttatcccacattgataaaatgaaacgaggtattgaaatacttctgggaaatggctttcaggtgcattatccccgctatatgaatattgaggacattactctctgggatgaagagcaggcatggtatcgaacagagcaagagaatattaacatgaaaatatactatatgaaaaaacgaaatgattacatcaaatttttagagtatctggacaaacaaaaaagagctataagattagttagtgtcagagcgaatagcaaggacattactctctttgatattaaggaaatgaggctttgttga

SEQ ID NO: 239657 - DNA, 1155 bp, Klebsiella pneumoniae
atgaaaactcaattagatgttggtattatatgtgattggttagtaacatatgcaggatcagaaaaagttgttgctgagtttattaaactttatcctacggctgagctttactctgtagttgattttttgtctgatgaaaatcgtgcacatttcaacaataaaaaagctaaaacaacatttattcaaaagttacctaaagcgcaaaaaaaatataaaaattatcttcctttaatgcctcttgcaattgaacaattagatgtatcaaaacatgatattatactctcgagcagccatgctgtatcaaaaggagttttaacagggcccgatcagcttcatattagttatgttcattctcctattcgttatgcatgggatttgcagcatcaatatcttaaagaagctggcttggataatggctttaaaggtatgatggctaaatggttacttcataagatgagattatgggactatcgcacatctaacggagtagatcattttattgctaattctcattttatagcaagacgtataaaaaaggtttatggaagggatgctgatgttatttatcctcctgtagatgttgagcgttttaatttatgcgaagctaaagataattattatttaactgcttcacgaatggtgccctataaacgtatagatttaattgttgaggcattttctcatatgccggataaaaagcttatagtcattggcgatggtccagaaatgaagaagattaaatcaagggcaaccaaaaatattgaaatacttgggtatcaatcagatcaaatcatgcaggattatatgcaaaaagcgaaggcttttgtttttgcagcagaggaagattttgggataacaccagtggaggcacaagcatgtggaactccggttatcgcttttggcaaagggggggcattggaaaccatagtatctttaaataatcagaaaccgacaggggtattctttaaagagcaaaaacttaaagacataattgatgcagtcaatatttttgaggctaatgagcaagcatttgattataacatttgtcgagataacgccttgaggttttcagtccaaagattcaatgaagagatagagagttacattacaaaaaaatatttagactttgtgagtaaaaaaaaatataacttttaa

SEQ ID NO: 239658 - DNA, 198 bp, Klebsiella pneumoniae
atggttccaaattatggcgggcttaaggaaatggcttctcttactaactcttttttcatgtttgattatacaagcggcaatgtcgataaatatattcatgcggcaatacatgaagttggcaagaattacatcaaagatccctatgagtttacatttgataattataaggccaaaattttaagtatctatactgaatag

SEQ ID NO: 239659 - DNA, 507 bp, Klebsiella pneumoniae
atgcctgactggaaaaatgtggtgctgagcaacgggcctgaaggccgtctggtctcgagctttattccgaaaattaaccatacgttgtccctcggggcagagcatatccacgtcgtagacgaagagacattcattattgatttcggtgccatcgtcaccggatttatcgatttatccattaccgcgtctgagaatcaacgtgtggaactgctctatagcgaagacgttgatgaaaactacgaactaaacactgactccacccttgcgggatttgtcggcaaacaggttactgaaggtgtgattattgacggcggaattggagcaccggcgagggcggaacagaaggatgcctttgaatgccgcagtgggaagaatcattttatcaatgcctttacctgtcattcgtttcgctatgtgcagttaagcggtattaatattgaacaattaaacaacgttcaggcgctttcagtacatactgtactaaggaaggtgcgaacaagttcctga

SEQ ID NO: 239660 - DNA, 240 bp, Klebsiella pneumoniae
atgacggcgcagcgggacgggaaagagcgactggaccagttgccgcgccaggcgttcacctgcgggcccttgaggttaacggtttttggcgagatgcggactggctcttttgtcgagatggcaaatggcgtccagttgaacccggcacattcccgctggttgatggggctgccgcacgcctgggacgagtcgagcccggggtggcaagagtggcaagcagcaaccgcgtcggccgcctga

SEQ ID NO: 239661 - DNA, 225 bp, Klebsiella pneumoniae
gtgagtcatgagcttacagatagccagatacttgcagacctcattggtaccctgcagcgctatggctacaacgtcgatcggaagtctctttcgccagtcttgctaattgtgcttcaggatttaaaggctcgccagcaggttgcagaaacgatgattcgttatcttgaatcgccacatttgctggctatcgacactgcgccgaaccgggtagttggcgatgcctaa

SEQ ID NO: 239662 - DNA, 234 bp, Klebsiella pneumoniae
atggaaaataaaccagagtggcagcagcaggctgagaaacttgctgagctgtacggaacaagcttcgtgatattcaggaatggaaaggagcctgagtgcgtcgatcccacaaaagtggtgctttcatttgatggcgaaagcaataggcgctttgacgaggcaagagaagccatgcggcaggagcacaaggagatggggccccgactgaacaagcatcgctttataccgaaatga

SEQ ID NO: 239663 - DNA, 264 bp, Klebsiella pneumoniae
ttgacaacatcatcctggaacattgcagccaaatcgaaagaagaacaggataaggtaaacgttgacctcgcagcgtcaggcgtcgcctacaaagagcgccttaacatgccggtgatagcggagcaggtagccagagagcagcctgaacacctgcgcgagtatttcatggagcgcgtccgctactaccgcgagcagagcattcagttacccaaggcatccgatccacgctatctggaaatggctgagcagaacgccaagaaatag

SEQ ID NO: 239664 - DNA, 1113 bp, Klebsiella pneumoniae
ttgaataattcagctataccgtcacgtcttacggttgtcttttctgtgggcggcgataaaaacacgatcccggtcaattccacttctgaaacgctggctaatggcctggcggcgatggattccggatttccccctctgactcggaaagcactttctgccggcggtaagccgccaagaggggaggattttaatggtatctacaacgatatctacactcgcctgcagtggggtagcgcgggaatgggatttccattcagcgcagattttagcgaggctattgcgggctatccaaaaggtgcgcttattccgaactctgattatacgggccaatggttaaatcttaacaatggcaaccgctcctcccccgaatccacttcgggcgctaataccgggtgggttcctgtggggggatatggaatttctactatttcgtctctgtcaaattccagtgttacgctatcttcggcgcaggcatcaaaggaccgcctgattcttaccggttcgctgacagggaatatcaatatgattttccccgcttggatgaagtcatggactgttgaaaaccgctgctctggaaatttctctgtcacatgcaaaacagcatccggaagcggcattgccgttccagccggtcgagttgaaaaactgtattgtgatggcgtgagtatcctgcgcgatttcggcacggcagcaatgaggaatattggcaccgcgacgtcgcgagatgttcctgacatgagtaatttcccacgagatgataatcctgagtctggctatttttacctgccaaatggacacctatcgcagtacggaactgtcaatttacccgcagtaggcacatttaacccggcgtcgttcggtggtgttacttattacaccaggtactacattgtcgatttccctgtggcatacccaaatgcgcagatatcaaccgtcgttagcctggccggtaagccttttgactcacagtcaaatgagttcggttcatgggcaaacagcaaccgaaccttaaattcagggcagccagtttccaaaaatcagtttgttgtatccgtcacttcaaacaacccgaatcttgtccctgttatccactacaaatcagaaggctactaa

SEQ ID NO: 239665 - DNA, 1062 bp, Klebsiella pneumoniae
atgttgattttttatgcgttaacactcattattgctattattcacaaactcactcaaaaaaaatgcattatgaacttccccatgttaatgagaaatactgaaaataacaaatatagcttagatacgttaaagttttttcttagtataatggttgtattcatacactcaaggatttttcttgattcaagtgtttttttggatactttcacttcaaatggtatatttaggattgcagtaccaatattctttgtaataaatggatattacctccctattgataaaaataaattcaagtcatggctttatagttcaattatattgtatttgtctctaactattttttattgttatttttgggttgacagaagttcaatacaggcaataattgaatccataatattaaagacaacaacaggttttttgcacctgtggtacatacaagcaatgattatagccgggataatcatatacactattggcaaatataagtacatactacaattatcaattgtgctatttatacttggttggtgcttgcaattatatcattcctatcagtatgtctacgaccagacaacatcatataactatcaaatttatcggaatgcacttacaattgcgctacctttcatgattataggaaaatcattgagaaatgtgcagttctctacctttaaaaaacattcgttattcatctttggtctggtctccttttcatttgaaatctatttaaattattactacttctcatcccggcaaataaacaacataacattaacatttgatgtttacctttcactgatatttatttgccctttcattttcgtgtgcgccatgaatctcaattatggtgtaaatataaacagaaaaataccaaattatatatacttcattcatccgctacctatgttgatatttaatcgatttatgcctgacagtgacaggatcctagtgtcatttatgattgcaatcgtatcaatattgatatcttatgcttttttaaagttaagccctagaataaataacatagtaaaattcaaaactaaaacttcagtatcttaa

SEQ ID NO: 239666 - DNA, 213 bp, Klebsiella pneumoniae
atgtccaagggcgatggcgccgccgttgacgttgaccttctcgctatcccactcaagcagctgaccgacggccagcgcctggacggcaaaagcctcgttggcttagataaggtccacctcgtccagcgtccagccggcgcgatgcagcgcctggcggcaggcgctcaccgggccgatgcccatcaccgatgggtcgaccccggcgaccgctga

SEQ ID NO: 239667 - DNA, 513 bp, Klebsiella pneumoniae
atgcatcttgtgcaagcaacgctccgatgtgcgggaatacaaccggagcgtctaacctcaccaacaatcaaggagttgattatggctgatttgcattctaccccagatatcaccgttagcggaaccgagcgtcggttgctggttggctatcgacccaatggccgggatatcagtacaccaagtcttcccctttctggcaagtggctacgcgaagcgggattcggtaccgggaagccggtcacggttaaggtgatggatggctgcattttgctgctgccactcagcgataaaagaagagaagctaacagccaaattacggtatattcaacaatcgctgaaaagcgtcaacggcacgctgcaacatacccgatagcgcgagcagggaaatttcctggattgcatctgccgcctgatccgggcgataaaacggctaacgcctccccttcctccatcctgtctgacacttccatattttcacattccggattgccgcccgcaaacgcgccagattaa

SEQ ID NO: 239668 - DNA, 375 bp, Klebsiella pneumoniae
atgtttaaagacaatgatttaaataagctttatgtcaaattaagcagggaaacatcggaagataaacttgtatggaaaattgtactttcaaaagctatttccacgcttactgaggcgaacgaggatcgtatcggcgcggtttatacttgcgattacaaagggaaaaagcttgttatctacctgcgaaaatataaacatttctttgatgatgtggagtgggcatggatcgaagaaccccaacttgcgatagttactgataattatgaagttctttggaaaagcaggtattgcgactccactttaataaatttatatgagattgtttcacgacaaggttcgggtttcaatgatttaattgatgacctaatcccataa

SEQ ID NO: 239669 - DNA, 471 bp, Klebsiella pneumoniae
atgggtttccatatatcacaatcaattacggatgcggcaaccattttaaccatcataagttttttcatgacattatgggttatcagaacgactaatttcttgaaaaaaaaattcaaaaacaaaggcaggctccctgaaattaagactgaaatatctcaaactaccaataaaatatttagcatattaacaagccgcgaacttgataataactggattgagtttaatcgaaggttttctatggaggttaagacttgctatccagtaattgataatttgctaagtaaagttgaaagcgaccaaaaaaatgcggttataaacattttagatttgattgctccaaaaacttgcttcttcggaagacgaaaagtaatagaaattagcaataaagataaagcgtgggatatataccaagatttatcttcattaacagtacatttagatcaaataatgaaagacatgaggtgggactaa

SEQ ID NO: 239670 - DNA, 858 bp, Klebsiella pneumoniae
gtgatttgggtagtatatatatcagataagcctcactcgaaaattaattttccgattggtatgaatcaaggagtttggggagtaaaggagacaaagaaaggtactattcagaatataaagaaagatgatctaattgccttcgtttattcaatttcttggctaaaatctgagggggcatctcctcccggcttctcccgcgtgggcaaagaacacctgcaaaatttccgtggtttggtgcaaaagattattatcggtcaagtaacaagaggctattataccgcctctacgaaagtttggcctgatgatgagatttatccccatcgcttcgacttcaaaattgttcaagattatggtgaagatatctactttggtacagagttcttcaatgaggcattcgttgaggctgtgcgttattctgcctgtacacagggttcgattactcaggccatctcgatagagcagcttacagagattagctgcaatgtggatgagcaagctgatgaagagtcatctgctgtagtgtctagtttagaaggtaagcccataacgagattacaccagtcccgggagagagatcccaaaatcattaagcaaaagaaagaacagacacttaacgcaacaggtaaacttcagtgcgaaatctgttcaatggattttgaggaaacatacggtaaactcggccgcggttttgcagaatgccatcacaaaaaccccctaagtcttcgagataaaaatgaagaaacagccctttgtgatctggcaattgtctgttcaaattgtcacaggatgcttcatagaaaacgtccatggctaactcttgatgacctgagggaaatttatgaaaaccaaaagtcttga

SEQ ID NO: 239671 - DNA, 354 bp, Klebsiella pneumoniae
atgaaaaccaaaagtcttgaagacctacagaaggaattggctgactttgccaaggttagggattgggataaattccattcaccaaagaatctctcaattgcattgtctgttgaagctagcgaattaattgaaatattccaatggctcactgaggaagagagtaagaatctcaactctaagcagttaacagaagctgaacaagaagtggctgatattcttttatatctcttacagattacagataaattaaatatcaacatcctcgacgcagcttataaaaagctcgaagctaacgataaaaaatatccaattgaagcctgctttggttcagcgaagaagtacactgagttgtag

SEQ ID NO: 239672 - DNA, 231 bp, Klebsiella pneumoniae
atgcagcagttttcaaaatttgaggttttgtctctgtctgctaagatctgcgatcgttgcgggcgtcgggctgaactggcgacctccgaatttcaggagtttctgtctgtagaccgcgttgcaggttatggatcggtttttggtgacggagagtgtctgaggctggatttgtgtcagcattgtacaaaaacacttttgggggcgtggattcaatcaggcaaaattgcctga

SEQ ID NO: 239673 - DNA, 219 bp, Klebsiella pneumoniae
atgagaaaacttttttcactgtccgttctgtctaccgccattctggccccggccgccagttttgccgccgagggggatctcgatctctccagtctgacggattcattctctgtcgcgccagtgattacgggggtgttggcgattgcaggggttcttctaactctgtatgccgccatgcgcggtgccaaaatcgttgtggcgctggttcgtggcggctaa

SEQ ID NO: 239674 - DNA, 129 bp, Klebsiella pneumoniae
atggctcggagtgtttcgatgaatgaaattacttttgttcttctgctgtttgtattggtgatggcatttacattgattctcgtgtggtcaggagtcgatctcggagatgtgagtgtctgtaaggggtga

SEQ ID NO: 239675 - DNA, 309 bp, Klebsiella pneumoniae
atgacgattttaattcgtggaaaatttctcggtgcccgtaatcgcgaatacactaattcgcagggcagtttctcgttctatgagatcggggttgaaaattcccgccctgatggctggggcggctcacagtcagttcagacagtcattcaggtaccaaaaaagctcgttgattctgggattctaaatcgggttgcctcattacagggaaaaaacgtggagatcccgatctgggctgatgcctatgtcggaaaaaacggcgcggcgataaaatattttttggagagcgatcaaatcgtagaaattaaatag

SEQ ID NO: 239676 - DNA, 222 bp, Klebsiella pneumoniae
atgtacgcatatgacgccgacgacccccgtatgagtaatacgggggtagtaccagacgatgactttgccgcattttctgccgaactggtaattgagggttttgataattccggatttcatctgcgcatcggggattcatattattgtgcaaaaaattcagatgatctgatcgctgtttgtatcgatttttttggtggtggtaataatgactattatcgttga

SEQ ID NO: 239677 - DNA, 762 bp, Klebsiella pneumoniae
atggcggtattaaaacagcaggatgtgatttttccggaggggccacgctatgcttatatcgaagatttcgagctttttgatattatggcgcaatcacccgttaaggataatcttgcgggggcgtactttatcggttcgcgaaacgttgacccgctttataactttgcaaatcctgaactcccgttgttgcaggtaggaaaaccgactttctcgcgtctttatgcagatatgaatcacggtaatcatttcgacactcagattaaagtgactgacacaatgactattgtgaccatttcacaatgcccggattcttctgaaaactctgtgcggcaaccggttgtctcaaactattttaaagatagtacaggagctgtaacaggtgattcattgatgtggggtggtaatagtgtaatggcctatgcgcaggaaggtgttgtgggcgttcggcgggcaggtgccgtcacaacatttgtcaaaaatgaatttgctgttattggtcagattgtctcagccgctccagcaacaggggcgtggtttcttaaaggcgatgtgggggcttatgccgcagtaaacctaagcgcccgtaatatcagtgacagaaccctgttaattggttcgacgtattcagccagtgagtttctgaccggagccagaacctcagctgtgctgatttttaacagcgatattggctctaatagtatgaataaggtgatgaactggcttcgatacgaggtcggcaccgccgccggtatctgggaataa

SEQ ID NO: 239678 - DNA, 276 bp, Klebsiella pneumoniae
atgagcaaagaaaacatcgtcaccctggaaaaccacattaaacgcggcgatcaggtcatcgaaaaaatcaccgtgttaaaaccggatgccggaaccctgcgcggtgtcagtctggcagcagtcgcaaacgccgaagtcgacgcaatgattaaggtgctgccgcgtatgactatgccgtcaatgacagagcaggaagttgcgaaactcgaatggcctgaccttgtcgcgctatccggcaaggtggtcggttttttgtcaccgaattcggaacggtag

SEQ ID NO: 239679 - DNA, 1962 bp, Klebsiella pneumoniae
atgaatagatctgctaaagctgtgaaaagaaaggatcaccttcgcgttcttttaacagaaacgtctccgtatgaagtgccggctattttttctaatataggtttttataataacatcacacatcataataaatttaaatctacaggggatattgtttcatttctcttcgagaaaaatcttaatgaagattatacaattccattaacatataaaataaaaaaagacatcgattcctctcgcgtattatcactaatccatccaaggagtcagttaactatagttgatttttatgaaaacttttcaagtatgataatttcatcatgtcagaaaagtgacttcagtcttcgagctccatcaaggatatcatctaaatattttattaaaaataatgaaatgaatgatttggagtattcacgaggtgaaatacaatctgaatatgatgataaaaaatataagcatttagcttcatatttttcttataatcgatatacaagattacataaattttttaattctatggagtttattaatttagaaaagaagtttgatgttttctgtagtattgatgtggccaaatgttttgatagcatttatacccatagtattacttgggcagttaaaaataaagagttttcaaagcagaatagacatgtaaagaactcgtttggaacaatatttgatcgcttaatgcaatcaattaattataatgaaaccgctggtatattaatcggcccagaagttagcaggattttttcagaggttctttttcaagatattgatagagaggttgaaaacttacttgggaagttacaatatttaaatggtagagactatactattaggcggtatgtggatgatatatttatatttacccttaatgaaactattctaaacgatgttaaagacatagtagaagatacactaaaaaaatataagcttacagtaaacaagcaaaagacatctactactctacgccccttctctacagcgaaatcaggtactataaatcatctgaatgaaattcttaattcgctaacaagcaaattcatcgatcctgaaaatcctgaaaaagtaaaaaaaatatatagtaagcgaaatacagttgtgtcgtatttaaataagataaaatcaatgttcgtactcgaacgtgaaaactacaaccttgcttctggttacactatttcctctttaactaatattgctatagatttggatcggaagtgtaaatctagtcgcgattttatgaagaataatgaacgtcaaattagtgatttcttctatgtcgctacagaaataatttttcacttgtttttcatttcacctaaccataattcctccgttaaaatatgcatttttatagatatagtatgtaagaatgtagatgaaatgagttctggagattcagggttcttgaaaggtttgatttttaatttgatacatagttattttgagagatgcatcgaagttgaaaagaataacaagattaaaaaaataccccttgagaacttaaatttgttaatagcattaaagttacttggtgaggattataatttaacacgggattttttaggtaaaatctataatatagatagacgtaatgattttagttattttgaaataatatgcttgttctactttacagaccatgaccctcattttaatagtttaaaaacaaagatgtttaaatatgttaaattaattttagggaatgttacggatataaaaattgactccttcaagttttatttattacttgatataataaattgcccatttattgaggaaagaaaaaggaagtcattaacggctgaagttgtgaagtttcagcttaacagacagccatctgctgctgagattaatatcggatgggatgcactaacgcagtgctattggttcgtacaatgggataactttgatctacgcttatttttagagaaaaaagaattgcttagtgcttattga

SEQ ID NO: 239680 - DNA, 312 bp, Klebsiella pneumoniae
atgacaataaaaacctatcgtgaagcggtcaaggaagccctggctcaggaaatggagcgcgatgaacgcgtggtactcatcggtgaagacttgcgtggcggtcatggcggaaatgcgcccgaagaggcgaagattgaagcctttggcggtgtactgggtgtcactaaagggctgtggacgcagttcggctccgatcgggtgatcgacacgcccattaccgagtcggccatcatcggtatggcggccggcgccgcagcgacgggtttgcggccggcgccgcagcgacgggtttgcggccggtcgcggaattga

SEQ ID NO: 239681 - DNA, 639 bp, Klebsiella pneumoniae
atggctgattatcatccggcagtttttgaatatcaggcttttaattgtccatattgtggagtttatgcgcgacaattttggcgcactctgtatggcaacggtcaaaatcttggtgtaaaagatacgccgtttcggatgtcttcatgttcacattgtggtgatagtgcctattggtgccaagaaaaaatgataatccctgcggctggtaatgttgaattacctaatccagacatgccggaagactgtaaggctgactacatggaagccagaagcataatcaatctgtctcctaaaggtgccgctgcgctactccgcttgtgcttacagaaactcatgcgccatctcggtgaaccggggaacaacattaacgcagacattaagtctctcgttgagaaaggattgcctgtgcgtatccaacaagctgctgacatttgtcgtatcgttggtaatcaggccgtgcatcccggagagattagccttgatgatgaccctcagttaacacatggtctctttaagttattgaatatcattgttgatgaccgcatcaccagacctaaagaaatcgaagcgatgttccagagtatgcctgaaggtccacggcaaggcatcgaaaagcgggacggcaaggctagcggatag

SEQ ID NO: 239682 - DNA, 180 bp, Klebsiella pneumoniae
atgactaaagaagaaaaagtaatgtttttaatgcgccttgctgttgatactcatagcgcataccgctcaggacaaatcgcagcaggtaaagtcccgaatccagaccatgaccctatcgaagcgattgagcggatttacaacaaatacgaagagttactcgataaaaaactcgctgagtga

SEQ ID NO: 239683 - DNA, 618 bp, Klebsiella pneumoniae
gtgaagaaaccagcggctgcaaaggtgaaaacgtacaaaccgaagaagtgcgccagctgtggtgaaaccttcactccggcccgcaacctgcaaaaggtttgtggcccgctctgtgctatagcccacaacagggcgctgaaacaaaaaaaagcggaggcggaacagaaggacaagctgaagatgcgcaaaaaggctctgcttacccgtggcgactacatcaaaaaagcccagtcagcctttaatgcctttatccgtgaacgcgacgaggggaaaccatgcccatcatgtggcacttatcacccacctatgatctttggcggccagtgggattgcggtcatttcatgggggtaggtgctcgtcctgaattgcgctttgaagagaagaatgcttaccggcagtgcaaagcctgtaatggtggatcgggtcggttcgctgcaaagaatgccactgtacatgcccgctacagggaaacgctgatcgagtggtatggattgccgctggtggaatggctggaaggcccacacgaagcgaagcattactcaaaagaagacctggaaaacatagcggctaaataccgccgtaaaactcgcgaactgaaaaagcagagggccgcatga

SEQ ID NO: 239684 - DNA, 1026 bp, Klebsiella pneumoniae
atgtacattcaagatattcctaaagattcaaaattttgggtcgttcgatctggtgatggtggcatgttttatgaccactttgttcataactccatagcagctattgggcacattgattctatggattttagcgatcaaatccttagtaataaagatgaagtgattaaactcgtttttaattacaaaaatactttgcttgagaaaaaggaaacacttgcatccgcatccaataaagccggtcaagttctccgtttcattaatgaaatgtcaatcggggatataattatcaccctcgacgcgaagagaataattgttggaaaaataacatcagatccttataaggacatagagaatgcaacattactcaacgttgacgggacaacagatgaaaaattgcttaaatttagtcttagacggaaggttgagtggggcaaaacacaatttcgtgacaaactcccattagccataaataacagctttagagctaatcaaactgttttctcagcaaacgagcactggaaagaactaaaccattggttatctgttgcatttatttcagatgatgaggcttatatctcctcacgcatagagcaaacagaagggattaacaatcttgacatcgctcaatattccataatcattaataaaattgaagccattgctcaaacgattgccgacaatgacaactctaatttagatgaagaaggattattagacctctttgaaaatacatataaagagctacgcaaaagtagaacatttacagtaacgacacagcaagtatttctttcgcctggagacctttgggcaaaaacatctggaaaccgtaaaaaaagcctgttagttgtctgtacatttcttataatgttcaacatcgaaccatctttcgcagatgacaatgacaagctatttttcgaaaataatcacgcatcaatatctttattaattgataaagtaaaaaatgatgaaaactttgaggaagtgaaaaacggattagcattaaaagtccctgcacagaagctatga

SEQ ID NO: 239685 - DNA, 810 bp, Klebsiella pneumoniae
atgaatatttatcattatacagatttgaatggcttgaaagggatattatctagtaatgccttctgggcgacaaacttttacttcatgaatgatgctcatgaacttcagcatggtattaaatgtatagagaattcgctgggttatttggagggggatttatcaaaaaggagaattgattttataaaagattctttaaagcaatacaattctggagataagtttggttactataatatttctttttgcaaaaaaccagacttgctaagtcaatggcgaggttatgggctaaaacagggtgtttgtttggaatttgacagggatgagttatttgactgtttagattttaaaaacagagaagcttcacccggaaatgtcatttatacagaccctgataaaacacttaaaacaaaaaaagagattatagatttctttaaaaagaggataccatttaaaaatagggagcacgacggatttgcagaattatccaatgttcattattttctaaattcagtgactccatttttcaaacatgactctttcagagaggaaaaagaatataggatagttattaaggtggctgaatgttctgaagatatcgaatttagagtaaatgaacatggtttaataccatatattgtagttggtgtaaataataagaatccctatagcggattattgccattgaaaagtattaaaataggtccatgtaaaaatgcagaattagttgaaaaagggattcgattattattgcgtagttgtaaatattataatgttaatatctctacaacaaaatcaccttttagagggtga

SEQ ID NO: 239686 - DNA, 1962 bp, Klebsiella pneumoniae
atgattataggcgtatttcttagatattttaaaacatacagcggcacaaattacattccactttcaagtggaagtaacttctgcggtttggttggcaacaatggcattggtaaaagctcaattttagaggcatttgattccttttttaatggaaaaagctggaacatcaattcgggtatgaaaaaagcctcaacaagtacagccggacctcatattgttcctgtttttcttataaaaaaagaggatctgcctgaacgtcatcatgaagctgctaattttctaactgcccttgcattgaattttaatgaacgtagtacagggatgtccttaaccccaacaacaaggccacttattgcaacgtttgttgcacacattgataagctaaaaagaaatattaatatcaacgagcacttcatcattcctataggaatcaatacatcaggcacagtaaatctttctgtattaaactcacagttgctcactcaaatattaaatgcaccagccgatcaaattgagaatttgaggttaaaaacctcacctctcatgggtcactttcaagccctgctagaatatttgaaagatgaatatgaatatatatacatcccaaaagaaattgacccagaaacattcactaaacttgaaaccagtgaaatacaaaaactgatgggggaaagcttagaacaaataatccaagaaaaaatccctaaggagaccatcggaaagataaattccgagctaactgacttcattgctcaaattgacaaagaattagaaatatatagctaccgttcatcgggaaccagacaacaaaacctcaaacgtaaagatgtttataaacttattattgatgcattttttagaataagaaaacttaataaaaaagacactaatggctggactgagattagttctttaagttctggtgaaaagcaacgagcgataatagatatcgctcaagcctttttaaaaaaccaccgggaaaatggcgacaaccttttattaggcattgacgaaccagaatgctctctccatatgtccgcatgcttcgaacaattcgataatctttttaatataagcgagaattgctgccagttattattcacaactcattggtacggttatcttcccactgttgaaaacggatgcacaacctctataataaaagacggcaccacacaccaatttgatttatatgacttagctggataccgagaagaaataaagcaaaaaacaaaacaagccaaagaaaaaataccatacgacattcgcattaaaagtaccaatgatttaatccaatcaattatatctagtactcttgccgacaacccatataattggttaatatgcgaagggtctacagaaaaactatatttaagttattacctgaaagatcttgtccattcaaaaaagttaagaatcgtacctgtaggaggggctaaagaagtaaaaaaaatattccaattactggaagcaagtcatgatgatcttaaaaaggatattaaaggcaaggtattccttctttcagatactgatagcgaaatattaacttatcacgttaataacatagaaaaaataaaagccaaaaggattgttaacgatcagaacacactaaatactttattggttgatatccattcggtaaaagtatccccaccaactgaaattgaaaactgtttaaatggatatatattctctgaaacaattaaaacatttattcctgaccacccatatttagaagagttaataactggtaagaacttcgataatgatttgatatcgtatttctcaatgaatctacgtccaaatgaagtgcaaatcctagataatttctttaatgcacagggagttaaatatgaatttgcgaaaaggtatattgatacggatgatttctggaacaatacgattggaagaccaactcctgctccagcatggttagatgatatcaaagcatactttgattaa

SEQ ID NO: 239687 - DNA, 579 bp, Klebsiella pneumoniae
atgagaatagattctttaggatggagcaacgtagatgtacttgaccgcatctgcgaggcgtacggattttcacagaaaactcaattagctaaccacttcgatatcgcatccagttcattgtcaaataggtacacccgaggcgccatctcctatgactttgcggctcactgcgcccttgaaacaggtgctaatcttcggtggttacttaccggggaaggggaagcatttgtaaataacagagaatcgagcgacgccaaaaggattgatggattcacattaagtgaagaaatcctcaaatccgacaaacaactgagtgttgatgcccaatttttcacaaaaccgctcacagatgggatggctatccgttccgaggggaaaatttattttgtggacaagcaagcatcattgtctgacggcctatggctagtcgacattgagggagcaataagcattcgagagttaacaaaattaccgggcagaaaactgcatgttgcaggcgggaaggttcctttcgaatgcggcattgatgatattaaagcgttggggcgtgtggtgggtgtatacagcgaggttaactga

SEQ ID NO: 239688 - DNA, 279 bp, Klebsiella pneumoniae
atgagcattcgaatcgaaataggtgataaatggattattaccagcgaccagtatcaattcatcctgaatgaaaagaaagtcgttaagtcaggtaaaaaagctggtgaggaatggctcgacaccatcggctattacccgaagattaaccagcttatttcctgtctggcacatcactacatccataactcggagcttcaaactctgaatgacattgcctcagaaattgagaggttggggatgttatgtgagtcagcctttcatactgggattgcgaaataa

SEQ ID NO: 239689 - DNA, 378 bp, Klebsiella pneumoniae
atgagtggtgtggtttcccatggcaaaggggtaaattgctctctcacaattcaaaatatgagaaatctgcgggttaacattacaggtatttatttctctctgggtaagtcctctggtcgttactctttagataaagtaatcaacctaaatgatgtgtccttgacctataaaggggggcgtgcggcattttgttttattattgactcgggggtgacgtggtgggggatgtattcgttatttgatagggatgaaaaaattaatttcaaaaagggcaagcttttcgtaacaaccgacctcaacacttatgagttcaagctaccaaaacattacctcactgcgcttgagggtgcgtattcacaatatcaggctattaaatag

SEQ ID NO: 239690 - DNA, 498 bp, Klebsiella pneumoniae
atgtcatctgaaaaaactctcccgtcggtcgatctgatgtcctgccagcatggcggtgaagtgatcccgtctattgctattgagcgcattatctcgttgcggaatgaaggtattcgcgtctatctcgacggcatagacaagctgcgaaaagcgcgcgatctgatgcagcaggccggaggctgtcagtacctgtatgactacgacaaagccgtagagagcgcgatcaaatggagcgacaccagaccagaccaggccgaaacggctatttcccgcgttatcgacggaaaaatctgggatcggctgatgtcggaaaccggcatgtatacgctgatgagcaacaaacaacgtcaggaatgggatcggcaggtggcaggcgaagaaatgccgccgataacgctggagaacgttatgagtacgttccggcacctgaacgcaagcaaggccgatactttcacgcaagggctgattgatggcactgttgcaaatagtcggtggtga

SEQ ID NO: 239691 - DNA, 3006 bp, Klebsiella pneumoniae; identical to SEQ ID NO: 152274

SEQ ID NO: 239692 - DNA, 849 bp, Klebsiella pneumoniae
atggattatcaaacggttagcaaaatatttagcaggcctgtagttttggaaatggctcaaaaaaacagagcgagccttttcaaagagattatttatgaaacttatcctgtgaataaagtggaggataagtcaatattttcaatttatgacgaagtctataaaacacttttaaaaaaatacagaaacgaatatgtttataaaaatgaaatagcaaaaaaaataataaagcgtaatcataggtttaataatgttagttatgtcaatgaattcaaggtaaattcatgcatcgcagatgttgtaatatttaacaattgctctactgcatatgagatcaaaactgaacttgattctttcgaaaggttacaggatcagttatctgtttataaaaatgtttttgagtttgtatatttggttattccattgcagaaattgaaacaagcattagacttgcttgatgattgtactgggataattacattgaatagttataatgtattgagctatgaacgtattgcaaaatctaatcttatgataatgtcaaaagataaaatgtttaactgttttagaccgtctgaatatatttgtcttcatgaggaaattacaggttccttacctgccggtaaagcagcacaagtaaaaaatatgtgtaagaatacctttattgaattatctattgagcaagcctatgaggaaatgctcaatattttcaaaaaaagatcattggatacatttgaaaaggagagttttggcgcattgccacaatcattattagccactcttctaaatttgagattgaatagaaagtctttgagtaacctcaaagaaaacataagagaaacaatatgttaa

SEQ ID NO: 239693 - DNA, 948 bp, Klebsiella pneumoniae
atgtatcattgttatttaagaggcaaacagtatgagttgttagcggttagagcatgtatttcaaaaattgttcagaaaaacatgacggtaattattgagcctgtgagagaaagtaatcgtgatctatacagttgcttaagagaagtaagtcaattcaatgcaagggttatattaattgtaaaccctaaatgcggagagttggaacagaatcaaaggatgttagattcgctaattaatggtgctattgagatttacccctctattgagctcggttatattgtggatgataccacgagtttttcgcagctaaattctttcttcaattcttatgcacagcattcaaagtctataattcactatggcatttattccaatagcaatcagttgttacagttcgagatgtctgaccccctcttcagaacgaacatatttatagatggaaaatgtagtcaacattatatttcaaattttaatcaaaccttcaaggtattaattcatgacggtttaaatagaacatctacaaatgctggttactcaaataatacaatcgagtttttttctgatttatatgtgaactatattcgcttgggatatcaaggctttggtgatttttctattgtgggtgatcatttcagcgaaggtggtggtcaggctatgacagccgcaatacacatcacttataaagatcttgacactccagatattttaatccatcacttcctgtctgatccgcggaatctatatgaagatgttgcaattttgattgatgaggctttggaaaaattagaagattttattaataatgtaaggcctgatatccttgcgtggtccagttcgtgcggggaactaatttccatttataatacacctggacaaaacactaacttggcttatattaaaaaattatctatcaaacatcattttgaactaatgcatcatattatatag

SEQ ID NO: 239694 - DNA, 342 bp, Klebsiella pneumoniae; identical to SEQ ID NO: 20141

SEQ ID NO: 239695 - DNA, 450 bp, Klebsiella pneumoniae; identical to SEQ ID NO: 20140

SEQ ID NO: 239696 - DNA, 738 bp, Klebsiella pneumoniae; identical to SEQ ID NO: 20139

SEQ ID NO: 239697 - DNA, 1260 bp, Klebsiella pneumoniae
atgaggttcgaagaatgggtcaaagataagcatattcctttcaaactgaatcaccctgatgataattacgatgattttaagccattaagaaaaataattggagatacccgagttgtagcattaggtgaaaattctcatttcataaaagaattctttttgttacgacatacgcttttgcgtttttttatcgaagatctaggttttactacgtttgcttttgaatttggttttgctgagggtcaaatcatcaataactggatacatggacaaggaactgacgatgaaataggcagattcttaaaacacttctattatccagaagagctcaaaaccacatttctatggctaagggagtacaataaagcagcaaaagaaaaaatcacatttcttggcattgatatacccagaaatggaggttcatacttaccaaatatggagatagtgcatgacttttttagaacagcggataaagaagcactacacattatcgatgatgcatttaatattgcaaaaaagattgattacttctccacatcacaggcagccttaaatttacatgagctaacagattctgagaaatgccgtttaactagccaattagctcgagtaaaagttcgccttgaagctatggctccaattcacattgaaaaatatgggattgataaatatgagacaattctgcattatgccaacggtatgatatacttggactataacattcaagctatgtcgggctttatttcaggaggcggaatgcagggcgatatgggtgcaaaagacaaatacatggcagattctgtgctgtggcatttaaaaaacccacaaagtgagcagaaagtgatagtagtagcacataatgcacatattcaaaaaacacccattctgtatgatggatttctaagttgcctaccaatgggccaaagacttaaaaatgccattggtgatgattatatgtctttaggtattacttcttatagtgggcatactgcagccctctatccggaagttgatacaaaatatggttttcgagttgataacttccaactgcaggaaccaaatgaaggttctgtcgagaaagctatttctggttgtggagttactaattcttttgtcttttttagaaatattcctgaagatttacaatccatcccgaacatgattcgatttgattctatttacatgaaagcagaactcgagaaagctttcgatggaatatttcaaattgaaaagtcatctgtatctgaggtcgtttatgaataa

SEQ ID NO: 239698 - DNA, 477 bp, Klebsiella pneumoniae
atgcctcgggcatccaagcagcaagcgcgttacgccgtgattcaaagccacaaattgattgaaatgcttgaatcttcaattcataagtatcacaacaaaatattgacagccgcagaagtcattgaagaactcattaatctttctaaagaaattcatgaaatggataaagaaccaaaagaaatgggcttatctgattatgaatatgcgttctatacagccatcgccaataatgacagcgcaaaacaagtcatggaaaaagataaattgcgcgagcttgccgtagttttatacgaaaaggtaaaagaaaacgcttcaatagactggaccattaaggaaagcgtaaaagccaagctaaaagtgatcgtaaagcgtattctacggcaatacggctacccaccagatatgcaaatgctggccacggaaaccgttctcaagcaagcagaattaattgctgaggaattgacccatgagaattaa

SEQ ID NO: 239699 - DNA, 1677 bp, Klebsiella pneumoniae
atgacctttaacccggagctggggagtacgtctcccgctgtgctgctcgataatgccgagcgcctggataagctgctcaatgggcctgcgctgactgaaccagatcgcgctggcgatgatctggatacctggcgcggaatgatggcgaagagcaacgcagctatcgacgatgcgcaaaacagcattaccatcctgggattgccatttgccacactcgcggatgcacaggctgcggtagatgccggaaaaattccagatggtgctataacatggatacgaaatgatgatgcgtcgctggcagacgagtacatcaacaacggtggtattctgtcagctaccgggcgaaagatgccgtcgcaggaatatatagatgatgggtttacccccggcagggttgttgaaagcgatacggatgtcgctatagcgctaacgttcgcggaaggttcgcgctcctggcttgagtcagattatgacggcgggcctactgagcactctgcaaaattgattggcaaggctattaacataggtgattcaccggattcggataaaaatgtcgctatagcgctaacgttcgcggaaggttcgcgctcctggcttgagtcagattatgacggcggcccaacggaatacgccgcagagaaaatcgcagaggcaataaactggagtcccccggcgtctgaaagtcaaaccgtaccgctatctaccgcgccggacggaaccgcccgcgaatacccaacgttcaaacgcctgagcgcgccgattattcaattctctcaacaatctgcacctacggtttactggccatggatagtcaataaatctgcatggggcggcacaggttttgcgctcttctacagtaccgaccactcagcgacacacgatccgtccggtattttcttgtttgaggcggacgatattacaggcccatgggttaatagggggaaaatatatcgtgatgacgctggggggtggcaaaccgaaacgccgtccgttatttatgaccctgttagcaataaagttcttatgtattaccagcaagctggtgtgcccggggctatcgggcagcagcaaacctgcctcgctacagccgaccccgcagacctcacggcatggacgcgcgtcggcgtagtcctggataaagaatttcttgagcaaccgggtgatgggcattgcggttatttccgacctttttcatataacggccagttgttcgggtacagcctgtacggcgggacgaattactcaaatgcggcactgtggacgtccgatgacggcggttacacgtggcagcgcgacgggcggctaattggctggatgcaggataaatgccgccacctggcagtagcgctaaacgcagagccgcaggacgtattgctgacaatgtacgagggtgacgtactcaactggcgcggtaaaccgtggtgggttggggtttcaggaaaagcgcagtcgggcagcgtccttatccggcatttcaggctcgttacagcgcctcttgctgacgatttcgcgtcgttaacggtccgggttaaagacataacgccgcctcccgctacgtatgaagtccagggtgatattgattatccgggcaactgcgtgacagcagggggagtggtttacatggcttaccgcactggtgggcaaaagggtgatatctctctgatgaggttgaattaa

SEQ ID NO: 239700 - DNA, 579 bp, Klebsiella pneumoniae
atggtattttcattaaatcatattatctcagaggtacagcgaaaagaaaatgccatttcgctgtctgcacctaatataattgatgaagcacaccaaatgactatatacctaaaagagtacttatggtcaataagagaggatattataaagcagggttttaaaaaccattgggaggaaatcaacttctttcgcaacattaagccatacatcctctccaaactcatttatcacaataagatatttcgtattcagacggcttgtcctgttgatggagggaaaatgtacgcaagttattttgcagaacaattacaggaattacaacgggaatatagggagcatatctacaattcagatttttaccgatattatcgctcaggaagaaccgaccgtgatgaaacttactttaggttaggcaacatcaatttccacgatggtcttaatagttttgtctttgaaatcgacccgcttttttcaacctattatgataacaaagtagctcggataatagcaaatgaactactctatacctacatacgccaaaaaattaacgatgatgaaatagcaggttcacgcgtatag

SEQ ID NO: 239701 - DNA, 657 bp, Klebsiella pneumoniae
atgtctaaagtaagaaaatttgttaccgacacggaagttgaagaaacaggtactttcaatatacaagccgatattcatcaaccagaggtgaactgtcctggattttttcagctatgcaatggaaaccggctaatggctgctcatcaaggtaatttattatttgcgaatcctaataataatggtgcattgcattttggaataagttttaaaacatctgatgaatggaaaagcaagactctggtagattttcaagacagaaatagtgtcgttgattttctcctgaaaaaattttccgattgggatgaacgctacaaagaactgattcgtgtgacatcatcttttgtagggttagcgacacgaatatttcccttaggtaagtcttggaaaagtaagcgtccattacccataacgatgattggagatgctgctcatttgatgcctccttttgcaggacaaggcgtaaacagcgggttgatggatgccttgatattgtcggataatctgaccaatgggaaatttaacagcattgaagaggctattgaaaattatgaacagcaaatgtttgcttatggaagagaagcacaggcagaatcaataataaacgaaacggaaatgttcagttccgacttttcattccaaaaactaatgaatctataa

SEQ ID NO: 239702 - DNA, 651 bp, Klebsiella pneumoniae
atggagttcataaaaaaatggtgggataatcatgataaatctaataattttttatcaggtatccattacatagtcatttcgctagctatcataattggtggcgcgtgggctttgtatacctttaacgcattgcaaatggccagcaatgcggaactccaactaaaaaaagctaacgaagaattaaaacaaataaaagaacaaattaaaggcactgactctagcagcattgctattaatgttactcaattaaaaacacaactaggaatgattattaatgtaaccataaaaaacaacggtaaacgtccgttgtcattcgaaacatctaaaggtgctttgactgtatataaagtgagcgcaaatggcgataaggttgaacaatctcaatcttttacacctaatctctataccgttttgagagataaagaaagtgccccggaatccaaaagtaaatcattacctaaaactcatgttttaatcggagcagaaaaaacccttagctatatcgttgggttaaacaagccaggggtttattacattacattcagatcaacgccagacgataatttcgatgggaatgaattaaaaaataacaagcctgtagaatggtttgcttcttcgtatgttgaaattacaccaccaacattcaaatag

SEQ ID NO: 239703 - DNA, 864 bp, Klebsiella pneumoniae
atgcgcgccactgccgtccgcccacaccggttcgcggtacgcgcgccacgcgcccgagcgcacgctgctgtacgcgttggtagaggcgcactacccggacttcattgcacggatcgaagcggagggccgctcgctgcccgggtatgtccgcgaggcgttcgatgcctacctgcgttgcggcgtgctcgagcacggcttcctgcgggtggtgtgcgagcactgccgtgcagagaggctggtggccttctcctgcaagaagcgcgggttctgcccgagttgcggcgcgcgacgcatggccgagagtgcgcggcacctggtcgaggaggtgttcggcccgcggcctgtgcggcaatgggtgctgagctttccgtaccccttgcgtttcctgttcgccagcaagccagaagccattggcccggtgctgggcatcgtgcagcgcgtgatcgccggctggttggccgatcaagccggcatcgaccgcgccagcgcccagtgcggcgcggtgacgctgatccagcgtttcggcagcgcgctgaacctgaacatccacttccacatgctgtggctcgacggcgtgtacgtggaagccaccgagctgccgcggcgcgaactgcgcctgcaccgcgcccgtgcgcccaccaccgcgcagttgacccagctggcagctgccatcgcgcaccgggtgtgtcggcacctgacgcgcaaaggctggctcgaaggggagggcgaatcggccttcctggcagacagcgctgcaggcgacgacagcatggatgggctgcggatgagttcgatcacctaccgcatcgccaccggccgcgacgctggctgcaaggtcgtcacgctgcaaacgctgcccggtga

SEQ ID NO: 239704 - DNA, 669 bp, Klebsiella pneumoniae
atgagccatcaactcaccttcgccgatagtgaattcagcactaagcgccgtcagacccgaaaagagattttcctctcccgcatggagcagattctgccatggcagaatatgaccgctgtcatcgagccgttttatcccaaggcgggcaatggccgacggccctatccgctggagaccatgctgcgtattcactgcatgcagcattggtacaacctgagcgacggtgccatggaagatgccctgtacgaaatcgcctccatgcgcctgtttgcccgattatccctggatagcgccctgccggatcgcaccaccatcatgaatttccgccacctgctcgagcagcatcaactggcccgtcaattgttcaagaccatcaatcgctggctggccgaagcaggcgtcatgatgacccaaggcactttggtggatgccaccatcattgaggcacccagctctaccaagaacaaagagcagcaacgcgatccggagatgcatcagaccaagaaaggcaatcagtggcactttggcgtgaaggcccacattggtgtcgatgccaagagtggcctgacccacagcctagtcaccaccgcggccaacgagcatgacctcaatcagctgggtaatctgcttcatggagaggagcaatttgtctcagccgatgccggctaa

SEQ ID NO: 239705 - DNA, 195 bp, Klebsiella pneumoniae
atggctactatcctcaccccgtcacacccgcagtttgtctttgtgtttgccgccgttcgtcgtgcagaccgtcagccccgtatctgtatgctccgcgccgtcgccggggatgaacacgctgcacgccagtccctcgttcgcgattacgtcctctcgtttgccgggcgtctgccggtggcggaggtgcgtgcatga

SEQ ID NO: 239706 - DNA, 228 bp, Klebsiella pneumoniae
atgagacactccacgattactgcccgtgacctcgaatgccttgagcatatgcgcaatgtcggccagctcgtcagcgacctgatgcaggtgcaggactgtacttccctgcgtcgtgacccggcccagcagttacagctcacctccgtgatttacctgatgaccgcccagctcgacggcgtggtcgaacgctgcaaccaccgctggttcaccggggagggcaacgtatga

SEQ ID NO: 239707 - DNA, 399 bp, Klebsiella pneumoniae
ttgctgttcttctacggcaaggtgctgtgcacggatctgccctggcagggcatcaacgaagaccagaacctgggcatcgccatcacccgccgtgcgctggaagccccgctgcgcgccatcgtggccaacgccggtgaagaaccgagcgtgatcgtggccaacgtcaaggccggcgaaggcagctacggctacaacgccgccaccggcgagttcggcgacatgatcgccatgggcatcctggacccgaccaaggtgacccgctcggccctgcagcacgccgcttccgtcgccggccttgcgatcacgaccgaagtggtcgtggccgaagtgccgaagaaggaagagccggccatgccgggtgctggcggtatgggcggcatgggcggcatggatttctga

SEQ ID NO: 239708 - DNA, 294 bp, Klebsiella pneumoniae; identical to SEQ ID NO: 203473

SEQ ID NO: 239709 - DNA, 585 bp, Klebsiella pneumoniae; identical to SEQ ID NO: 203474

SEQ ID NO: 239710 - DNA, 150 bp, Klebsiella pneumoniae
atggtctgtaagaactgtggtgaaaccatggagggtgacggctaccagagagtcatccactgccccaatgcagactctgaaacttacgactactcagagcctgattcaaaccccgtaatgtgtgaaggagaagacaatggcgagaattaa

SEQ ID NO: 239711 - DNA, 1083 bp, Klebsiella pneumoniae; identical to SEQ ID NO: 177586

SEQ ID NO: 239712 - DNA, 435 bp, Klebsiella pneumoniae; identical to SEQ ID NO: 203484

SEQ ID NO: 239713 - DNA, 261 bp, Klebsiella pneumoniae
atgaaagacaccctacttgagcatgcatatcgccggatcgttgagctcgaaaatttgctgctggtggatgtgccggaaactgtgtggcccgccgaagtcacaatggttttatcgcaagtagaaaactccagggaactcccggtgcatcaccagcgccgactgcagcaccatatcaaccgcatgtggctggaaaaaatgccggtaccgtcaatcatcgccgcggctcgttcgctggccagcgccatggagaaatacgcgtga

SEQ ID NO: 239714 - DNA, 2136 bp, Klebsiella pneumoniae
atgaccatatacaacggcttatttgagcccaaaaaatccgcaatcaaagactgcggtgccgtgcagctggcgatcgccgtcgatgcgccaaacaaaaaagtagctgaaagcattatgaccggcaaactttgggaatcataccccgcgaacggcgacaactatttcaaaccgaagctgtgggaacaccaagaaggccagccgctgccaaccgttggccagttcgatgagcagttcgcccaagaaaacacctttgacggtgaaaaatgggtggctaacagccaggatgacggcgccaccgagttgccggcaggcgatgaagttatcgatctgatgaaggtatcccccaaggagcgttttgccgctgtattactcttcagcaaattagagataaccggccagctctattcgcaggttgtagattatcttgatgatctggataatcacgatgaaaccatggaagaggatgaccgctttaacttcaatgtactttgcgccctgcacaacaacgagccggttaaacatatgcatgttgaaggcctgaataatcttattcatggcattttctcccattttgaaaaccagacgccgggcaaagcggctatttctcaatttgtaaaacgctggctggaaaatcccggtaaacgtgaagacatggtaccagttgaaatcacatcaacagactccgccaacactgaaacaagcgttaaagtcactccaaagcgaggttataaacatacctatgcaacactggatcaggagatcgctgtcgccctactccctatttctcccgacgcgccagtattatcaggcaaccttcgcgatgctgagaaaatcattgcagacgagcgcgaagattttaaacgttggtcaatggcgcttcgcaccacggagcacattctcaaatatgaccgagacagtatttttggcgtagtgcagaacgtaccggcgaaagatacctaccatttccctgacagcctgcgccgccatatcgattcatggctggcggccaacggccgctttgaggaaaccgagacaggatccgttaaacaaccagaggcgacgcaaaataccgcctcaaacgtgggcgaaaaagtggaagcgccgcagccggttgtaaccgacaccctggccaaacaggcgcgtgaaacgctcaatgatatgggttatggcgtatatgcctctggtgaaggtgcagagccggaagagaagttaagcgttaaggctgaaaaactggctgatgattccgagcgtttagcaaaacaaatcgttcacgctgaaagcctgcctaacgctgaggatgttgtgcaggctgtcggaaaaccaatcatcggggaagataatttagacctatggaaacgcgtatttaaaaccgacgaaaggtttactaaggctttcacacagaacggcggtggcacctcaataaacggtacctacatgaccatgctcgccacccgtgagtttggccccaagggcatcggctggggcgtggatattgttgaagagcgtttcgatattggcgcgccgatcactcggcaggtaaaaggcaaagacaacaacgcatcgtgggagctggttcttgatgggaatggtaataccgtcaacgaacagcaccatgttgtgactgtccggctctggtacatcctgaacggcgtacgaggtgaggaaacagcatacggctgtacaccctacatttacggtagtaaatacgggatcacctgcgacggcgaagcagccaaaaaatcactgactgatgcgaccaaaaaagcgttatccggcctcggattcagcggcgatatctttatggggctttacgacaatctggagtaccgccagaggaataaggccgagtttgatctgaagaacgccagcgaatcagccgaagatgcagcacggcttcgccaggagtttgacgacaaattaagccgcgttgctaataccctggcgcatggcgtgacggtgaacgaaatcaatggcgtgttttcccctattgcacgtgagatcgatgtacacattaaagccgcccaggccaacggcgatacgcagcatgaacgctatctgtctggccgactccgccgactcatcaccattaaggatggccgcattaaagaactgaataaagccgaggagaaagcataa

SEQ ID NO: 239715 - DNA, 180 bp, Klebsiella pneumoniae
atgaatcattttaccgctgaagatacctttattattgtcggcattgttattgcctatattctgtttaccacctggctgacattccgtattcgtagtaaaaattccggggattttatggaaggctcgcgcgccatgccggcctttattgtcggtatatccgacattccgcacctgatttag

SEQ ID NO: 239716 - DNA, 246 bp, Klebsiella pneumoniae
atgatcagacattacttcaggcgaccgatagctgagcatatatcaaacattcgctcagagctggcaaaagtaccagcagagaagcgtcttcacgtcatagctgaggcgttgtacgacatgaacccgacgggagccgatgagattcttcaggcttcctgcggatgctatgagtgggatataagcatcgactaccgaaacgccgacgtccgttactcaaagaaaaacgaccgggagcgtgcagcatga

SEQ ID NO: 239717 - DNA, 228 bp, Klebsiella pneumoniae
atggctatcttcatggaagtgcgctgtgaagggcgtggtgatgttgacggctgtttttctgaccagaatgcagaatcaatgacctcagcacatgagagcgttaaaggtgtttctgctgccctggcatttcttaaagatgattcgcttaaaaacggctgggtgttgcacaaaggtgatttttattgcccggtatgcgccaaagcaaaagcatgggagctacaccagtga

SEQ ID NO: 239718 - DNA, 972 bp, Klebsiella pneumoniae
atggttgccgaggagcatgagcaatatcctgccaggggagtagctcttgagactgttaatgcacccaccgttgatacgtcggagctggtgacctcgctggacgatatttttgccgatgatgacctcgggttattggattttgatgctcccgatatattcagcatgcagcatgtgcctagggaaaaaaaggcgttacctgacgagatagcccagcgccagccctgtccagatttcgctcgttttgcgccgctgtttgagaccgtgaaaacgggcctgcaaggccaagagttctccctcgtgcgctatcgaaacgagcatggttttcaggttggggatttcttcatcctgaatggggtgatgggttatgtgcatagtgctggggaacgattggaacagtacgagaggtataacgcacgacttcacctggtttttgataatggcactgagctgcatatgctctaccagtcactaacccaggggcttattcgtgacaaggagggccgtaaggtcatgctaggtgacaaactcctcttgccaaattacgcgcccattccaagcggctttgtctatgtgctcgcgacaaagagcacggaccctatattgatgcccttcatgcaaaatctctacaagataggtttcaccgagggtaccgtcgaagaccggataaagcacgccgagaaagacaagacgttcctgcaagccccggttaggatcatcacgacattccagtgtttcaacatgaacacccacaaattggagaccttggtgcacggttttctcgccaagcagcgcctcgatatcaccttgaagggggttgatggcaccagctatgccccgagagagtggttccatactccattgacaaccatccttgaagttattcaccacattttggatggaacaatctcgcagtaccgcatggacaatactaccggtaaggttgttgcaaaaaaaacgaccaataatgcgtaa

SEQ ID NO: 239719 - DNA, 399 bp, Klebsiella pneumoniae; identical to SEQ ID NO: 208686

SEQ ID NO: 239720 - DNA, 1014 bp, Klebsiella pneumoniae; identical to SEQ ID NO: 54411

SEQ ID NO: 239721 - DNA, 471 bp, Klebsiella pneumoniae; identical to SEQ ID NO: 54414

SEQ ID NO: 239722 - DNA, 603 bp, Klebsiella pneumoniae; identical to SEQ ID NO: 54415

SEQ ID NO: 239723 - DNA, 747 bp, Klebsiella pneumoniae; identical to SEQ ID NO: 54416

SEQ ID NO: 239724 - DNA, 273 bp, Klebsiella pneumoniae; identical to SEQ ID NO: 54417

SEQ ID NO: 239725 - DNA, 282 bp, Klebsiella pneumoniae; identical to SEQ ID NO: 160018

SEQ ID NO: 239726 - DNA, 267 bp, Klebsiella pneumoniae
atggagcattccgagttcgatgccgctttcgcgaagcttgcggagggatacagagaagggacttatgaaggccggcgtttcagcttgatcgtccggcgatctggggacggacgtcgcaacagtctgttcgccagggagttggacgggactgacattgtcagcttcaacctcttccgcgttacatcagataggacattgttgaagccgtgcgaaatgtccgccgaaaaggtcgtagcgttcgtgctggagttccgaccggacacctga

SEQ ID NO: 239727 - DNA, 375 bp, Klebsiella pneumoniae; identical to SEQ ID NO: 54418

SEQ ID NO: 239728 - DNA, 3030 bp, Klebsiella pneumoniae
atgagcaacaagaataagctactcaccgtcttttctgacgcagagcaggaagccttgtacggcctaccggacttcgacgatgctcagcggctggaatacctggcgttgaccgaatctgaactggcgttcgccagcagccggcctagcctgcaggcccaagtctattgcgtcttgcagatcggctacttcaaggccaagcatgctttcttccgcttcgattggcatgaggtcgaggacgattgcgccttcgtgctgagtcgctatttccacggcgaagcgttcgaacgcaaggcgatcaccaagcatgagcactacagccagaggggtcagatcgccgaactgttcggctaccggtcgtgggcggctagcttcctgccgcaactggcacagcaggctgaacagatcgtgcggcgcgacgtaatgccaggattcgtggccgccgaactgatcgtttggctcagcgagcacaaaatcatccggcccggccacaccaccttacaagagctggtcagtgaagccctgtccaccgaacgcaggcgcttgggcggcttgctggcagaagtgttggacgaatcggccaaagctgcgctgggccagctcctggtgcgtgacgacaccctgtctcaactggcagcgctcaagcaggacgctaaagattttggctggcgtcagatggcaggggagcgcgagaagcgcgccacgctgaagtccttgcacgggatcgccaaggcgctgctgcccaagctcggcatctcgcagcagaacctgctgtactacgcgagcctggcgaacttctataccgtccatgacctgcgccacctgaaggcggagcagacccggctctacctgctgtgctatgcctgggtacgttaccggcagctcaccgacaacctggtcgacgcgatggccttccacatgaaaaaacttgaggacgagagccgcacgggtgcgaaacagtcctttgtcgccgaacagctgcgacgccatcaggaaacgccgcaggttggccgcctgctgtcgctgtacgtggacgacagcgtggccgatccgacgccgttcggcgaggtgcgccaacgcgcctacaaaatcatgtccagggaattgctgcaaaacacggcgcagcgcatgagcgtcaagccactgaacaaactggcgctgcactggcaggcggtggacggcctggccgaacgcattcgacgccatctacggccgctgtacgtcgcgctcgacttcgccggcacggcccccgataacccatggctcgcggcgctgacttgggccaagagcgtgttcgccaagcagcagcgcctatcacaacggccactcgacgaatgtccggcggcaacgctgccgaaacgcttgcgtccgtacctgctgatgttcgatgccgaaggcacgccgacaggcctgcatgccgatcgttacgaattctggctttaccgtcaggtcaggaaacgcttccaggcgggcgagctctacattgacgatagcttgcagcaccggcatttgtccgacgagttggtttcgatggacgagaaagccgccgtgctcgcgcagatggacatccccttcctgcggcagccggtcagtgcccagctcgatgcactggcgaccgagttgcgtgcgcaatgggtggcgttcaatcgcgagctgaaacagggcaagctgacgcacctggaatacgacaaggacacgcagagactgacctggcgcaagcccaagggggagaaccagaaggcgcgcgagcaagctctctacgagcaactgccatactgcgatgtcgccgacgtgtttcgcttcgtcaacggccagtgccagttcctgtcggcgctgacaccattgcagccacgctatgcgaagaaggtagccgacgccgacagtctgatggcggtgatcattgcccaagccatgaaccacggcaaccaggttatggcacgtaccagcgacatcccgtaccacgtcctggagagtacctaccagcagtacctgcgccaggcgacgctacatgtggccaacgattgcatcagcaacgccatcgccgcactgccgatcttcccgcattactcgttcgacctcgattcgttgtacggtgccgttgatgggcagaaattcggcgtcgagcgaccaactgtgaaggcgcgctactcgcgcaaatatttcggccgcggcaagggcgtcgtcgcctacacgctgctgtgcaatcacgtgccgttgaacggctacctgataggcgcacacgagtacgaggctcaccacgtgttcgacatctggtaccgcaacacgtcggacatcgtgccgagcgcgatcaccggcgacatgcacagcatcaacaaggccaacttcgccatcctgcactggttcggacttcgtttcgagccgcgcttcaccgacctcgacgaccagttgcaggagctgtattgcgccgatgatctggcattgtacgagaaatgcctgatccggccggctggccagatcgaccggcaactcatcgtcggtgagaaggcgaacatcgaccgaatcgtcgccacactgggcctgaaggaaatgacgcagggcacgctgatccgcaagctgtgcacctatacggcgccgaacccgacgcggcgcgcaatcttcgagttcgacaagctcatccgcagtatctacacactgcgctacctgcgcgacccgcaactggagcgtaatgttcaccgctcgcagaaccgcattgagtcctatcaccagctacgctcgaccatcgcccaagtcggtgggaagaaggaattgaccggccgcaccgacatcgaaatcgagatcagcaaccagtgcgccaggctgatcggcaacgcgatcatcttctacaactcggcgatcctgtccctgctgctgacgaagtacgaggcagctggcaatgccaaggcgctggcgttgatcacgcagatgtcgccagcggcctggcggcacatcctgctgaacgggcattacaccttccagactgacggcaagttcatcgacctggatgcgctcgtggcgggactggagctgggctga

SEQ ID NO: 239729 - DNA, 603 bp, Klebsiella pneumoniae
atgttggttggctacatgcgcgtgtcgtcggactccgaccgccagagcacggacttgcagcgcgacgcgctgctcgccgccggcgtcgatccgcgtcacctgtttgaggatcgtgcctctggcgcgaaggatgaccgtgccggcttggcgcgggcgcttgagttcgttcgagccggcgatgtgctggtggtgtggaaactcgaccggctcggtcgctcgctgtcgcacctgctcgccattgtgacttcgctcaaggacaagcgggtggcgttccgctcgctgacagagaacctggacactacgacgccctcgggcgaattcctgttccaggtgttcggtgcgctcgcgcagtacgagcgcgccttgattcaggagcgcgtcgtcgcgggcttggccgccgcacgcaaacgcggccggatcggcggccggccgcaggcgatcactggtgagaagctggacgccatcgtcgccgcgctcgatggcggcatgtctaaggcggcggtgtgccgcaacttcaatgtcaagcgcactacgttgatcgaaacattgacgcgagcaggttggcgtggtgcgggaaggacggtcgatgagcaacaagaataa

SEQ ID NO: 239730 - DNA, 357 bp, Klebsiella pneumoniae
atgacaaacaaagaaaaaccgctcgaatggatcgcgagcagccacaaggatttgatggcgttgccgtccgacgtgcgtcgccgtttcggttacgcgctctcgttggcgcagataggcgatcaggatgacgcagcaaaggagctcaaggggttcggtggtgccggcgtgctgaaggtcgtcgaagacgatgccggcggcacctatcgagcggtatacacggtcaagtttgcggaagcggtgttcgtcctgcactgcttccagaagaagagcaagagcggaatcgccacgccaaaggccgacatggacatcatccgcgctcggctgaaggtggccgaggtattggcacaggagctatga

SEQ ID NO: 239731 - DNA, 336 bp, Klebsiella pneumoniae
atgcaaaaacgaatcattgaaggcgtcgaggttcagcgcagctcgggcaacgtctttgccgaccttggactgcctgacgctgaaaagctcaagatcaagaccggcctggtggtcgagatcaggagggccatgcgcgcccttgggctgactcaacaagcggcggccaaacgcatgggcatcccgcaaccgaaggtgtcgggcatgatgcgcggcgacttcaccaatctatccgaacgcaagctgatggattgtctgaatcgcctcggctacgacatcgaaatcaaggtacggccagcagccgagccgatcgggcatctaacgctcgcaaccgcttaa

SEQ ID NO: 239732 - DNA, 336 bp, Klebsiella pneumoniae
atggcagcccgcatcaccgacgacgaatgggacgaactgactcccgagaatttcgataccacggcactgctgcgtgcagtcgatgccgtggacgtgctgcgcggcgatttgaatgacagcgcagacggcgcacctccgcaactgcgcaccgacctgttgaagctgcatcaactggcaatggccgcgttcaacgagggatcacgcagccgagtggctgagctatttgatctcgccgtggatcttcaggatcaggttgatcatctgatgacctcgctggaacaagtgcaagaaaccctgtcccggttgacggcgctctacccagaaagcctgtcctga

SEQ ID NO: 239733 - DNA, 327 bp, Klebsiella pneumoniae
atgagccgcagccgccgcaaaacgcccatcgttgggcacacgacctgccgtagcgagcgcgaggacaagaaactctggcatcagcgctggcgaacccacgagcgcaccgcgctggccagcgcgtcgccggaagctctatgcgcccatctgcctctactggaaaaccaggtcagcaacgtctggtcgatgggtaaggatggccgctcctactggcccatcaagcgccaggccgccacggcggatcgcattgccaaccacaagggacgcaatccgcaagagcgcgcctccctgaaaaagcgtctgctgcgcaagtggatgagcaaatga

SEQ ID NO: 239734 - DNA, 381 bp, Klebsiella pneumoniae
atgaacctgtccaccatcgaggcgctggctatcgcttgggcgcgaatcgctgaagaagcagaactcccagccggctacgagggcacggcgacgccagaggcgcatcgggcctgcgaggtgatccaggagcggattcgagagcacgtcgtcgccaccaatgacatgcggctgttcggcctgctgcacctgcttgggcaggcgtcgctgcgcatggagcaagcgctgtggccggaagaatatgcgcggatgacccgcgaggtcgaggaagctctccgagaggccgacgaccccaacgccaagtcgtacacccacgaagaagtcatgcaggcgatgcaggaacgcatcgaccgagcgcgagacaaagccatgttgatcggctga

SEQ ID NO: 239735 - DNA, 1260 bp, Klebsiella pneumoniae
ttggtaaaacgcattcccgtatccgagcttcgtctcggcatgtacatccacaagctcgccggctcttggtttcgacacccattctggcgcggcagcttcctgctgaccgagcctcaggatctctctgccattcgagaatgtggcgtcggggaggtctgggtcgacttggccaaaagccaagtcgacccagagagcccagagagcccagagagcccagagcccagagcccagagcccagagcccagagcccagagcccagagcccagagaattgtcggaggagcaatctctgccgtctagtccactaagcaagaaaagtgacggcgcaacctcaatggagagcgaaatgtgttatgcacggaaactctgtcttgcggccaagtcccaagtcatggacatgttccaggaagcccggcttggcaaggccgtcgacccaagcacgacgttgccgctggtcggagaaatcgctgcctcggtgctgcgccaacctcatgccctcatcagcgtcgcacgcatcaaaacgcacgacgattacacctacctgcactcggttgccgtctgcgccctgatgctatcgctggcccggcatctcgatctagacgaggagcaaacgcgcctggctggcatcggcggactgatgcacgacctaggcaaggccgcgatgccgctggaagtgcttaacaaaccaggcaagctcaccgatgccgagttcgccatcatgaagcgccaccctgtggagggcgcaaagatgctgcgcgcaggcggggccgagcccggggtggtggacattgccctgcaccatcacgagaagatcgacggaaccggctacccggatcgcttggccggtgacgccatttcactcctggcccgcatgggcgcaatctgcgacgtctatgatgccgtgacgtcggagcgagcctacaaaaagccgtgggacccgtccgcggcgatgcggcagatggccaagtgggagggccatttcgacaaacgcatcttccacgccttcgtcaaggccgtgggcatctaccccgtcggctccttggttcgcctgtcctctcagcgtctggccgttgtcgttgagccgggaatggaatcactgctgactcccaaggttcgcgtgttcttctcgctacgctcgagagagccgatcccgatgcagaccatcgacctggcggccacgagttgcaaggacagtatcactggccccgaagacccgacgctctggaacttcaagaacctcgacgacttgtggatggaatag

SEQ ID NO: 239736 - DNA, 237 bp, Klebsiella pneumoniae
atgcctgaatctcacatgctgccaccgagaccttttacccgacagcaggccgaagcggttacccgccggtatcaaaacatcgctattgaagatgaccagcgcagtcacttccgcctggtagttcgcgactctgaaggtcgaatgatctggcgggcgtggtgctttgaaccggatggcggtgaagggcttaaccgttatatccgcaagtcaggcatcctcagagcatcctcctcctga

SEQ ID NO: 239737 - DNA, 147 bp, Klebsiella pneumoniae; identical to SEQ ID NO: 202626

SEQ ID NO: 239738 - DNA, 1524 bp, Klebsiella pneumoniae; identical to SEQ ID NO: 101421

SEQ ID NO: 239739 - DNA, 891 bp, Klebsiella pneumoniae
atggctcgtgattcgctttacccagtgagcgttaaagctggaaaaccgatccttggaatgctacctacaggatggcaaaagttatcattagaaaagtgcttaaatatagaggcaagaaaggcatatatacaagataatcaagagtatgacttagttacagtaaagcgctccagaggtggcgtaataagacgtgagcatcttaaaggaaaagatatctccgtaaaaagtcaattctatattaaagaaggcgactttctcatatcaaaacgacaaattgtgcacggtgcttgcggtcttgtacctaaagaactttctggctcaattgtatcgaatgaatattgtgtgcttacagggaagtccggtttttatcttccttatatggaatttctatcggagtctctatatttccagcaaacctgcttccactctagcattggtgtgcacatagagaaaatgatttttaagttagatagttggtttaagtggccatttaatatccccccactgtctgaacaaaagagaatcgttaaaatcctgtcaacctgggataaggcgatttcggtgacggaaaagctgctcgccaatagtcagcagcagaaaaaagccctgatgcagcaattagttaccgggaagaaacgcttgctggatgagaatggggtgaggtttagtggggagtggtgtacgtgcactttgtctgaagtagcacatattattatgggatcatcacctaaatccgaagcctacaacgataatggcttaggtttgccattaatacagggtaatgccgatataaagtgccgagtttcatgtcccagagtttatacgtctgacattacgaaagaatgtactcctggagatattcttctaaggaaggtgcgaacaagttcctga

SEQ ID NO: 239740 - DNA, 441 bp, Klebsiella pneumoniae; identical to SEQ ID NO: 208692

SEQ ID NO: 239741 - DNA, 519 bp, Klebsiella pneumoniae; identical to SEQ ID NO: 208691

SEQ ID NO: 239742 - DNA, 594 bp, Klebsiella pneumoniae; identical to SEQ ID NO: 208690

SEQ ID NO: 239743 - DNA, 276 bp, Klebsiella pneumoniae; identical to SEQ ID NO: 208689

SEQ ID NO: 239744 - DNA, 840 bp, Klebsiella pneumoniae
gtgcgccatggcgtgcacgtagccgaggttggcgttattgaaagccatcccggccagcagagaggcataggccatgttttcccgcgcctgcagattgctgccgagggccacggcctggcgcaggttgcgggcgatgaggcggatcgcctgcatggcggcggcgtccgtcaccgggttagcgtctttggagatataggcctctacggcgtgggtcagggcatccatcccggtcgccgcggtcagggcggccggtttaccgatcatcagcagcggatcgttgatagagaccgacggcaggttgcgccagctgacgatcacaaacttcactttggtttcggtgttggtcaggacgcagtggcgggtgacctcgctggcggtgccggcggtggtattgaccgcgacgataggcggcagcgggttggtcagggtctcgattccggcatactggtacagatcgccctcatgggtggcggcgatgccgatgcctttgccgcaatcgtgcgggctgccgccgcccacggtgacgatgatgtcgcactgttcgcggcgaaacacggcgaggccgtcgcgcacgttggtgtctttcgggttcggctcgacgccgtcaaagatcgccacctcgatcccggcctcccgcagataatgcagggttttgtccaccgcgccatctttaattgcccgcaggcctttgtcggtgaccagcagggcttttttcccccccagcagctggcagcgttcgccgactacggaaatggcgttggggccaaaaaagttaacgtttggcaccagataatcaaacatacgatagctcataatataccttctcgcttcaggttataa

SEQ ID NO: 239745 - DNA, 501 bp, Klebsiella pneumoniae
atgctaaattccttttttgagaagttgaaggttattataaataattacaagtatgtcaatagcgatttgtacactatttacaaaaatgatattgagccaagattaaaacaaatagacagtgttatcgctgattattttaatgaacttaatgatgaaaggaaaagaatcgctcatgaaggtaggtgttcaagtgagtttatcaatgtggctccatacctaattatattacctatcattgttttagttttagagtgcgacagtgatattaatgaaaaagacatatatagacttattttcctgttaggactttttctctatgaaacaaattcttggcagtccattgagtacgatttagatgatccacgaccaggaaaaagaactcatttgtcatcttatattaatttctgtcgttgttatccaaaatatgtaaaaaaaagaagtgaagcagctaagtacatgcttgaaggatttcagaattggctgtcagagagtaaaaaatga

SEQ ID NO: 239746 - DNA, 396 bp, Klebsiella pneumoniae
atgacaaatttgactaacaatttagtgcatctttctaatgaaccatttcaaacaccgaaaaacatagagcttaaatcattgcgaacccattgtgtcagtgttcgtttgaatcaagatgagctacagcttctcaacaagaaacgcggtgataaaagcaagggagaatggcttcgcttagcttccctagataagcttcctttgtccgttcctgctatcaacatagaagcctggaaatcattagccgaaatatctcagaaactgaataacctaatatgccatcttgatactaaaagcagcggaggtgagcttaccaaaacagaaatcttcgctgtaaagcgtcagatatcagagcttcgctcatgcctcacagcttctgatttgccaagtggtagatag

SEQ ID NO: 239747 - DNA, 504 bp, Klebsiella pneumoniae
atggctatgacaccaaaactgaggaatagcgttatcgctgccgtcggcggtggcgccatagccattgcttctgcgctcatcgctgggccaactggtaacgatggtcttgaaggtgtgcgatacaacccttatcaggatgtggtaggcgtctggactgtctgctatggccacactggcaaagacatcatgctcggcaaaaagtacaccgagactgaatgccgtgcgcttctcagtaaagacctgagcgccgtcgcacgccagattaacccatacatccagaagccgatccccgagacaatgcgcggggctctgtactcgttcgcctataacgtcggcgccggaaacttccagacctccacgctgctgcgcaaaatcaaccagggcgaccagaaaggtgcatgtgatcaactgcgccgctggacctatgccaagggcaaacagtggaaaggcctggtaactcgtcgcgagattgagcgcgaagtttgtctctggagtcaaaaatga

SEQ ID NO: 239748 - DNA, 399 bp, Klebsiella pneumoniae
atggctaagcatataaatggttatcatgagaagaagattgtagatgttattaatacatggtctatagatgaaaaactaacctgggatgctttgtgcgacaggttagtaaggattattggcaaaaggccatcaagacaatccttaagtagtcatgtaaggattgcagaaagcttcagtgtgaaaaaagccactatcaaatctggtgcaatacacactgtaaaacctgctaatttaaaagtggcttctcaacgaattagaagacttgaagcagaaaatgaagctttgaaggcattaaatgaacgctatttagagcagttcaaagtatggctttataatgctcaccttaaacaaataacgattgaagaacttaataatccgttacctgcaaaatatctttaa

SEQ ID NO: 239749 - DNA, 765 bp, Klebsiella pneumoniae
atgagaattaaaaagcctcaccttcgtccgatagtcataaccttgtccgttggtgggattttgttaacttctatttttctgattgccgttattatggtttttcagcgcgaaaatatagaaaaagatttgcttgatgctaattcatcgtacgctatgaaaatgtcagatgtaatgagtggttatattgaaatggctcaaggtgaattagcatatggagcaaaaaaaataaaatcaactaatgatattgactcacttaaagatgaggcggataggttaagattgcagtctggtatgtttaattcagtttttgttgttagtaatgatgctgttgttctggcgacttcgccagaatctcttgatttagttggtacccgcttgaattcaagtgccagcaaattggcgattgaggaaaagaaaccattcatatcttcaccgttcaaatcagttactgggaatttgattattttgttgtcacatcctatttatgataagaatggcaattacatagggcatgtcggtgggtctatatatctaaaaaaacatagtttatttagcgatgttttgagcaggcattttttcaagagcgacactgaaattagcattgttagtgatgatggaactgtgatctttaataacgataacagtgctgttggtcggcccatggttatgtctgatgatttgaaatcaaagttaacggagtctgatagaggtgagggggaatttttttttcggggaatagatatcttctgggttatgctcatatga

SEQ ID NO: 239750 - DNA, 270 bp, Klebsiella pneumoniae
atgaataatattaaaatcattacgctctttaacaccaatgaaaacataccatttatgatctgtatagttaaagatgttgaagagaaggagtacgggataaaacttactctcgaaaatgacaataacatctttatcaaagattacggttcattctttctgtctgaatcagcagatgattacgataaggcgcgaatggtaaatgtgtatggaagatttatttctgaactcagccaagtcagcgaagaaacagtaagatcgctgatgccataa

SEQ ID NO: 239751 - DNA, 489 bp, Klebsiella pneumoniae
atggatatcagaaactcagctcgtgctttacttattgatactaattataaggttctgttatttaaattcagatttaaaaatataaaggataatctcgattctagtgttaatgaattctggatcactcccggcggtggattggaagctaatgaaaattttgaacaagctttaaaacgtgagctagtagaggaaacaggtttaattattaaggacaaaccaatatgggtttggtcaagaaatgttatttttaaacgtaatggtgatgaatttattagccatgaacagtactatatcatctatgctaatacttgtgatataggtgagattgacctcactgataatgaaaaaaacaacattttagacaaacggtggtggagtcttgaggaaatgaaattctctaatgagaactttagacccataaatatcaataaggaacttgaaagaataattttaaatggcattcctaatcacccgataaccatcgattga

SEQ ID NO: 239752 - DNA, 633 bp, Klebsiella pneumoniae
atggataccgttggaagcaggctgagatttaggcgaaagcaaaagaagcttacgcagcgagatattgctgagtgggctggcgtcagtgcatctgcagtcacccaatgggaaagtgatgtaacaaaattatctggtgaaaacctgatactggtatgcaaatgccttcaatgttcgccagaatggttggttttcggtaatggcgatattgagaatggtattaatatcaatctcatcgcaaccagagaggtcccggttatctcatgggttcaggctggaaactggacggaagtcattggaaatccagggaatgaattagttaaaacaactcgtaaactgtcagaatcggcatttgctcttagagtaaaaggccattcaatgacatcgaatcatgagcttagtatcccggatggatcgattgtaatcgtagagccagaatacgggtttgttgacgatgcaaatggcaaaatagtggttgcgcaaacagttgcgggtggcgaggcgactttgaaaaagttagctatagacccgccatattcctacctaatcccattaaatccatcgtttaaacctattgaggttacccaagatacaaacctgatcggtattgttaagcaaatcattatagacctctaa

SEQ ID NO: 239753 - DNA, 198 bp, Klebsiella pneumoniae
atgttaaaaaatcaagtcgtcgaatactacggcggcattactaaaacagccattgcgttaggggttacccatagcgcggtgtgtcaatgggggagtgtaatccctcaaaaacaagcatttgtcatcgaacgaattacgaaaggcaagctgaagtatgacgccagcctttaccaaaagggtacagattcagccgcttga

SEQ ID NO: 239754 - DNA, 465 bp, Klebsiella pneumoniae
atgaaaaacacggccagcacctacaacatcgagacgcctgacacggtgtattacagctacgatctgacccacttcgattactttgtgggttcgtatcgcgggcagacgttgttgatggcgaactgcaccttcgaagagataatggatagcggtgaagtgattatcgctaacggggtttccggtaaggctccgacagataacgacaaaacaaacaataagggcgctgcaaaaacagaggtaatcactgcttcaactaaagaagtaacgcttactgacgcaaaaaatgcatggacaagcgggaatacatcgctatcaagcgcccttgatcttaccgggagtgccatagtttcaggtgtcaattcggcggccaaatcggtatctcaagtatgggataactcatcaacagcggtcgcaaaacagatcaaaagcacggtggctgattttcttaaaaataaggtgatgtga

SEQ ID NO: 239755 - DNA, 351 bp, Klebsiella pneumoniae
atgataaaaaatgccttaatattctcagtcctactaatagtatcgacgatttcacacgctgaaactcttgaagaatttttcaataaaaacaaagttgttaacaatgatgttgagattagattagctattaaagaaaaagcttatcaactagcctcatcagaggcgttcaccgagggcgctaatgatctgactggtagaagcagcatgttgatgcgtaaagatggtggcagttatgctaggtatgcggtgaaaactcttattgatgcttgcaataacattggcccttatcaaagcaaccttgatgacgcagcatgtggtagactagaaaaactgagtggtagcatcaagtaa

SEQ ID NO: 239756 - DNA, 1410 bp, Klebsiella pneumoniae
atgtttaaacctgaaaacgtaggatctataccaaatgaagaaatagtaaaatttgtatctatgcttgaagaaaatgatgatattgaaaaagtatcaaccgatataaacaatgcacataaagcttatatttacaataaagcactggaggttataaacgaggaaaatatatttgaaataatgtcattaataccacaaccatttttaacaagaaaaagcgaaaaagaggctgatatattatcagtaatatataataagtttttggaaaatacggaaatacccggagcattaccagtattttcattttttagttttttaagtgctttttgtgtgaaaaataatatcacatattcgatcccattatctgaagataaaaacccattggatacgtggatcacggttcttgcaccgtcaggttctgcgaaaaccttttctaatgctcaaataaataaaatgatacctaaaacaccagacggtaaaaaagttattgagcagaatttcacaagaccgaacggagccgcaaaattcattcaggaactgtcagatcttccactgacaaaagatggtgaatcacagtatggtttttggatagaagacgaagcggctcaaatgtttaagcagattgaaaaaatcggctctccattgtcagaaataaaagaatatttattaaaagcatacgatcacgatgttttgaccagaaaaacaaaaacagaaacagtagaaacaaaaaatattattctaactttattttttataaatacctttgaaagttatgtaaataatatatcccaagagtcaatgactgatggtttaatgcgaagatttaatcttgtatatagtgaaaaagacggtagggattttacagattactcaatatataatgtaaataaaattagagatgaagtactcacagataaaatgcttgagtttttcttctcaataaatcccgatcaacattttacattttcagtagaatgtttggagctttaccagaaatattttaaaatatattggcataggaaatacaaaactattttaccgggtaaagaaaatttttatagaacttatatgatgcaatcttggaagtttgctatattttatcatttcattcttggcaaagaaggaaatgtaatagatgaagaatgcttggtgtatggtatgaaaatttcattattgtttgctgaaagcatgaaaaagttttttgattttaaaaccaaaccacagcatgttgaaaaagcaaaaacagatttagataaatatgtaaactatttaaatgctaatacagaaattaaaatgcgagattttacccgtaagtttacagtaaaaaaagcagaagcattaacaattctaaaagcaattaaacaagcaagattggttcccaaccatattttatttaaagaaataaaagaataa

SEQ ID NO: 239757 - DNA, 348 bp, Klebsiella pneumoniae
atgagctataaggatagatacaacaggaagcacagcattaccctatgcttcaatgatgaagaatttgcacaggttgaagaactggcttctatgttgaaaaaacccagagcaacagccgttagagatcttattctcaataaagagtttaaactcaaaaaagaaataacaaaaaataaaactggcgatgtatattttgaactccataaaataggagtaaacattaaccagattgcaagagcaataaatactgatattgataaatttatttctcatgagtttgcagaagattttttaaatttgtttgaggaaataacaaatgagatagaagaaataaaaaggagaatataa

SEQ ID NO: 239758 - DNA, 1401 bp, Klebsiella pneumoniae
atgtaccataaaataataggaggtaaaaaaagcaaaggtcaaagaaatataaataaaagcattgagtatttattgagggagaaaaacccggaacaacagaaagacataaaaatattatcaaccacaacaaaacaagacctaatcaattttgaaaattttattttagataaaaacaaatcaaacccatatgtttgtggtgttttatcttttgaagaaaaaacaatatccgaagaattaaaaacaagaataataacagagtttgaggacatattatttgcagggattcaaccagaaaacaggccccctgttttatgggttgaacataatgacaaaggcagggtagagttaaattatttaacttttaatagtcttcaagataaaagatcatacactgtatatttagataaaagagatcgaggcttggtaaatgattactctgaaataatcaattatgaaaataatctatcaagtccatttgaagaaaaagaaaataaaaatacattagtaaacacaccaaaaaccaatataccaaaagacaaaaaagaattcgtagaaaaattaaatactgaaatattagcattaataataaatgaagaattagataacagggaagaagcaataaagcatattgaaaatatgcccggtgtaaaaattaacagaatacgaaaaaatcaaatatctgtaaaatgtgatttttttgacgataaaccaatagttttaaaaggtgatatatatgaagagggaagaaattacagcgattatagaaaagaatacgactcaaaacctaaacgagatccacagcttgttgaagcaaaactcacagagcttaaaagatcattttcaggaagaattgaaaaaagagaaatcagaaatagagaaagatttaaaatctcacagatcaaaaataaatcagagaatacaaaagacattgaaagagaaaatatcaatattgaatatggatctattaacaataatattggttttactgtcaacaacaacagctttacaaataacaacgatattttatttactttggagaaaataaataatgagtcaattaatccagaacataaaacaaaaacaacaacagaagaaacagcaagatcagaaagaaaaagagatattgaacaaattaatcagcaacaacaattcattaatagaagagttgaagagattagacgaacgcagcagcagatcggaaaatctcttgactcaacagaggaaaggattggaagaaatcgaagagcattacactcaattgtatctactgttagaagatacattagaacgttttcagcatattctagaaaaaaccaaaacaaaagatactttgaagaaaaaagacgaatcgaagaagaaaaacaatttacccaaaggagaagaaaaaaatttatatattga

SEQ ID NO: 239759 - DNA, 1296 bp, Klebsiella pneumoniae
gtgagtcaccagggcgagtacgcgctgaaaaacatcaacgggttaggtttcactgagcggatcaccctcagttctccggggctggtggaagttcgctgtcgtcgacgcaatgagcagggcagtaataactcgcgcgacaatatgtactggcaggctttgagagggaggcttctggcaagaccggtatcctactcaggtgtaacaacctgggcaattaccgttgaaaccggagggaagctggcggcacagtctgacaggcgcgtcagcgtggtcgctacccgtgaatatgaggggggaggtaacagaactataagcggcgcattccgtcatgtggcaaatagtcttggatttaatgctaatcagctcgacacctctgcaataaatgctcttgaaactgcctggtggacgccgaggggagaatattttgactatgaggcaagcagcgacagtgcttcagcgaaagatattttcgacaaaatcaccgaagcaggcatgagctattttttgctatcagatgggctcttatctgccgggcgcgaaggtatcaaaacctggaccgggatcatcactccccaggatacggtagaggaaatgcagacatcattcagggccccttctgatgatgattatgatggtgttgacgtcacatatattaatccggttacctgggcggaggaaatcgttcagtgtcggacagctgataatcctgtgccacgcaaagtggagtcgtactcgctgggcattgtaatgactgcagatcgtgcttaccggataggtatgcgcaggctcatgaaatatctgcaccagcgcaggacctatgaatgcacaactgagcttcttggctggtgctatcagtttggcgatcacatcattctttctgatgatattccgacgggtaaaacaatcagctgtctgatagaaggcgtgacattcgatgatgaagttatcacgttaacagtcactgagcttcttgactggagctatgctaatccgcgctgctggattcagtttcagggggggcggccgtcgactcgtttgctaacgccgacacgtgtcgatgacttcacccttactataccgtacaacgacgacctgcacccggaagactggattatggatgatccggatgttgaattacctcgcctgttgttttgtgacagtgagaagggggcgcggcacggtatcgttcaggaaattgtcccgtctgatgactgtacttgccaggtcacagccccggaatataaagaaatcttttacgcatacgacgacgctacataccctggcgacgtagcttag

SEQ ID NO: 239760 - DNA, 270 bp, Klebsiella pneumoniae
atgtcatttaccctcacgcaaaatttgaagtcgtttcgtaccatcccataccttaatctcgttgagccgcttagtgccgcgcctgtagctgtgacatataccgccaaaggggtcgacagtatcaacgggactactgcaacggtgctgtttgatacgcaggttgaggggctggaggctacaggtcagctctactactctttcgagtttactaaccttgcaaccatttttgaggatgcagaaacagcacttaaaaaagagatttcagagtaa

SEQ ID NO: 239761 - DNA, 276 bp, Klebsiella pneumoniae
atgtcattcacagtaacgaaaagtattaagtgtatatcgtcatatccggaatatggtgcagaatcagaagttaccactattgaaaaactggtgacatttcatgcccgacaggtagtcagtctggatgcggaaaataatgttcaggtgctttttgatgtggaagttgatggagccagtattaccggggtttactatcactcctttgcctattcaggaacaggaagcccgatagaagaagcggagctgtctctaaaagagacgctcatcgcagaataa

SEQ ID NO: 239762 - DNA, 1569 bp, Klebsiella pneumoniae
atgaatgcatttatgacagctatggatatggggattggtgaggtcaggataccggcgggagaatatattctcgaatctactgtgagcgttacgctgacaatgcatatgtcgctcacattcgatccgggcgtaatcatttatgttgattccccgatggacgcatttgatatcaatattaacgggttcaatcttgatatccgggcggctaacggcaggattatgagccgctggggcagtgtggatggctcatctgtagctgcatttcgcatcactgatgcatccctggataaatcggtatcgactgactcattaaaagtaggttctgctgatggcacgtctcgattcgggtacgctgtttggggctccgggattaacctggctacgttctaccgctgtctgttacagggcatacgtggcatttatcttgaatccccactgataagcggaacaacatcccatgctatgggtgcgcaaatttttggttgtgagatatataccacaaatgaatgtgtaaaaatcgcgaaccagggagcgcttggggctgagggtattggcgtgtggggctgtgagtttgtaacaggtggaacggccattattattgataacgtcggcctgtcatcatcagcatatctgccaccgctggcacgaatcaataacaaccactttaactgctatcaggctctatatgcacgtgacatcagtcgactgcacttcggaggtaatgatgtacagggaacgtatagtgcggataagcctattaacggctggcttgagcttggtggcgtacagcagtttctgcatgccagcaatagctatagcgccgctgcaaccggatctggaacgacaggtgataactgtccatcagtgattcaccagtttgccagcacgctgtcgaacgcgttttttaccagcaacggtaacgtctatcagctggatgcaatgacccggccagcctttagtttctcaggcacggcaaatattactgagattcaggtatcaaacgacaggctcaattcttccgggacgtgggtcgattcagcgtggctggcatatgtcagactgtctcctgaaatgactattggtaatctaggcgcagccggagggcttgactacagtacaaaagggtctttctctgccggagtattgtctcttggagcgcgcccatctcaggggtttacatactctatccctgtgagcatagtgccaaatagttcgggaatttctcagataacattcccctcgcaaatggttggcaaggaggtgaatatactgctggcagcagcaaacgtatcgttcacgcatggcacaaatatggtgtgccctgaccagaagtcatttgtaatgacattgccaaatgccatcaaggtgtttgcgctaaacactacccagtgcattattctggatgtgggtggaatggcaaaccgtcatacggatattacctcaatccctacatcaagaacatcgccaggatacccgggggcggagatattcgattcagagaacatgattttataccacaacatagccgggtacggatggggcgcgattgaagtaaaagctattagttaa

SEQ ID NO: 239763 - DNA, 1071 bp, Klebsiella pneumoniae; identical to SEQ ID NO: 233834

SEQ ID NO: 239764 - DNA, 1614 bp, Klebsiella pneumoniae; identical to SEQ ID NO: 208688

SEQ ID NO: 239765 - DNA, 222 bp, Klebsiella pneumoniae
atgctaacgtttccaaaaaccaatacgaatgatgacaccccgataaacttacaggattatttcgggcctgatttcgaaatgaggtctacccctcccgttaaaatcgacaacgccaccctcgagctggcaagggcgattctcgaaggtcatagccagccagaatcgcaaattcaagagcgtccatggtgggagctaaacgcccctaaaatgatggacttttaa

SEQ ID NO: 239766 - DNA, 744 bp, Klebsiella pneumoniae
atggcggttgatattgacgggatgtgctgggataacgttgtcagacatgtttactctaccgggtgcgcccgcactgtgatgtttgtctctgctgataatgcagggctacaggccgctccaccagccggaatgagcaattttgagttttattacacccgcaggcagggcagcggtaataacgtcgtagaatattgtttcgcgttcaacgacggcatacagcgactgcaagggcagattggcacaccaacaaacgacgcctgttccatatctcaccaccgcaaccagttcaataatactgtccgtaattgcgtgtttattgacacgtccagcgtcaagcagcgccgtctgatatcaacaaacgggtacgacactgagagtgcgtctgttccgtcgctgacggtagagaactgcattttctactgcaaatggatggtcggttcggacatcattgcgcaactgtctacaggcaccagaacgattgcaccggcatcacagatcgttctcaacaataacatcatctggtccgacgcgtggagcgcagcgccagacctgagcgcactggcaaccctgagcaatatcacctgggcgaaacctcagtacgctctattgccgccgagcccaccatcaacccgtcgcggcgcaattaatcttggcgttccagctaatgcaaggggggctggtaaatcaaacctgctgctcgatatcaacgggcgttcaggcaataacattggctggttacagtga

SEQ ID NO: 239767 - DNA, 1071 bp, Klebsiella pneumoniae; identical to SEQ ID NO: 78944

SEQ ID NO: 239768 - DNA, 246 bp, Klebsiella pneumoniae
ttgaactacacggaaccacatgtcataatcttgccaagcaggaaaagatgtatcaaatccaccgacttcaataaaatatttagttttagtaaaaacttgattacctataatatttctactaccaagcatttctttcgtaactataccctcatagacttcaccaatataatccccattattccccctaaaaactctattactagaaataatattccatccatgactttgaaaactttccataaataa

SEQ ID NO: 239769 - DNA, 378 bp, Klebsiella pneumoniae
atgaaactgactttaccatttccaccaagcgtaaatagttactggcgcgccccgagcaagggcccgctgaaaggcaggcatctggtaagcgagacagggcgcaagttccagcaggcagcgagagcggcgattattgagcaactgcgagccgttccccggccatcctctgatctggctgaggttcacattgtgttgtatccgccggatcagcgccgtcgggatatcgataactacaacaaagcgctgttcgatgccctgaccctaaccggcgtctgggaggatgacagtcaggttaagcgcatgctggtggagtgggggaacatcgtgaagaaagggaaagtagaaatcaccatccgacgttttcgtgcagtggcctga

SEQ ID NO: 239770 - DNA, 132 bp, Klebsiella pneumoniae
atggacttcctgccggactgctttcttcgttatcagccgctgaatctggtggcgacccctacgcagtatcacccaaaggagcaaaaggcccattccagtttatggatggaactgccagagacttgggtttga

SEQ ID NO: 239771 - DNA, 141 bp, Klebsiella pneumoniae; identical to SEQ ID NO: 218064

SEQ ID NO: 239772 - DNA, 234 bp, Klebsiella pneumoniae
atggataacctgccgtcggaaactcgcaattacgtccctaaagtcatggccggaatgcgccccggcgccgggatggccgtagaccgcgcgatgccgggtcaggctggcggtgtttataacttttatggcaccaaaatcaccactcaggcccagaacgtggaacagcttaccagtgacatcaaaaagcacggcgacaaccgcgtcatgctaatggctggctactcaggacaataa

SEQ ID NO: 239773 - DNA, 231 bp, Klebsiella pneumoniae
atgtgcaaagcgatggcgaacatcagcgactgcactgtacccgtcatgaatcgcatgctgatgtacatgttcggcgccagcggtcgggcttacgtgcgtgacgatggcaaccatgtcatgagctacgtattcgagttccagctttccgattctgagctggccatagtgcaaagctccggcgcgcttccctcccctcccggggtaaaagttaacatcgttcaggaggtctga

SEQ ID NO: 239774 - DNA, 231 bp, Klebsiella pneumoniae
atgtgcaaagcgatggcgaacatcagcgactgcaccgtgccggtcatgaatcgcatgctgatgtacatgttcggcgccagcgggcgggcttacgtgcgtgacgatggcaaccatgtcatgagctacgtattcgaattccagctttccgattctgagctggccatagtgcaaagctccggcgcgcttccttcccctcccggggtaaaagttaacatcgttcaggaggtctga

SEQ ID NO: 239775 - DNA, 780 bp, Klebsiella pneumoniae
atgaccagacaatggattgaggaggtcgccggaacctgtcgggctttcggaacggattatctgcatgtcattatcgatcaggcgggggtggatttttccgttattccggcgctgaattcgctgtcagttgagtggcagtcgctttttcatggacttccggaagcatttattgtcgatgatgctccgctggtggcgcgctttacgcttgatgatcttgagcaaatgcgctggttacaggatatcagccagcaacttgccatccaggcgccgctgctcctgttctgcacatattggcccttttcggcgctagcgaactggctcacgcagtgtatggatattctgcaggaagggcgcagcggaattttacgcttttacgatacccgggtatttccgctgttgtttacgcacattctcagtgacgagcagcaagagccattgatgcgtccggccctgttttgggcgtggcaggatcttgacggccaggcgaaaggcatcaagggcagtggtctcccgccggaacgcgatgaaaaggcgccaaaaatagaactcagcgatctccagcttgagcatctgatgtgtatcagcgatgtcatcgtcatgttgtcgcactgtgctccgcctgcgggcatgtttgactcaagacagtcactgttttcggcctgttaccagggcatggtggaggcgacacgccagggtcttcttctggatgacgctcgtgaagactgggtaatgaagaagtggcttgccgacgtaaaaaccagtgagagaccttcagaatga

SEQ ID NO: 239776 - DNA, 2379 bp, Klebsiella pneumoniae
atgagtagcgtgaaatcgttgttgttcagccacaaccaccacctgctttcggtgaagggatgtgaagccgggcttgatgtgctggccttcgagggcgatgaagccctgagccagccgttccgctaccgtattgaattcaccagcgcagaccatgccatcagcaaagagatgatgctgatgaagtcagcctccctgacgctgcaggcgccggtggctcagggcttcggcatcaatgttcagcaacccgtgcgggtgatccagggtgtggtgacggggtttgaacggctcagtacctccagggatgaaacgcactacgcgctgacgcttcagccgcgcctggcgctgcttaaccgctcgcaccagaacgccatttaccaggaccagtccgttccgcagattgtggaaaaaatcctccgcgagcgccacggcctgcgcggtcaggattttctgttctcgctgacaaaaacgtatccgcgacgcgagcaggtgatgcagtacggcgaggatgacctgcgctttatcacccggctgctgggtgaggtggggatctggtttcgctttaccgccgacacgcggctgcacatcgacgtcgctgagttctgcgacagtcagcagggctatgagaaggggctgacgttgccttcggtcccgccgtcagggcagcagtcggccggggtggacgcggtgtgggagatggcatgccgccaccgcgtcgtggagcagcaggtcagtacccgcgactacaactaccgcgaggcgacggcggacatgaacgcgcaggtggatgtcactcgcggggagaccaccacctttggtgaggcttaccactggggagataactacctgaccgcggggaatgtccatgaccgccatccggcgccggagtccggggcgttttacgcccggcttcgccatgagcgttatctgaacggccagacccggatgcaggccaccaccagctgcccgacgctctgcccgggacaggtgctgaaggtcaccggcggagaggaggtggccagggagtttgctgatggcgtgctcgtcacggcgatgcacagccacgcccggcgcgatgccgactttgcggtggagtttgccggcataccggacagcccggacgtcggctaccggcctgagcccggcgcgcgtccggtgatggccgggacgctgccggcccgcgtgaccagcacccgggaaaacgacatctacgggcatatcgacaaacacggacgctaccgggtgaatatgttgtttgatcgggcgcgctgggaaaccgggttcgagagcctgtgggtccgtcagtcgcggccgtatgccggagacacttacggcctgcacctgccgctgctggcggggacggaggtggcgattggctttgaggatggtaaccccgaccggccgtatatcgcgggcgtgctgcacgactcggcgcacggcgaccacgtcaccattcgcaatgacaaacgtaacgtcctgcgcaccccggccaacaacaaaatccgcctcgacgatgagcgcgggaaagaacatatcaaggtcagcacggagtacggcggtaaaagccagctcaatctcgggcatctggtggatgctgaaaagcagctgcgcggcgaaggctttgagctgagaaccgacagttggggagctatccgggcacagaagggtatttttatcagcgctgacgggcaggtgcaggctcaggggcaggtgctggcgatggagccggcggtcagtttgctgaaaggtgcggtgaatcaggtcacggaatggggaagcattacgcaaacccatcataatgttatcccagacaccggcccattaagcgcactgaccacaggcgccagcgatcttaaacagccgacattgctgatgtcggccccgcaggggattgccgcagtcacgccggaaacaaccctcctgcacagcggtaacgggctgtatctgcagagcctgggagaggtcaacatcaccacggcacagcgctgttctctgaatgccagccaggctatttcactgctggcgcaacaggaggggatgaggctggtctccgccaaaggtccgctgcaagtagagtcgcacggcgatattctatcgctgaccgcgctaaaagatatcaccgtccagtcaacccaggggcatctgcagttgacggctaaaaatggcatcaccctgggttgcggcggcgcatatatccgtcttaccccgcagggagaggtacagatccacggaccgggggtgattagccttaaggggcagcatgatttgcaggggccggtcagcgaggcgtttcccttgcctgagctaccggcatcggtgtgtaaagagtgccttaaaaaagcccaggcgctggcgcagggcttcgtgccgcgggaggcatag

SEQ ID NO: 239777 - DNA, 2655 bp, Klebsiella pneumoniae
atggaaaatccagccagcctgttacgccgtcttaatccctgctgtgcccgcgcaatggagggggcggcctccctgtgccagacccgggcgcatgccgagatcctgcccgagcactggctgctcaagctgctggaacagggggaaggcgatctgacggtgctggcgcggcgctatgaatgggatatggatgcgctgtggcaggatctgctgagctggctggataaacagccgcgctcggtacgtcatcgtccccagctctctgaccataccctgaggctgatgcaggaggcctggctgattgcctctctcagcggcgaagcgcagatccgcagtgttcacctgctgatggcgctggttgaaaaacagaatctgatccagtgcgatggcctgtggccgctgttaacgctgggccagcgtcagctggaacgcctgcgctccttgctggatgcccagtccgacgaacgtccgccagcgcagcaggaagcggcgctggcgcagccccatggcgggggcgtggaatttgtggggcgtcctgcgggcagcgaactgaatgcggatgggctcaacccggcgctgcagaacgcgctggacaaattcactctcgacgtcaccgccaaagccagagacggccagattgacccggtgttcggacgcgacatggaaatccgccagatggtggatattctctcccgtcggcgaaaaaacaacccaatcctcgtcggtgaaccgggcgtgggcaagaccgctctggtggaaggcctggcgctgcgcattgccgaaggcaacgtccccgacgcgctgaagccagtgtcggtgcgcacccttgacctcggtctgctgcaggccggcgccggggtcaaaggcgagttcgagcagcggctgaaaaatatcattgaggcggtacagcagtcgccttcgccggtgctgctgtttatcgacgaggcgcacacgatcatcggcgcgggtaatcaggcgggcggcgcggatgccgccaacctgctgaagccggcgctggcccggggcgaactgcggaccatcgccgccaccacctggagtgaatacaagcagtacttcgagcgcgacgccgcgctggagcgccgctttcagatggtcaaggtggatgagccggacgacgacaccgcctgcctgatgctgcgcggcctgaagtcccgctatgccgaccaccacggcgtgcatatcacggatgatgcggtgcgcgccgccgtgacgctgtcacgacgctatctcaccggtcgccagctgccggacaaggcagtggatttactcgacaccgcttccgcccgcctgcgtatgagtttggataccgtgcctcagccgctgacccgcatgaaggcgcagctcaccgcgctggcgatggagaagcaggcgctgctggaagatattgcgctgggcaacagcgcccgcggcgatcggctggcggccattgagcaggaggagatccgccttattctggcgctggatacccttgaaactcagtatggtcaggagctgcagctgacggaagcgctgctcgcctgtcgccgcgatatctcccgccaggcggaaattagcgatctacaaaccgcgcttatcgccgtccagcagggcaatccgctgctcgggctggacgtcgacgtccgcaccgtggcgacggtgattgccgactggaccggcgtgccgctctcctcgctaatgaaagatgagcagacggagctgctgagtctggaagagagtctcggcaaacgggtggttggccaggaggcggccctgagcgctattgcccggcgcctgcgcgccgcgaaaaccggcctgacgccggagaacggtccgcaaggggtgttcctgctggtcgggccgagcggcaccggcaaaacggaaacggcgctcgccctggccgatgcgctgttcggcggcgagaaagcgctgatcaccatcaatctctccgagtaccaggagccgcacaccgtcagccagctgaagggttctccgcccggctacgtcggctacggccagggcgggatcctgaccgaggcggtgcgcaaacgcccctacagcgtggtgctgctcgatgaggtggaaaaggcccatcgcgatgtgatgaacctgttctaccaggtcttcgaccggggggtaatgcgcgacggcgaggggcgtgaaatcgactttcgcaacaccgtgatcctgatgaccgccaacctcggtagcgacctcctgatgcagctgctggatgaacagccggaggccagcgaatcagacctgcacgagctgctgcgcccggtgctgcgcggccacttccagccggcgctgctggcccgcttccagacggtgatttaccgtccgctgccggcggcagcgctgcgcgccattgtcggcatgaagctcgggcaggtaagtcagcgtctggcttgccattacggaatcaccaccaccctcagcgagagcctgttcgacgcgctgaccgaggcctgcctgctgccggataccggcgcccgcaacgtcgacagtctgctgaatcagcagatcctgccggcgctgagtcagcagctattgagccatatggcggcggggcagaaaccgcgccatgtgacgctggggtatcacgaagaggaaggcgtcgtgatggcgtttgacgagggggcaatcgccgatgagtag

SEQ ID NO: 239778 - DNA, 492 bp, Klebsiella pneumoniae; identical to SEQ ID NO: 214688

SEQ ID NO: 239779 - DNA, 1707 bp, Klebsiella pneumoniae
atgagccccgcgcagcagcgtgggctggcgctgtgggccagtctgctgagtgcgctggtgtgcctgctatttttgccggttccccgctggggggcgtggctcattctgctggtcacgctggccctgatcatcgggatctggcgcatcgccagtcgtcgtaccggacgtaacgtcgcatcaaccctggcccctctcccggagggcgcttatcgccagccggtggtcctcgtttgcggcgacctgccgagtgtctggccgccagcgtcaccggtgcgagtcgtcaaacagggctgctggatccgcgtggaaaagacggaggagctacagcaggtcgcgcgccaggtattgagccagcggccggaatgggggcctcagctgtcggtgctgctctgcgtctgcccgcagcggcatgcgcaaagcgatgcgctgaccagcgctctgctggccctgcgctggcaactcagccagctgcgccagcagatggggtatgccgtaccgctggcgctgcaggggcaggtgggcagcgcgatgagtcgcgacctgttgtggcaggcggcgataccgggtgaggcggtgaaagtctggcagccctcctgcgccccctgttccgtaccggcctgggtaagcgccggcggggcggccgcgctggagcagcaggtgctgatgaacagcctgatgggctggtctgaacagcacgtctatgccgtgttgacggaagagaataccgacctgccacctctgccccctgcggccgtgctgtggggcctcgggccctcgctgcctggaagtctggcatcgtcggcctggacgacgtggttatcccgacatagcggcctgtcgcgggtagctggctggcagccagatgagagcgacaccggggacgcttcagctttgccggaattcatcctgccgcagttaccggcgggacggggactcacgccacgaggcagggcctggcgcgcggcgctcgcgattttcaccctcgcggctgtcgccgcgctgctcagcagtggctggaacaatcgacaactgctgcagcgcgttggcgtcgatattgcccgttatgagcggattgcgatggatgattatcgaccaaaagccagcgctgtcagggtgctgcgtgaagatgccgcgctgcttgatagctgggcgcgtaacggcgtcccgctgcgcctgagtctgggcttatatcgcggggagcagattcgcctgccgttgctggaggcgattcgcgtttacgtgccgcctccgcctccgcccaggccggtgcagcgcgttgccccgaacgtcatccgccttgacagcatgtcgctattcgataccgggaaatgggtactgaagcctggttcgacaaagcggctggtcaactcgctgatggacattaaggccaggcccgggtggctgatcgtggtggcgggtcacaccgacagcgtgggtgaggaaaaagccaaccagctattgtcgctgaaacgtgcggaatcggtccgcgactggatgcgcgataccggcgacgtgccggacagctgctttgccgttcagggctatggcgaaagccgaccaattgcaacaaacgatacgccggaaggccgtgcgctgaaccgtcgtgtcgaaatcagtctggtgccgcaggtagacgcctgccggttaccggaccaaccctctgcgtcatcccaggatgatggcgcttcactacacaatggagagtaa

SEQ ID NO: 239780 - DNA, 690 bp, Klebsiella pneumoniae
gtgaatgagcctaaacgcggcaacgccgcgtccattgatattgatgcgctgctgcagaacacctggctgcaggttatcagcctgcgccacggcccgcagttccgcgatgaggaagggtacacgctatggcagcgctgtattgctgatgtcgagcgcgtgcaacatgagctgaaggcgagcgggcttgatgacgccagctgtcagcatattctcaccgcccagtgcgcgctgctcgatgaagccgtgaaagggcgcggcgtggaggatgaggcctgcctgcagtggtatgacattccgctgcaggggcacttcctcggcaccatggacgccggcgacaccctgtgcgagcggatgcgtgatgtgttgcgtgaaccggcgcccaacctggccgtggtcacctgttttcagagggtgatgctgctgggttttattggcagctttcgctccctccacgaccccgagcgcctgaagctggtcaacgcgctcggtgagcgtgttcctccttttcagtgcccggctaccgctcccgtactggtagagagtcgcgccggtctggggataagcggctggctggccccatggccggtacgtattggcctgagcgtggtggtggtactcgccctgtggtggggactcaaccactggctcgatcacctgctgctgaccttgttaccgggggaggtgaaatga

SEQ ID NO: 239781 - DNA, 1344 bp, Klebsiella pneumoniae
atgatgaaaacggaacgtccgttgtggggccggggcattatggtgtcgcctcagcattttcaacagcaggctgcgtatgcagcctggactgcggaagtgattgcccggatgggtcttaaccacccctggggagtggttgaggcgaccttcgaaccagagatgctcaaactgggccgcctgcaggctcacaggctgcaggtccggttccaggatggcacgatgattgatacggacaatgccgatgcgctgccgtccgcgctgtcgctggacggcgcatccggcgaggcggtgatcgtgctggcgctgcccctgatgcaggcgaatggcggcaactgtctgaagccggaggaggttgccgaaaggccggcgcgcttccggcagcgctggcgcgatgtccgtaaccagtttggggatgatacccggcagattgccgtcatacagccggagctgaccctccgcttcgcccaccaggacaacagcgattacctgacctgtccgcttgttcgcctgcagcgggactcgcagggggcctggcttatcgacgagacgtttctcccgccgctgctgcagatccagggcagccgctggctggcgacgcagcttgaacagctgctcatccagctccgggctcgtctgacgcgcctgatggccatgcgtcgcgaaagcaatgaacggatggctgattttgccgtggctgatgtctctctgttctggttgctgaatgcgctgaacagcgccgagccggtgctggggtactttctgcgttaccggcaaagcccgccggaacgcctctacccggagctggcgcgcctggctggtagcctgctgaccttttcgctcacccatcaggcgaatgccgtcccgatctatcagcatgaccagctgaacgcggtttttccgccgctgtttgatttactgagcgacctgctggaggcgagcctgccatcgcgggtggtggcgattgcgctggagcatgatgcccggctgcacttctggcaggcgcgtctgcacgatgcccggctgcgggaaggggctgattactacctgtcggttcgttcgtcggtaccggtcgcccaactgcaggagcagtttccgcgccagtgcaaagtgggcagtccggatcatgtcaaagccatcgtcaactcctcgcggacaggggtgcccctcacgccattgcgtcatgtgccggcggcgatcccgctacgtctggaaaatcagtatttcagcctcgatgtgtcccatcctctggcaacggaaatgctgcagagcggcacctgtatgttttacgtgccggggatgctcggtgagcctgaacttgaactttttgcggtactacgaacgtga

SEQ ID NO: 239782 - DNA, 468 bp, Klebsiella pneumoniae; identical to SEQ ID NO: 203374

SEQ ID NO: 239783 - DNA, 726 bp, Klebsiella pneumoniae; identical to SEQ ID NO: 25060

SEQ ID NO: 239784 - DNA, 462 bp, Klebsiella pneumoniae
atgctcaatgaaaacggtggcgttgtcacccgaacacaggaatttgaaccaggcgggcaggtactgagccggggagaatggttaaccattatccgggttaaccggagtcagggggaggtgagttcagtcgaaacgccctgttatcgctttctgggctacagcggcacgatgaaactcacgcccgaccgtatcacggactacaaagccccgacagcggaggaagccagcgacgcgaagaaagcggcgaagcgcccaccgatcgtcaactatccgggggaagggttccgggaaatgacaaaagccgagtgggcgaaattacccgctgattataaaggcgtgcggggtgctgcagaaaccgaaacacacggcgcttaccgcttccgccggtgcatgacgcacggctgtacgcttgtgaatgtgtatatcacagacatgaaaaccgttgaaattccgaaaaaataa

SEQ ID NO: 239785 - DNA, 204 bp, Klebsiella pneumoniae
atgattcacccagcgctgttggtggttaatcgtgcgctcatgacagcggatcgcaatatcacgcgcctgttcaaaagtaatgatctcctcagacagggcagaatggagagacatcgagccctcatactggcttttctctgccgggcgggggtatttgtcgagcgtgaagcaggcatgaatatgatcataattactgaccagtaa

SEQ ID NO: 239786 - DNA, 204 bp, Klebsiella pneumoniae
atgattaacccagcgctgttggtggctaatcgtgcgctcatgacagcggatcgcaatatcccgcgcctgttcaaaagtaatgatctcctcagtcagggcagaatggagagacatcgaaccctcatactggcttttttctgccgggcgggggtatttgtcgagcgtgaagcaggcataaatatggtcataattactgaccagtaa

SEQ ID NO: 239787 - DNA, 150 bp, Klebsiella pneumoniae
atggtggttttaaaggtggtggtaaacttcaccatgctggcgctcatcgctcccaccatcatcaaacccataattgatgaggctttcgttatacagctcagcaaccctgattgcgtcgcttcggcgatatacttagagcctaaacggtag

SEQ ID NO: 239788 - DNA, 1131 bp, Klebsiella pneumoniae; identical to SEQ ID NO: 74990

SEQ ID NO: 239789 - DNA, 984 bp, Klebsiella pneumoniae; identical to SEQ ID NO: 233439

SEQ ID NO: 239790 - DNA, 585 bp, Klebsiella pneumoniae
atgagtgcaatcgatactttaagggagcatgccgaagtatggcggctatttggtagtatgccagatgatgcaaccctgagtgctgaggtttcggctctttatcttggtgtaagtgtcaaaacattggctcgttatcgccagactggtaatggccctgcttatatccaatatcaggcagaagacagcaaagcaaggaatcaacgagtaaattatcttttaggtgatttaagaacatggcgtgatcgtcataaggtcagcagcacaatggaggctgcacaggtccgtggactggcttttacttcgttggttgactttatcgaaccggaacctttctggactattgataataaaatttattcacatgttcttactgtttctgacgaaatattcaaggaactattaaatacaagccgtgcagaagttatctggatctctgtggaaaaagttttgtctgaggattggcatactgcgagagaacggcagagatggaatgatctgtttgttggggttatgacaggattggtagatgcttgtgtggctgagcaggagaggcatgtattgtatgaagaatttttgcaatcataa

SEQ ID NO: 239791 - DNA, 1458 bp, Klebsiella pneumoniae
atgaaaatgacacttactcagtcgattataatcaataagttatctatcgacgtgaaaccagatctcgaccagcaagggcgagtagtatacttacccaatcctgaacgaaagccgtatattatcactgacaaccacagggattcacccgtaggtttcggtgtcaaaatcagtgccaccaaaaaaacctatatcattcaacgacgggtggcatcagcagacaagcgaccctcgacgggtggcaaggcaccgaaacaggttatcagatctacgattggtaatgtttcagattttgccaacattgatcaggcacgcgattctgctcgcaaattcgttgaaactatgaagttgaccagacgaaatccgaatgcagtaaagcgagaagcagaggcttctgagctaacgatcagtgaagtttttgcgcaatacagaagtcatcttatgggcagatcgaaaccggcaaagcccaacacattaaatgtgctgaacaaagccgaaaaccgcctgaaagagtgggaaaatcttagagtaaaagatctgacaggcaacgagatattgcgcaagtttgatgagatcgcttcaagagccagaactgcggcagagcagacttttcgctgggtgaatgtggcggtaagacatgcgattgagatcgaagcgggaaatgctcagacacaacaacgacaaccgacactaagctacaaccctttctcaattctgacgatacagaaaaaattcagaacccgttcacagcttgaagaaagctatcgcgcaaaaggtgtacgaaacccactgtcgccaaaagacaccttggggcgatttttaacggcattgcacaacaagagaagcttcaaccgcctgggatgcgattatcttttgctgactgttctgacaggagccaggaaagaagaaacagcttcattgtgctggcgagaagctctgacagaagaagaagccagaacgaccagctatgttgatcttgaaaataggataattcgattttacgacactaaaaaccgcaacgaccatgaacttccaatttgtgatgctacgaagcgaattcttgaagaccgaagagatttagtcaacgagactgaaaagcgagcagataaacgcaaatgggtttttcctgcccggtcgtcgcgaagcaaagttgggcactattcagacagcaaaagcctacgcgagtatatctgccaggaagcaggaatatcgaagctggggatgcacgacctgcgaagaacctttggtcgtgttgcagaagggctcacttcatattctgtggtgaaaaggttgctcaaccatcgcaataccactgatcctactgaacggtatgcaatgcctgataatgatcgaatttatgaggcacttcaaagtattgagctccatatgcttatgactgcaccagagttgtataatacacttctggcttcggcgaaatatcaaccattgccaacaaattag

SEQ ID NO: 239792 - DNA, 2568 bp, Klebsiella pneumoniae
atgaaagagtctatcgacaaggatctctcagaccatacgccaatgatgcagcagtatctcaagctaaaggcgcaacatcctgacattctgctgttttaccggatgggggatttttacgagctattttatgacgatgcgaaacgcgcctcgcagctgctcgatatctcgctgaccaagcgcggcgcctccgcgggcgaaccgatacccatggccggcatcccccaccacgccgtagagaactacctcgccaaactggtcaatcagggcgagtcggtggccatttgcgagcagattggcgacccagccaccaccaaggggccggtcgagcgtaatgtggtgcgtatcgtcaccccgggcaccattagcgatgaagcgctgctgcaggagcgccaggacaacctgctggccgccatctggcaggacagcaaaggcttcggctacgcgacgctggatatcagctccgggcgctttcgtctgagcgaaccggccgaccgcgaaaccatggcggcagagctgcaacgcaccaacccggcggaactgctgtatgcggaagattttgccgaatcgtcgctgatcgagggccgccgcggtctgcgccgtcgcccgctgtgggaatttgaaatcgacaccgcgcgccagcagctaaacctgcagttcggcacccgcgatctggtcggcttcggcgtcgaaaacgccccgcgcggcctgtgcgccgccggctgcctgctgcagtatgtcaaagacacccagcgtacctcgctgccgcacatccgctccatcaccatggaacgccagcaggacagcatcattatggatgccgccacccgccgtaacctcgagatcacccagaatctggccggcggcaccgacaacaccctggcctcggtactcgactgtacggtgacgccgatgggtagccggatgctcaagcgctggctgcatatgccggtccgcgataccgccgtgctggtggagcgccagcagaccatcggcgcgctgcaggagcgctataccgagctgcagccggtgctgcgccaggtcggcgatctggagcgtattctggcgcgtctggcgctgcgtaccgcccggccgcgcgatcttgcccgcatgcgtcatgccctgcagcaactgcctctgctgcgtgagctgctggccgacgttgacagtcagccggtgcaaaaattgcgcgagaaaatgggcgagttcaccgaactgcgcgaactgctggagcgcgcggtgatcgacgccccgccggtgttggtccgcgacggcggggtcatcgctccaggctatagcgaagagctggacgagtggcgggcgctggccgatggcgccaccgattatctcgataagctggagatccgcgagcgcgagcggctgggcctcgataccctgaaagtcggctacaacgccgtccacggctactacatccagatcagccgcggccagagccacctcgcgccgatccactacgtgcgccgccagacgctgaaaaacgccgaacgctacattattcctgagctgaaggaatacgaagataaggtgctgacctccaagggcaaagcgctggcgctggaaaaacagctttatgacgaactgttcgacctgctgctgccgcatctcgccgatctgcaaaccagcgccagcgcgctggccgagctggacgtgctggtcaacctggcggaacgtgcggaaaccctgaactactgctgcccgacctttagcgataagccaggcattcgcattagcgaaggccgccatccggtggtcgagcaggtgctgaaagagccgtttatcgccaacccgctgcagctggcgccgcagcggcggatgctgatcatcaccgggccgaacatgggcggtaaaagtacctatatgcgccagaccgcgctgattgcgctactggcctatatcggcagctacgtcccggcgcagaaagtagaaattggcccgatcgatcgcatcttcacccgcgtcggcgcggcggatgacctggccagcggccgctcgacctttatggtggagatgactgaaaccgccaatatcctgcacaatgccaccgagcatagcctggtgctgatggatgagattggccgcggcacgtccacctacgacgggctatcgctggcgtgggcctgtgcggaaaatctggccaacaaaatcaaggcgctgacgctgttcgccacccactacttcgagctcacccagctgccggagaaaatggaaggcgtcgccaacgtccacctcgacgcgctggagcacggcgataccatcgcctttatgcacagcgtgcaggacggcgcggccagcaagagctatggcctggcggtcgccgcgctggcgggggtgccgaaagaggtgatcaagcgcgcgcggcagaaactgcgcgagctggagagtatctcgcccaacgcggcggcgacccaggtcgacggcacgcagatgtcgctactcgccgccccggaagagacctcgcctgcggttgaggcgctggagaatcttgatccggactccctgaccccgcgtcaggcgctggagtggatctaccgtctgaaaagcctggtctag

SEQ ID NO: 239793 - DNA, 153 bp, Klebsiella pneumoniae
atgctgataaaatatgcccttgtggcaatcatcgtactctgtattacggtactgggatttacgctgttggtgcacagctcactatgcgagctgagtattaaagagcgtaatattgagtttaaagctgttctcgcttacgaatcgaagaagtag

SEQ ID NO: 239794 - DNA, 237 bp, Klebsiella pneumoniae; identical to SEQ ID NO: 212139

SEQ ID NO: 239795 - DNA, 408 bp, Klebsiella pneumoniae; identical to SEQ ID NO: 212136

SEQ ID NO: 239796 - DNA, 888 bp, Klebsiella pneumoniae
atgcttaatcttcagcgcgtgaccatgtttatcgccgtggtagatgccggcagtttcaccctggccgcagcggcgctggggcagaccaaggcggtggtcagctttaacgtacggcagctggaaaatgagctgggggtgacgctgctgctgcgttcgacgcggcgtttgcggctcactgacgccggggtgctgttctatcagcgcggggtagcgctcctgaacgcggcggaaaatctccaggatgaggtgcgggccagccatagcggcttaagcggggagctacggatcaccaccacgccggagtatggcgagcaggttatcattccagcgctggccgcgttcgcccgtcgtcatccagcgctgcgggtgcgccacgtctcctcctcccatcatgccgacctcatttcagaacgatttgacgtggcgatacgcctcggtacgctggccgattcccgctatcgggcgacgcggatagccagtttcgcgatcctgcccgtcgcctctccggcctggctggcgagccatccggtgcagacgctgtccgatctggcgcaagctgagtggattattcacgagcgcctgccgacgccactgcgctggcagctgcgcacggatcaccagacagaggtggatttcgcgatagccagcgcgccgcggttttctgctgatagcgctacggcgctgatgagctttgctctggcgggatgcggcgtcgccttgctgcccgcatggctggtagccaaaaaggtggcgcagcgggagctggtgccgctcctgccggaataccatttcccacagcagggcgtgtatgccctttatcccgactcgcagcatttgccgacccgggtgcgggcatttattgacttcctgcgcgagaaggtcggttaa

SEQ ID NO: 239797 - DNA, 1203 bp, Klebsiella pneumoniae
atgacctaccgccaccgcgttgccaccgtttttctgttcggtttttttctcgatttgatcaatatgtttatcgccagcatcgcctttccggcaatcagccgcgcgctggcggtttccgtctcgcagctggcgtgggtcagtaatgcctatattctcggtctgacggtcgttgtgccgttcagcgcctggctcagcgagcgctggggggcgaaacggctgtttttactctcgctggggctgttcagcctcggcgcgctggcggcagggcttgccaacagcctgagcgaactgattttatggcggacgctgcaggggatgggcggcgggctgttaatccccctcggccaggcgctgacgtggccgctgtttcagccgcatgagcgggcgaagctgtcggcggcggtgatgctggtcggcctgctggcccccgcctgctcgccggcgatcggcggcctgttagtcgaggcgttcagctggcgctgggtctttttcgccagcctgcctgtcgctctgctaacctttgtgctggcggtgcgatggctgaacgacacccccggtccggttcgcccgactcgctttcttccactgtcgctgctggccgatcccctgctgcgcttcgcgatgctgatctacctctgcgtgccggggatgtttattggcgtcaacgtggtggggatgtactacctgcaacgcgtcaccgggttggcgccgggggcaatcggtgccctgatggtgccctggtcgctggcctcgtttgccgccatcacctttaccggcagatatttcaaccgcttcgggccccggccgctggtcgtcatcggctgcctgcttcaggcgatggggatcatgctgctgctgaagatcgatgcggacagcccgctggcgctgttgattctggcctttacgctgatgggcggcggaggcagcttatgcagcagcaccgcgcaaagcagcgctttcctgcatacgcctgccgaagagatgcctgacgccagcgcgctatggaatcttaaccgccagctcagcttctttgccggcagcgccctgctcgccctgctgctgagggtattcccgccggcctacgcctggcagggggtatttattagcgccgccgtcattaccctgttgccgctgctgttttgcctgcggctgaataatcgggcgattatccatcgcctgcacaccactctggagaagtcatga

SEQ ID NO: 239798 - DNA, 378 bp, Klebsiella pneumoniae
atgaatccttatctgcaggaagtcctcgatgcccatgtccttatcgaacgctggttaagccatggcgaaggaagcgctgaggcgctgatgaagcgttttgccgccgattttaccatgatccccttgagcggtgagaagatggactacccaacggtgagccgttttttccaccacgccggcggcagccgtccggggttagatatcgtagtggatcagatggaaatcatcagcgagtggcacgacggcgccgcagtgctatatcgtgaaagccaaacgctggcggatagcagccagaacgttcgctggtcgacggcgatttttcagcaagcggaagggaaaattgtctggcgccatctgcaggaaacccgcctcggctag

SEQ ID NO: 239799 - DNA, 993 bp, Klebsiella pneumoniae; identical to SEQ ID NO: 212132

SEQ ID NO: 239800 - DNA, 1137 bp, Klebsiella pneumoniae
atgagcgcgggaagcaccaaatttaccgtcagccgtattgcggctctttcactggtttcactctggctggccgggtgtaccaacaccaataatccgcctgcgccggttagctctgccggcggcgccgcctcttccagcaccaactccggcatgctgattacgccgccaccctccggcgtcaagtccgctcctcaggcgcagccgattcagccgatgcagacccagaccattcagccgcagccggcgccggtggcgcaggagccggtacagacggtaaatggccggatcgtttacaaccgcaaatatggcgatattccgaaaggtagctataccggcggcagtacctatactgtaaaacgcggcgacacgctattctatatcgcctgggtcaccggcaacgatttccgcgacctggcgcaacgcaacaacatcccggccccgtacgcgctgaacgtggggcaggtactgcaggtcggtaacgcctcaggccagccgatcaccggcgaaaacgccgtttctcaggccagcgcaagagcgagcggcggtgcgacgaccagcacaacttctgcacaaaaatcgaccgcggtggttgcttcacaaccgactattacgtattctgaatcttcaggtgaacagagtgctaccaagatgttgcctaataataaaccagcgaccacaaccacaacggttgtcgcgccggtgacggcaccaacaacggtgagcacaacccagccgactgcaagcagtacgtcaaccagttcgccgatctcagcatggcgctggccgactgatggcaaggttatcgagaactttagcggcgcggaaggcggcaataaaggtatcgatattgcaggcagtaagggacaggctattgtcgcgaccgccgatgggcgcgtcgtctatgccggtaacgcactgcgcggctacggtaatcttattatcatcaaacacaacgatgattacctgagtgcctacgctcataacgataccatgctggttcgggagcaacaggaagtcaaagcggggcagaaaatcgctaccatgggtagcaccggaaccagctcaacaagattacattttgaaattcgttacaaggggaaatccgtcaacccgctgcagtacttaccgcagcgataa

SEQ ID NO: 239801 - DNA, 627 bp, Klebsiella pneumoniae
atggtaagtaaacgtgttgaaagtttgttgaatcaactgcgcacgcagggcatcgtcgatgaacgtgtcctcgaggcgatcgcgctggtcccgcgcgaaaagtttgttgatgaagcctttgaacataaagcgtgggaaaacaccgcgctgccgattggccaggggcagaccatctcccagccgtatatggtggcgcggatgaccgagctgctgacgctgacgccggagtcgcgggtgctggagatcggcaccggttccggctaccagacggccatcctggcgcatctggtgcatcacgtatgctcggtagagcgaattaagagtttacagtggcaggcgcgtcgtcgcctgaaacaacttgatttacataatgtttcaacccgtcatggcgatgggtggcaaggttggcaggcgcgggcgccgtttgatgccattattgtgacggcggcgccgccggaaataccgaccgcgctgctggcgcagctggatgatgacggcgtgctggtgctgccggtcggcgaagagcatcagtttctcaaacggatccgtcgtcggggcaacgaatttatcattgataccgtcgaggccgttcgctttgttcccctggtgaagggggagctggcctga

SEQ ID NO: 239802 - DNA, 762 bp, Klebsiella pneumoniae
atgcgaatattgctgagtaacgatgacgggatccatgcgccggggatacagaccctagcgaaggccttaagggagtttgccgaggtccaggtggttgcacccgatcgtaaccgcagcggggcctcaaattcgctgacgctggaatcgtccctgcgtacgtttacctttgaaaatggcgacatcgccgtccagatgggcaccccgaccgactgtgtctatctcggcgtgaacgcgctgatgcgcccgcgtccggacatcgtggtttccggtattaatgccggccccaacctgggcgacgacgtcatctattccggcactgtggccgcggcgatggaaggccgtcatctggggttccccgcgctggccgtgtcgctgaacggctatcagcattacgataccgccgcggcggtaacctgcaccattctgcgcgccctaagccgcgagccgctgcgtaccgggcggatccttaacatcaacgtgccggatctcccgcttgatcaaatcaagggcattcgcgtgacccgctgcggcaaccgccatccggccgaccaggtgatcccgcaacaagatcctcgcggcaacaccctgtactggattggcccgccgggcgataagcgcgatgccgggccgggcaccgattttgcggcagtggatgaaggctatgtttccgtgacgccattgcacgtcgatttaaccgcccatcaggcgcatgaggtggtcaccgattggctggaacgtgtcggggttgacaggcaatggtaa

SEQ ID NO: 239803 - DNA, 1050 bp, Klebsiella pneumoniae
atgatcgcctttgaccaactgacctggctgcacggcaagccgcagagcagtgggctgctgaaagccaatccggaagattttctggtggtggaagatctgggctttgccccggacggcgaaggcgaacacgtgctggtgcggatcctgaaaaacggctgcaatacgcgctttgtcgccgacgcgctggcgaaattccttaagatccacgcccgtgaagtgagcttcgccgggcaaaaagataagcacgcggtcaccgagcagtggctgtgcgcccgggtgcccggcaaagagatgccggacctgagcaaatttcagctcgagggctgccaggtactggaatatgctcgccataagcgtaagctgcgtttaggcgcgctgaaaggcaaccagtttaccgtgatcctgcgcgagattagcgatcgccaggacgtggagacgcgtctgcaggccatcgctgaacggggagtgccgaactatttcggcgcgcagcgcttcggcattggcggcagtaacctgcagggcgccctgcgctgggcggagagcggcgcgccagtgcgcgatcgcaataagcgcagtttttggttgtcggcagcccgcagcgcgttgtttaatcagcaagtgagtattagattaaaaaaaacggaatttaatcaggtcgttgatggcgatgcgctacaattagcggggcgcgggagctggtttgtcgtcacaccggaagaactcgaggtttcgcaggcacgggtgcataaccgcgaactgatgattacggccacgctgccgggcagcggcgactggggaagccagcgcgacgccctggctttcgagcaggccgcgatcgccgaggaaaccgcgttgcaggcgctgctggtgcgggagaaagtcgaggcggcgcgccgggcgatgcttctctatccacagcggctcagctggaactggtgggatgacgtaaccgttgaactgcgtttctggctgccggcgggcagcttcgccaccagcgtggtcagggagcttatcaatacaacgggtgactatgcgaatattgctgagtaa

SEQ ID NO: 239804 - DNA, 480 bp, Klebsiella pneumoniae
atgcgaattggacatggttttgacgtacacgcttttggcggtgaaggcccaatcatcattggcggggtacgcattccttatgaaaaagggctgctggcccactccgacggcgacgtcgcgctgcatgcgctgaccgacgcgctgcttggcgccgcggcgctgggcgatatcggcaagctgttccccgataccgatccggcgtttaaaggcgccgatagccgcgaactgctgcgcgaagcatggcgccgcattcaggccaagggctatacgctcggcaacgtcgacgtcacgattattgcccaggcgccgaaaatgctgccgcatattccgcagatgcgcgtctttatcgctgaggatctcggctgccatatggacgacgtcaacgtgaaagcgaccaccaccgagaagctcggcttcaccggccgcggggaagggatcgcctgcgaagcggttgcgctgctgcttaaggccgacaaatga

SEQ ID NO: 239805 - DNA, 711 bp, Klebsiella pneumoniae
atggcagccacttttccgggcgtttgcgccgtggtgccggcagccggtttcggccgccgcatgcaaacggaatgcccgaaacaatatctctcaatcggtaacaaaacgattctcgaacacgcggtcgccgcgctgctggcggatgcgcgcgtccagcgggtggtgattgccgtcagccccggcgatcgccgcttcagccagctgccgctggcgcagcatccgcagattaccgtggtggatggcggcgctgagcgcgccgattcggtactcgccggcctgcaggcgttgccggaggcgcagtgggtgctggtgcatgacgccgcgcgcccctgcctgcatcaggacgacctcagccgcctgctgtcgctgtgcgaaaccagccgcgtcggcgggatccttgcggcgccagtgcgcgacaccatgaagcgcgccgagccgggcaaaaccgctatcgcccataccgtcgaccgcaatgacctgtggcatgcgctcaccccgcaacttttccctcgcgagctgctggtggattgcctcactcgcgcgctaaacgagggagccactatcaccgatgaagcctcggcgctggagtactgcggcttccatccgcagctggtcgccggacgcgcggataatattaaagtgacgcgcccggaagacctggcgctggctgaattttacctcacccgttcccgacaccaggagaaagcttaa

SEQ ID NO: 239806 - DNA, 318 bp, Klebsiella pneumoniae; identical to SEQ ID NO: 212125

SEQ ID NO: 239807 - DNA, 327 bp, Klebsiella pneumoniae
atgcgcaatacccagaacctcagtattattcgttcagaaccgcctccggcgatcggcgacgagaccacttggtctttgtcgggcgctgccgtgggctttatttcgtggctgctggcgctgggtattcccttccttctctatggcagtaatacactcttctttctcctctacacctggccattcttccttgcgttgatgccggtggcggtggtggtcggtattgcgctgcactctctgctcaatggcaaactgctctatagcgtcagcgcgaccatcctgaccgttgggctgatgtttgcgctactcttcctctggctgttgggataa

SEQ ID NO: 239808 - DNA, 606 bp, Klebsiella pneumoniae
atggcccagcatgacgaaaacgtcgtctggcatgcccaccctgtgacccaacagcagcgggaacagcatcacggccatcgcggcgtggtgctgtggtttaccggcctttcggggtcgggtaaatccaccgtcgctggggcgctggaggaggccctgcatgagcgcggcgtcagcacctatctgctggacggcgataacgtgcgccatggcctgtgcagcgacctgggattcagcgatgaggatcgcaaagagaacattcgccgcgtcggcgaagtggccaggctgatggtcgatgccgggctggtggtattgacggcatttatatctccgcaccgtgcggaacggcagatggtgcgcgagcgcctcggggaaggacgctttatcgaagtgttcgtcgataccccgctggccatctgcgaggcgcgggatccgaaaggattgtataagaaagcgcgggcaggggaattacgcaatttcaccggtatagactcggtctatgaggcaccggaaaaggcggaaattcatctggatggtgaacaattggtaacaaatttggtgcaccaactattagacctgctgcaacagagcgatattatcagatcctga

SEQ ID NO: 239809 - DNA, 1428 bp, Klebsiella pneumoniae
atgaacacgaccattgcccaacaaattgccaacgaaggcggcgtagaagcttacctgcacgcgcaacagcacaagagcctgctgcgttttttgacctgcggcagcgtcgatgacggcaaaagcaccttaattggccgcctgctgcacgatacgcgccagatctatgaagaccagctctcttcgctgcacaacgacagcaagcgtcacggcacccagggcgaaaaactggacctggcgctgctggtggacggcctgcaggctgagcgcgagcagggcatcaccatcgacgtggcctatcgctacttctcgaccgaaaagcgcaaatttatcatcgccgacaccccggggcacgagcagtacacgcgcaatatggccaccggggcgtccacctgcgacctggcgatcctgctgatcgatgcgcgcaagggcgtgctcgaccagactcgccgtcacagcttcatctcgacgctgctgggcattaaacacctggtagtggcgatcaacaaaatggatctcgtcgagtttagcgaagcgcgcttcaacgagatccgggaagattatctgacctttgccgagcagctgccgggcaaccttgatatccgctttgtgccgttgtcggcgctggaaggcgataatgtcgccagccagagcgcgaatatgccgtggtacagtggcccgacgctgctggaagtcctcgaaaccgtggagatccagcgggtggtcgagagccagccgctgcgcttcccggtgcagtatgttaaccgtccgaaccttgatttccgcggcttctccggcacggtcgcctccggtaccgtgcaggttggccagcgtctgaaggtgctgccgtcgggcgtcgaatcgagcgtggcgcgtatcgtcaccttcgacggcgacctgcaggaagccgccgccggcgaagccattacccttgtgctgaaagatgaaatcgacatcagtcgcggcgacctgctggttgacgcgcaagcctcgctgccggcggtacaaagcgccagcatcgacgtggtgtggatggccgaacagccgctgaccccgggccagagctacgacatcaaaatcgccggcaagaagacccgcgctcgcgtcgacgctatccgctaccaggtcgatattaacaacctgacccagcgtgaagtcgagtctctgccgctgaacggcatcggcctagtggagctgacctttgacgaacctttagtgctggatccgtatcagcaaaacccggtgaccggcgggcttatctttatcgatcgcctgaccaacgtcaccgtcggcgccgggatggtcaacgagccgcacctgcaggcatcgacttcggcatcacagtacagcgccttcgagctggagctgaaccagctgatccgtaaacatttcccgcactgggacgcccgcgacctgctgggaggcaaataa

SEQ ID NO: 239810 - DNA, 909 bp, Klebsiella pneumoniae
atggaccaaaaacgactcactcacctgcggcaactggaggcggaaagcatccatattattcgtgaggtggccgccgaattttctaacccggtaatgatgtactccatcgggaaagattccagcgtaatgctgcatctggcgcgcaaagcgttttatccgggaaccctgccgttcccgctgctgcacgtcgataccggctggaaattccgtgagatgtatgagttccgcgaccggaccgctaaagcctacggctgtgaactgctggtgcataaaaacccggaaggggtggcgatgggcatcaacccgtttgtccacggcagcgccaagcataccgatatcatgaaaaccgaaggcctgaagcaggcgctgaacaaatacggctttgacgccgcgttcggcggcgcgcgtcgcgacgaagagaaatcccgcgcgaaagagcgcatctactccttccgcgaccgtttccaccgctgggacccgaaaaatcagcgtccggagctgtggcacaactacaacggccagattaacaaaggcgaaagcatccgcgtcttcccgctctccaactggaccgagctggatatctggcagtacatctatctggaaaatattgaaatcgtgccgctgtatctggccgctgagcgtccggtgctggagcgcgacggtatgctgatgatgatcgatgacgaccgtatcgatctgcagccgggcgaggtgattgaaaaacggatggtgcgtttccgtaccctcggctgctggccgctgaccggcgcggtggagtctgaagcgcagacgctacccgaaattattgaagagatgctggtatcgaccaccagcgaacgtcaggggcgcgtcattgaccgcgaccaggccggctcgatggagctgaagaaacgtcaggggtatttctaa

SEQ ID NO: 239811 - DNA, 1416 bp, Klebsiella pneumoniae
gtggattacttgcccctttttgccgaactgaaacaaaggcccgtgctggtgatcggcggcggcgagattgctgaacgtaagatcaagttcttgctgcgcgcccaggcgcaggtgcaggtggtcgctgaaacgctgtcaccagcgctggccgatctggctgcgcgccaggcactcagctggcgggcgacggaattcagcgactcgctggtggatgatgtctttctggtgattgcggccaccgaggatgaggcgcttaaccagcgggtatttgcggcagctaacgcgcgctaccggttggtcaacgtggtggataaccaggcgctgtgctcgtttgttttcccttctatcgtcgaccgttcgccgctgctggtggcgatctcctccagcggtaaagcgccggtactgtcgcgtattctgcgtgaaaaaatcgaagcgctgctgccgacgaatctcggtcggttggcggaatcagcaagctactggcgcaaccatctgaaaacccgcctgacgactaccgaagcgcgtcgccgcttctgggagcgcgtctttaccggccgcttcgccagcctgatggtggcgggcaactctgcggaggcggaaaaagcgctgcaggatgagctcgacaaacccgaacgcgagacgggagaaattattctggtcggcgccgggccgggcgatgccgggctgctgacccttcgcggtctgcaggcgatccagcaggcggacgtggttttccacgatcatctggtgactcagccggttctcgagctggtgcgtcgcgatgccgaacttatttgcgttggcaaacgcgccggcgagcactcggtgccgcagcatgaaaccaatcagctgctggtggaggcggcgaaggcggggaaaaccgtcgtgcgactgaagggcggcgatccgtttatttttggccgcggcgcagaagagctgcaggctgccgccgaggcggggatcccgttccaggtggtgccgggcgtcaccgctgccgccggggcgacagcctacgccggtattccgctgacccatcgcgattatgcgcaaagcgccgtctttgtcaccggccactataagccggacagcgcccccttcgactggtcgctgctggcgaagagccaacaaacgctggcgatctacatgggcaccatgaaggcagcggaaatcagcgcccagctgatcgcccacggtcgcgacagcgacacgccggtggcggtgatttcccgtggcacccgtgacgatcagcagacgataaccggcacattgcaacaactcgaacacctggcgaaagacgccccgatgcccgccctgctggtggtaggcgaagtggtgcagctgcatcagcagctcgcctggtttcaacatacatcatccgccgaggggtttaacgcttcggtggtcaatctggcttaa

SEQ ID NO: 239812 - DNA, 1047 bp, Klebsiella pneumoniae
atgttttccgcgttgtgccgccgtctgcttccgctggcgctcggcaccggttttgtttttgccgccgcccccgcattcagcgcgctgggcgacaccgccagtagccaggcccgccatatcgccaccgtcttcccgggacgaatgaccggaacgccgccggaaatgctctcagctgactatctgcgccagcagttcgccctgatggggtatcagagcgacgtgcgaagcttcaatacccgctatatctataccgacagcaatcagcgcaagaactggcataacgccaccggcagtacggtgatcgccgcccatgaaggtaaagtgcgccagcagattattatcatggcacacctcgacacctatgcgccgcagagcgataaagacgtggagaacaacctcggcggcctgacgctgcagggcatcgacgacaacgcgatgggacttggcgtattgctggagctggcggagcatttaaagaacgtccctacccgctatggcatccgctttatcgccaccagcggtgaagaggaaggccgtctcggcgcgcaaaacctgctgcagcggatgagcgaagcggaaaagaaaaataccctgctggtgatcaatctcgataatctggtggtgggcgataagctttacttcaacagcggccgcagcacgccggcctcggtgcgcaagctgacccgcgatcgcgcgctggctatcgctcgcagcaagggcatcgccgcctacaccaacccgggactcaacccggcttatccgaaaggcaccagctgctgcaatgacgccagcgtcttcgacaacgccgggatcccggtgctgtcggtcgaggcgactaactggtcactcggcaaaaaagatggctatcagcagcggagcaaatcggccagtttcccgcagggaaccagttggcatgacgtccagctggataatcagcagtatatcgaccacgcgctgccggggcgcatcgaacaccgcggacgcgaggtagtgaaagtcatgctgccgctggtgaaagagctggcgaaagtggagaagaaaagctaa

SEQ ID NO: 239813 - DNA, 735 bp, Klebsiella pneumoniae
atgtccgtactcgatctaaacgcgcttaatgcattgccgaaagtggaacgcattctggcactcgcggaaaccaacgcccaactggaaaagcttgacgccgaagggcgtgtggcgtgggcgctggaaaatctgccgggaaactatgtgctgtcgtcgagctttggcattcaggcggcagtcagtttgcatctggtgaatcagatccgcccggatattccggtgatcctcaccgataccggctacctgttcccggaaacctatcagtttattgacgagctgacggacaagctcaagctgaacctgaaggtctaccgcgcggctgaaagcgcagcctggcaggaggcgcgctacggcaagctgtgggagcagggcgttgagggcattgagaaatacaatgagatcaacaaggttgagccgatgaaccgggcgctgaaagagctcaacgcgcagacgtggtttgccggtctgcgccgcgagcagtcgggcagccgggctacgcttccggtgctggcggtccagcgcggggtgttcaaggtgctaccgattatcgactgggataaccgcacggtgtatcagtacctgcaaaagcacgggctgaagtaccacccgctgtgggatcagggctatctctcggtaggcgatacccacaccacccgcaagtgggagccgggcatggcagaagaagagacccggttcttcgggcttaaacgcgagtgcggattgcacgagggttaa

SEQ ID NO: 239814 - DNA, 1713 bp, Klebsiella pneumoniae
atgagcgaaaaacatccggggcctttagtggtcgaaggtaaactgagcgatgccgagcgcatgaagcttgagagcaactacctgcgcggcaccattgcggaagatttaaacgacggtctgaccggcggttttaaaggcgataacttcctgctgatccgtttccacggcatgtaccagcaggacgatcgcgatatccgcgcggagcgcgccgcccagaagctggagccgcgtcatgcgatgctgctccgctgccgtctgccgggcggggtgatcaccaccacccagtggaaggcgatcgataagtttgccgctgagaacaccatttacggcagtattcgcctgaccaaccggcagacctttcagttccacggcattctgaaaaagaacgtcaagccggtgcatcagatgctgcactcggtggggctggacgcgctggccaccgccaacgatatgaaccgtaacgtgctgtgcacctccaacccctacgagtcgcagctgcacgctgaggcctacgagtgggcgaaaaagatctctgagcatctgctgccgcgtacccgcgcttatgccgagatctggctggatcagaaaaaggtcgccactaccgacgaagagccgatcctcggccagacctatctgccgcgtaagtttaaaaccacggtggtgatcccgccgcagaacgatatcgatctgcacgccaacgacatgaacttcgtggcgatcgccgaaaacggcaagctggtgggctttaacctgctggtgggcggcggtctctctatcgaacatggtaacaaaaaaacctacgcccgcacggcgagcgaattcggttatctgccgctggagcatacgctggcggtggcggaagcggttgtgaccacccagcgcgactggggcaaccgtaccgaccgtaagaatgcgaaaaccaagtacacccttgagcgcgtcggtgtcgaaaccttcaaagcggaagtggagcgccgggcaggcattaagtttgagccgatccgcccgtacgaatttaccggccgcggcgatcgcatcggctgggtgaaggggattgatgataagtggcacctgacgctgtttattgaaaacggccgcattctcgattatccgggtcgtccgctgaagactggcctgctggagattgctaaggtccatcaaggcgaattccgcatcaccgctaaccagaacctgattgtcgccagcgtaccggaagatcagaaggcgcggatcgagaagctcgcgcgggatcatggcctgatgaatgccgtcaccccgcagcgcgaaaactcgatggcctgcgtctccttcccgacctgtccgctggcgatggcggaagccgagcgtttcctgccgtcgtttatcgacaaggtggaaggggtgatgagcaagcacggcgtgagcgatgagcatatcgtcacccgcgtcaccggctgcccgaacggctgcggccgcgcgatgctggcggaagtgggactggtgggcaaagcgccgggccgctataacctgcacatcggcggtaaccgcaacggcacccgcatcccgcggatgtaccgtgagaatattaccgagtcggaaattctcgactcgctagacgaactggtagggcgctgggcgaaagagcgcgaagcgggtgaaggcttcggcgattttacggtgcgtgcgggcatcattcgcccggtgctcgacccagcccgcgatttctgggaataa

SEQ ID NO: 239815 - DNA, 1800 bp, Klebsiella pneumoniae
atgacgacacaggccccaccttccaacttgctgccgctcaacccggagcaactggcgcgccttcaggcggccaccactgacttcacgcccactcagctcgcctgggtatctggctatttctggggcgtgctgaatcagcagtccggcacggcggtagccgcccccgccccggccgccgaggtaccgacgatcacgctgatttccgcctcgcaaaccggcaacgcccgccgcgtcgccgaagcgctgcgtgacgatctgctggcggcgaagctgaacgtgaagctggtgaatgcaggcgattataaattcaaacaaattgctgcggaaaaactgctggtggttgtaacgtccacccagggggaaggagagccgccggaagaagcggtcgcattgcataagttcctgttctctaagaaagcgccgaagctggacgggaccgcgttcgccgtctttggtctcggcgatacctcttatgaatttttctgccagtccggcaaagatttcgacaacaagctggccgagctcggcgcggaacgtctgctcgatcgcgttgatgccgacgttgaatatcaggccgcggccgctgaatggcgcgcgcgcgtggttgaggcgctgaaggcccgtgcgccggtcgctgcgcccgctcagctggccaccagcggcgcggtgaacgatattcacaccagcccatataccaaagaagcgcccctgacggcgaccctgtcggtcaatcagaaaatcaccggccgcaattcagaaaaagatgtgcgccatatcgaaatagacctcggtgattccggtctgcgctatcagccgggcgacgccctgggcgtctggtaccagaacgatcctcagctggtgaaagagctggtggagctgctgtggctgaaaggcgacgagccggtgaccgttgagggtaaaactctgccgctgtcggaagccctgcagtggcattttgagctgacggttaacaccgcgactatcgttgaaaactacgccaccctgacgcgcagcgaatcgctgctgccgctggtgggcgacaaagctcagttgcagcagtatgccgccgcgacgccgatcgtcgatatggtccgtttctctccagcgcagctggacgctgaggcgttaatcggtctgctgcgtccgctgacgccgcgcctgtattctattgcttcctcacaggcggaagtggagagcgaggtgcatgtcaccgtgggcgtggtgcgctatgaaattgaaggccgcgcccgggctggcggcgcctccagcttcctcgccgaccgcgtggaagaggatggcgaagtccgtgtctttatcgaacacaacgacaacttccgtctgccagccaacccggagaccccggtgatcatgattggcccgggcaccggtattgcgccgttccgcgcctttatgcagcagcgcgctgcggacggagcgcaaggcaagaactggttgttcttcggcaacccgcacttcaccgaagatttcctctatcaggtggagtggcagagctatgtgaaggaaggtctgctgacccgtatcgatctggcctggtcccgcgatcaacaacaaaaaatctatgtgcaggacaaactgcgcgagcagggggccgagctgtggcgctggatcaatgacggcgcccacatttatgtctgcggcgacgccaatcgtatggcgaaggacgtggaaaacaccttactggaagtgattgccgaatacggcgcgatggacgccgaagcggcggacgaatttttaagtgagctgcgcgttgtgcgccgttatcagcgagatgtctactaa

SEQ ID NO: 239816 - DNA, 366 bp, Klebsiella pneumoniae
atgatgtccaccacgctgtttaaagatttcaccttcgaagccgcccaccacctgccgcacgtcccggaaggacacaaatgcggtcgcctgcatggccactcctttatggtgcgtctggagatcaccggtgaagtcgatccccataccgggtggatcatggattttgccgagctgaaggccgcctttaagccgacatacgatcgcctcgaccactattatctgaacgatattcctggtctggaaaaccccaccagcgaagtgctggccaaatggatctgggatgagatgaaaccgcgggtgccgctgctcagcgccgtgatggtcaaagagacctgcaccgccggctgcgtctatcgcggcgagtaa

SEQ ID NO: 239817 - DNA, 672 bp, Klebsiella pneumoniae
atgcagtacccgattaacgagatgttccagaccctgcaaggcgagggttacttcaccggcgtgcctgccatctttattcgtctgcagggatgcccggtaggatgcgcgtggtgtgacaccaagcatacctgggacaagctggccgatcgggaagtgtcgttgttcagcatcctggcgaaaaccaaagagagcgacaagtggggcccggcaagcagcgaggatctgctggcgattattgggcggcaggggtggactgcccgccacgtggtcattaccggcggtgagccctgcattcatgatttaacgccgttaacctcgcttctggaacaaaacggctttagctgtcagattgaaaccagcggcacccatgaagtacgctgcagccccaatacctgggtgacggtttccccgaaggtcaacatgcgcggtggctatgacgtgctgtctcaggccctgcagcgggcggatgagatcaagcatccggtagggcgcgtccgcgacatagaagcgctggacgaactgctggaaacgctgagcgatgacaaaccgcggatcatcgccctgcagccgatcagtcagaaagaagatgcgacgcgcctgtgtatcgacacctgcatcgcccgcaactggcgcctgtccatgcagacgcacaagtatctgaatattgcctga

SEQ ID NO: 239818 - DNA, 1110 bp, Klebsiella pneumoniae
atgaccacattattaattaccggcgttacggggtttctgggcggtgccgcgttagagaaaatactccatcaggaaacccggttagatctgctgctgctggtacgtgctgatagccccgaggctggcctcgaacgggttaaagagaacatgcgtaagttcaacatcgccgaggagaagctggcgatgttgcgccagcagcatatcctgctgggcgatctcgcctctccggagcattttcttaacgatccgcgccttgagcaggtcacccatgtcctcaactgcgccgctgtcgcctcatttggcagcaacccgcttatctggaaggttaacgttgagggcacgctgcgcctggcgcaacgtatggcgcaggtgacgggtctgcagcgctttctgcacgtcggtacggcgatgtcatgttcgcctgaaccggattcactggtcgccgaaagcgcggagtttcgggaacgcgctgagcacctggtggaatatacccactcgaagtcgaccatcgagcagctgatgcagcagcagtgccctacgctaccgctggtaattgcccgcccctctatcgtggtgggtcatacccatcacggctgccggccttccagcagtattttctgggtgttcagcatggggctgatgctgcagaaattcatgtgctccatggaggaccgaattgacgttatcccggtggactactgcgccgacgccctgctaatgctgcttaaccagcctctggctcacggcgaggtggtgcatatctctgctggcgaagagaacagcgtgaagtttgccgaaatcgaccgggcgatggctcaggccctggagcaggcgccggtgggggataaatacgcccaggtgagctatgaaacgctggtcaaaatgagacgcgaactgaaagggatatttgggccatgcaatgagcggctgatgctgaaagccatgcgcttatacggcgcgttcgccacactgaacgtgcgctttagtaacgacaagctgctgagcatggggatgccaaaaccgccgcgctttaccgattacatcgaccgctgcgtggaaaccacccgcgggttgtcgatccctcagcaaatggccgtcgactttaaataa

SEQ ID NO: 239819 - DNA, 1299 bp, Klebsiella pneumoniae
atgtccaaaatcgttaaagtcatcggtcgtgaaatcatcgactcccgtggtaacccgactgttgaagccgaagtacacctggaaggtggtttcgtcggtatggcagctgctccgtcaggtgcttctactggttcccgcgaagcgctggaactgcgcgatggcgacaaatcccgtttcctgggtaaaggcgtaaccaaagctgttgctgcggtaaacggcccgatcgctcaggcaatcctgggcaaagatgctaaagatcaggctggcatcgacaagatcatgatcgacctggacggtactgaaaacaaatctaacttcggtgcgaacgctatcctggccgtttctctggcgaacgccaaagcagctgctgcgtccaaaggcctgccgctgtacgcgcacatcgctgaactgaacggcactccgggcaaatactccatgccggttccgatgatgaacatcatcaacggcggtgagcacgctgacaacaacgtcgacatccaggaattcatgattcagccggttggcgcgccgaccctgaaagaagcagtacgcatgggttctgaagtgttccatcacctggcgaaagtgctgaagtccaaaggcatgaacactgccgttggtgacgaaggcggctacgcgccgaacctgggttccaacgccgaagcgctggctgttatcgctgaagcggttaaagctgcaggctacgagctgggcaaagacatcaccctggcgatggactgcgcggcgtctgaattctacaaagacggtaaatacgttctggctggcgaaggcaacaaagcgttcacctctgaagagttcactcacttcctggaagagctgaccaaacagtacccgatcgtctccatcgaagatggtctggacgaatctgactgggaaggtttcgcttaccagaccaaagtactgggcgacaaaatccagctggttggtgacgacctgttcgtaaccaacaccaagatcctgaaagaaggcatcgaaaaaggcatcgctaactccatcctgatcaagttcaaccagatcggttctctgaccgaaactctggctgctatcaagatggcgaaagacgctggctacaccgctgttatctctcaccgttctggcgaaactgaagacgctaccattgccgacctggctgttggtaccgctgcaggccagatcaaaaccggttctatgagccgttctgaccgcgttgctaaatacaaccagctgattcgtatcgaagaagcgctgggtgagcaagcgccgttcaacggtcgtaaagagatcaaaggtcaggcttaa

SEQ ID NO: 239820 - DNA, 1638 bp, Klebsiella pneumoniae
atgacaacgaactatatttttgtgaccggcggggtcgtatcctctctgggtaaaggcattgccgcagcctccctggcagccattcttgaagcccgtggtctcaacgtgaccatcatgaaactggatccgtatatcaacgtcgatccgggcaccatgagcccaatccagcatggggaagtgttcgttactgaagacggcgcagaaaccgatctggacctgggccactatgagcgttttatccgcaccaagatgacgcgccgcaataacttcaccaccggccgtatctactccgacgtgctgcgcaaagagcgccgtggcgactacctgggcgcgaccgttcaggttatcccgcacatcaccaacgctatcaaagagcgcgtactggcgggcggcgaaggccatgacgtcgtgctggtggaaatcggcggtaccgtaggcgatatcgaatccctgccgttcctcgaagcgattcgtcagatggcggtagagatcggccgcgagcataccctgttcatgcacctgactctggtgccgtacatggccgccgcgggcgaagtcaaaaccaagccgacccagcactccgtaaaagagctgctctccatcggtattcagcctgatattctgatctgccgctccgatcgcgcggttccggccaacgaacgagccaaaattgctttgttctgtaacgttccggaaaaggctgtgatttctctgaaagacgtcgattccatttataaaattccgggcctgttgaaatctcaggggctggacgattatatttgtaaacgattcagcttaacttgtccggaagcaaacctggccgaatgggaacaggtaatctatgaagaagctaatccggcaggcgaagtcaccatcggtatggtcggtaagtacattgaactgccggatgcctacaagtcggtgattgaagcgctgaaacacggcggtctgaaaaatcgcgttaccgtcaacatcaagctgatcgattcgcaggatgtggaaacgcgcggcgtcgaaatcctcaaggatttagacgctatcctgatcccgggcggcttcggctaccgcggcgttgaaggcaagatcgccaccgcgcgctatgcgcgtgaaaacaatattccttatctgggcatctgcctgggtatgcaggttgcgctgattgagttcgcgcgtaacgtagcgggtatggaaaacgccaactcgacggaatttgtgccagactgtaaatacccggtcgtggccctgattaccgaatggcgtgacgaagatggcaacgttgaagtccgctctgagaagagcgatctgggcggcaccatgcgcctgggcgcgcagcagtgcctgctgagtgatgattctctggtacgccagctttacggcgagccgaccatcactgagcgtcatcgtcaccgctacgaagtcaacaacatgttgttgaaaccgattgaagctgctggtctgcgcgttgcgggccgttccggggatgatcagttggtcgagatcatcgaagtgccgaaccatccgtggtttgtggcctgccagttccacccggagtttacttcgacgccgcgtgatggacacccgctgtttgccggctttgtgaaagccgcgagcgagtaccagaaacgccaggcgaagtaa

SEQ ID NO: 239821 - DNA, 792 bp, Klebsiella pneumoniae
atgactcaaattgaccgcttgctcggcatcatgcgccgcctgcgcgacccggaaaacggctgcccatgggataaagagcagacctttgccaccatcgccccttacacccttgaggagacctacgaggtcctcgatgctatccagcgggaagattttgacgatctgcgcggtgagctgggcgatctgctgttccaggtggtgttctatgcgcaaatggcgcaggaagagggacgctttaactttgacgatatctgcgccgccatcagcgacaagctggagcgtcgccacccgcatatcttcggcgaggcatcggcgggcaatagcacggaagtcctggcccgctgggagcaaatcaaaagcgcggagcgagcggaaaaagcccagcattcggccctggacgatattccccatagcctgccggcgctgatgcgcgcgcataaaatccagcgccgctgctcggcagtgggtttcgactggacctcgctgggcccggtgctcgacaaagtgcatgaagaaattgatgaagtgatgcatgaagcgcagcaggcggtggtggatgaagcaaaactggaagaggaagtgggcgatctgctgtttgccacggtgaatttatcccgtcatttgggcgtcaaagccgaggtggcgctgcagaaagcaaacctcaaatttgagcgtcgtttccgcgaggtcgagcgtattgtcgccgcccgaggcctggaaatgaccggcgtcgacctcgataccatggaagaagtgtggcaggaagtaaaacgccaggaaactgatctctaa

SEQ ID NO: 239822 - DNA, 2238 bp, Klebsiella pneumoniae
atggttgcggtaagaagtgcacatcttaataaagctggtgaatttgacccgaagaaatggatcgcgagtctgggaatttccagccagcagtcgtgtgagcgcttagccgaaacctgggattattgtcgcgaaaaaacgcaaggacacccgcaggcggacctgctgctgtggcggggcgtcgaaatggtggagatcctctccaccctaagtatggacatcgatacgctgcgcgcggcgctgctgttcccgctggccgacggcgaagttgtcagcgaagaggtgatgcaggagagcgtaggtaaatcggtcgtgaccctgattcacggggtgcgggacatggccgctatccgccagctgaaggctacccataccgactcggtctcttccgagcaggtggataacattcgccgtatgctgctggcgatggttgacgatttccgctgcgtggtcatcaaacttgctgagcggatcgcgcatctgcgcgaggtcaaggacgcgccggaagatgagcgcgttcttgcggcgaaagagtgcaccaatatctatgctcccctggcgaaccgcttaggtatcggccagctgaagtgggagctggaagattactgcttccgctatctgcacccggcggaatacaagcgcattgccaaactgctccacgagcgccgtatcgaccgcgagcattacatcgaagagtttgtcggccacctgcgctcagagatgaaagccgaaggcgtcaaggcggaagtctatggccggccgaagcatatctacagtatctggcgcaaaatgcagaaaaaacacctcgctttcgacgagctgtttgacgttcgcgcggtgcgtattgtggctgagcgtttgcaggattgctatgccgcgctggggatcgtccatactcactaccgccatctgccggatgaattcgacgactacgtggccaacccgaaacccaacggttaccagtctatccataccgtggtgctggggccgagcggcaagacggtggagattcagatccgcacccggcagatgcatgaagatgccgagctgggcgtggccgcacactggaagtacaaagagggcgcgggagccggcaccagcggcggccgcggctatgaagaccgtatcgcctggctgcgtaagctgattgcctggcaggaagagatggccgactccggcgagatgctcgacgaagtgcgcagccaggtcttcgacgaccgggtgtatgtctttacgccgaaaggcgacgtggtggacctgcctgcggggtcgacgccgctcgactttgcctatcatattcacagcgatgtcggccatcgctgcatcggcgccaaaattggcggccgcattgtgccgttcacctatcagctgcagatgggcgatcagattgagataatcacccagaagcagccgaacccaagccgcgactggctgaacccgaaccttggctacgtgaccaccagccgtggacgctccaaaattcacgcctggttccgtaaacaggatcgcgataaaaacattctcgccggtcggcagatcctcgacgacgagctggagcatttgggcatcagcctgaaggatgcggaaaagcacctgctgccgcgctataacttcaacgagctcgatgaactgctggccgccatcggcggtggcgatatccgtctcaaccagatggtcaacttcctgcaggcgcagttcaataaacctagcgccgccgagcaggatgcggccgcgctgaagcaactgcagcagaaaacctacacgccgcaaaatcgcaccaaggacaatggccgggtagtggtggaaggggtaggcaacctgatgcaccatattgcccgctgctgccagccaatcccgggcgacgagatcgtcggctttatcacccaggggcgcgggatctccgtgcatcgcgcggactgcgatcagctggcagaactgcagtcgcatgccccggagcgcatcgtcgatgcggtatggggcgaaagctactcggcgggctactcgctggtggtcagggtggaggcgaacgatcgcagcggtttactgcgcgatatcactaccatcctcgccaatgagaaggtgaacgtgctgggcgtcgccagccgcagcgatacccgtcagcagctggcaaccatcgatatgaccatcgagatttacaacctgcaggtgctgggccgggtgctcggtaagctcaaccaggtgccggatgtgatcgacgcgcgccgtctgcacggcggttaa

SEQ ID NO: 239823 - DNA, 1305 bp, Klebsiella pneumoniae
atggcgcaattctactctgcaaaacggcgtgtgacgacgcgccagatcataaccgttacagtcaacgacctcgatccctttggtcagggtgttgcccgccatcaggggaaggcgttgttcgtgagcggcgtgctgccccacgagcaggccgaggtggtgctggtggaagataaaaaacagtacgcccgcgccgaggtgaaacgccgactgaccgacagcccgcagcgccaggcgccgcgctgcccccattttggcgtctgcggcggatgccaacaacaacatgccagcgttccgcttcagcagcaaagtaaacgcgccgcgctggggcgactgatgaagcgcgaggtagatgacgtcatcgccggcgcgccgtggggctaccgccgtcgcgcacgcttgagcttgaattatcagccgaagacccaacaattgcagatgggttttcgccaggccaacgccaaagcgatcgtcgatgtggtgcagtgccctgttttggtgccccaacttgaggcattgctgcccgctgtgcgcgagtgcttaagcgcgctgagcgcattacgccatctcggccacgtcgagctggtgcaggcggacaatggcccgctgatggtgctgcgccataccgcagccctgccggcgacagacagggaaaaactggaacgcttttcgcaaactcacggtctttccctgtacctcgcgccacaaagcgagatactggagcatattcatggcgaagcgccatggtatacctcagacggactacgcttagtgttcagcccgcgggattttatccaggtcaacgacggcgtaaatcagcagatggtgcgtaccgcactggagtggctggatctgcggccagaggaccgggtgctggatctgttctgcgggatgggcaactttaccctgccgctggcgacacgcgccgcccatgtggtgggcgtggaaggggtgccggcgctggtggagaaggggcgggaaaacgccgcccgcaatggtttatcaaatgtcactttcttccatgaaaatctggaagaagacgtcacccgtcaggcctgggcgaagcacggctttgataaagtgctgctggacccggcccgcgccggcgcgccgggcgtgatgccgcatataataaaactggcaccgcggcgggtggtgtatgtttcctgcaacccggcgacgctggcgcgagacagcgaaaccctgttgcaggctggatatcagattcaacgcctggcgatgctggatatgttcccgcataccggccatctggaatcaatggtgttgtttgagcgcaggcttacataa

SEQ ID NO: 239824 - DNA, 2751 bp, Klebsiella pneumoniae
atgaccaactacagcctgcgtgctcgcatgatgattctgattctggcgccaaccgtcctgataggactgttgctcagtattttctttgtcgctcatcgttataacgacctgcaacgccagctggaggacgctggcgccagtattatcgaaccgctggcggtctccagcgaatatggcatgaacttgcaaaaccgcgaatccatcggccagctgatcagcgttctgcatcgtcgccactcggagatcgtgcgggccatctcggtgtacgattcgcataaccgcttatttgtcacctccaattaccagctcaatcccagcgaactgcagatcccgaaaggcgaggcattcccccgtcacctcagcgtcatccgcgatggcgacatgatgatcctgcgcacgcctattgtctcggaaagctattctccggatgaatcacccgaatctgacgctaaaatgccgggcaatatgctgggctacgtcgccctggagctggatctaaaatcggttcgcctccagcagtacaaagagatttttatctccagcgtaatgatgctgttctgtatcggcatcgcgttaatcttcggctggaggctgatgcgcgacgtcaccgggccaatccgcaatatggttaacactgtcgaccgcatccgccgcggacagctggacagccgggtcgaaggctttatgctcggcgaactggatatgctgaaaaatggcattaactcgatggccatgtcgctggcggcataccacgaagagatgcaacacaacgtcgaccaggcgacctccgatctacgggaaacgcttgagcagatggagatccagaacgtcgagctggacctggcgaaaaagcgcgcccaggaggcggcgcgcattaagtctgagttcctggccaatatgtctcacgagctgcgcaccccgctcaatggggtgatcggctttacccgcctgacgctgaaaaccgatctcaacgctacgcagcgcgaccacctgaccaccatcgaacgttcggccaacaatctgctggcgatcatcaatgacgtgctcgacttttccaagctggaagccgggaagctgatcctggagagtattccgttcctgctgcgcacttcgcttgatgaagtggtcaccctgctggcgcattccgcgcacgataaagggctggagctgacgctgaatattaagaacaatgtaccggataacgtcattggcgatccgctgcgtctgcagcagattgtgaccaacctcgtgggcaacgccatcaaatttaccgagcacggcaatatcgacgtactggtggagcagcgggccatcagtaattcccgggtacagatcgaaattcagatccacgataccggcatcggcatccccgagcgcgaccagtcccggctattccaggccttccgtcaggccgatgccagtatttcacgccgccacggcggcaccgggctcgggctggtgatcactcagcgtctggtcaaagagatgggcggggatatttcgttccacagccagccgaaccgcggctccaccttctggttccatatcagcctcgatctcaacccgaacgccattccggatacgctgaacaccgacgggcttgtcggcaaacgtctggcctatgtggaagccaacgcgacggcggcgcagtgtaccctggagatgctggccgctacgccgctggaggttatctacagccctaccttctcctcgctggcggaagcgcagtatgacattctgctggtcggtatcccggtttcaatgcgcgatttgtcgccgcatcgggaaaaattagccaaagcctgcgcgatgtccgataacgtactgctggccctgccgtgccatgcccaggtcagcgccgaagccctgaagcgcgacggcgttgccgcctgcctgttaaagccgctcaccaccacccgtctgctaccggcgctggtggctaccagccacgcgcttgcctccgcgccgctgatgcagatcgacagtcataagttgccaatgacggtaatggccgtcgacgacaacccggctaacctgaagctgattggtgccctgctggatgatcttgtgcagcaggtgatcctctgcgacagcggccagcaggcggtggacaaggccaagcagctgcagatggatctgatcctgatggatattcagatgccggatatggacggcatccgcgcctgtgagcttatccatcacctgtcccatcatcagcaaaccccggttattgcggtcaccgcgcacgccctggagggccagcgtgagaaattactgagcgccggcatgaacgactatctggcgaagccaatcgaagaagagaaactgcacgcactgctgttgcgctatcagcccggcctgcacagcgtcgttccggcgtcgctaccgcccgcagagccgatcgtcgatcataaccagacgctcgactggcagctggcgctgcgccaggcggccatgaagccggacctggcgcgggagatgctgcaaatgctgatcgcctttatgccggaggtgcgtaacaaagttgaggagcagctggtgggcgagcagccggaagggctcgtggatctgatccataaactgcacggcagctgcagctatagcggcgtgccgcggctgaaaaagctgtgccataccctggaaagtcagctgcgggcaggtaccgccgccgaggatctggagccggagctgcttgagctgttagatgagatggataatgtggcccgcgaagcgtgccggatgggggtgtaa

SEQ ID NO: 239825 - DNA, 1140 bp, Klebsiella pneumoniae
atgaaaatagtgatcgcaccggattcctggaaggagagcctgagcgcgctggaagtggccagtgcgatagagcaaggctttcgcgagatttatcctgacgccgagtacgtcaagctgccggttgccgatggtggggaagggacggtggaagccatggtggcggcgaccggcgggcttctggttccgctgacggtcaccgggccgctgggcgagccggttgaggcattttacgggctgtccggcgatcgccagtgcgcctttatcgaaatggcggcggccagcggcctggagagcgtcccgccggcgcagcgtaacccgctgctgaccacttcctggggtaccggggagcttatccgccatgcgctggacgccggggtaagacagatcattattggtattggcggcagtgcgaccaatgacggcggcgccgggatggcgcaggcgctgggggcgaaactgctgaccgccgagggccagcaaatcgcctccgggggcggcgcgctggagacgctggcgcgaatcgatctcagcgaactcgattcgcggctggcagattgccggattgacgttgcctgcgacgtcaccaacccgttgaccggcccgcagggcgccagcgcggtgttcggcccgcaaaaaggggcgacggcgcagatgatcgaccggctcgacagcggcctgcggcactatgcccggattatcgcccgcgatttagatatcgacgtgctgagccttgagggcggcggcgcggcgggcggcatgggggcggcgctgtatgcgttctgtggtgctcagttgcgtccgggcattgagattgtcaccgatgcgctacagctggctgagcgggtggcggatgccgatttagtgatcaccggcgaagggcgtatcgatagccagacgatccacggcaaagtgccggtgggggtggcgagagtggcgaagcgttttaacgtcccggtgatcgggattgccggcagtcttaccgccgatgttggcgtcgtgcatcagcacgggctggatgcggtattcagcgtgttgtataccatctgtacccttgatgaagcgttggccaatgccgccgccaacctgcgaatgacggcgcgtaacgtagccgcggttttgcagatgggcgacaggcggtaa

SEQ ID NO: 239826 - DNA, 1341 bp, Klebsiella pneumoniae
atgacgactttctcttcaacgcccgttgtcaccaccatgcaggtgatcccggttgccggccatgacagcatgctgatgaacctgagcggcgcgcacgccccgtacttcacccgcaatatcgtaattatcaaagataacgccggccataccggcgtcggtgaaatcccgggcggtgaaaaaattcgccagaccctggaggatgccattccgctggtggtgggcaaaacgctgggcgagtataaaaacgtgctgggcgcggtgcgcaatcagtttgccgaccgcgacgccgggggccgcggcctgcagacctttgacctgcgcaccaccattcacgtggtgaccggcatcgaagcggcactgctggatctgctgggccagcaccttggggtcaacgtcgcctcgctgctaggcgatggccagcagcgcagcgaagtcgaaatgctgggctatctgttctttgtcggtaatcgccatgcgacgccgctggcctatcagagccagccggatgagcagtgcgagtggtatcgcctgcgccatgaagaggcgatgacgccggatgcggtggtccgcctggcggaagcggcgtatgaaaaatatggtttcaacgactttaagctgaagggcggcgtgctggccggttttgaagaagccgaagcgatcagcgccctggcgaagcgcttcccgaatgctcgcgtcactctcgacccgaatggcgcctggctgcttgaggaggccattcagattggtaaacagctgaagggcgtgctggcctatgcggaagatccgtgcggcgccgaacagggcttctccggccgcgaagtgatggccgagttccgccgcgcgacgggcctgccgaccgccaccaatatgatcgccaccgactggcggcagatgggccatacgctgtcgctacaatcggtggatatcccgctggcggacccgcacttctggaccatgcaggggtcggtgcgcgtagcgcagatgtgccatgagttcggtctgacctggggttcgcactctaataatcacttcgacgtgtcgctggcgatgttcacccacgtcgcggcagcggcgccgggcaagatcaccgctatcgatacccactggatctggcaggagggcaaccagcgtctgaccaaacaaccttttgaaatcaaaggcggcatggtgcaggtaccgagtaccccgggcctgggggttgagctggatatggaccgcgtgatgcaggcaaatgagctatataagaaacatggtcttggcgcccgcgacgatgcgatggcgatgcagtatctgatcccgggctggacctttgacaacaagcgtccatgcatggtgcgctaa

SEQ ID NO: 239827 - DNA, 1341 bp, Klebsiella pneumoniae
atgactactcaatccagcccgattatcacagagatgaaggtcattccggtggccgggcacgacagcatgctgctgaacatcggcggagcgcataacgcctggtttacccgcaatatcgtggtgttaaccgataacgccggccataccggcgtcggcgaagcgcccggcggagaggtcatctaccagacgctgctggcggcgatcccgcaggtggtgggccaggaggtcgcccgactcaatcgcgtggtgcagcaggtgcacaaaggcaatcaggcggcggatttcgacaccttcggcaaaggggcgtggaccttcgaactgaaggttaacgcggtggcggcgctggaagcggcgctgctcgacctgctcggccaggtgcttaatgtgccggtctgcgagctgctgggcccgggtaagcagcgtgatgccgtcaccgtgctgggctacctgttctatatcggcgatcggcagaaaaccgaccttggctatctggaccatacgccgggcgatcacgaatggtaccgcctgcgccaccagcaggcgttgagcagcgaggcgatagtgcgtctggcggaagccgcccaggatcgctacggtttcaaagactttaagctcaaaggcggcgtgctgcccggcgagcaggagattgacaccgcgcgggcgctgaaaaagcgtttcccggatgcgcgcatcaccgtcgaccctaacggcgcctggctgctggatgaggccatcgcgctgtgtaaagggctgcaggatgttctgacctacgccgaagatccgtgcggcgccgagcagggtttctccggccgggaggtgatggccgagttccgccgcgccaccgggctgccggtcgccaccaatatgatagccactaactggcgcgaaatgggccatgcggtgatgctcaacgccgtcgatatcccgctggcggacccgcacttctggacgctctccggcgcggtgcgggtggcgcagctgtgcgacggctgggggctcacctggggctgccattccaacaaccactttgatatttccctggcgatgtttacccacgtcggcgccgccgcgccgggcaaccccaccgccatcgatacccactggatctggcaggagggcgacgcgcgcctgaccaaagatccgctgcagattattaacggcagcattgccgtgccagacgcgccgggactcggcgtggaacttgactgggagcaggtgcgcagagcccatgaggcctataaagcgctgccgggcggcgcgcgcaacgacgcgggcccgatgcagtacctgatccccggctggacattcgaccgcaaacgtcccgttttcggccgccactaa

SEQ ID NO: 239828 - DNA, 1353 bp, Klebsiella pneumoniae
atgagttcattaagtcaggcggcgacggcggctgaaaagcgcaccaacgcccgctactggatagtggtgatgctgtttatcgtcacctcttttaactatggcgaccgggcgacgctgtcgatcgccggttcggaaatggccagggatatcggccttgatccggtggggatggggtatgtgttctccgccttctcatgggcttatgtcatcggccagatcccgggcggctggctgctcgaccgcttcggctcgaagcgcgtctatttctggtcgatcttcatctggtcgatgtttaccctgctgcagggcttcgtcgatatcttcagcggctttggcattatcgttgcgctgtttaccctgcgcttcctcgtcggccttgccgagtcgccgtcattccccggcaacagccggatcgtcgccgcctggttcccggcgcaggagagggggacagcggtatcgatttttaactccgcccagtactttgccaccgttattttcgcgccgatcatgggctggctgacgcatgaggtgggttggtcgcatgtgttcttctttatgggcggcctggggattgtgatcagctttgtgtggctgaaagtgatccacgatccgaacaaccacccgggcgtgaaccagaaagagctggactatatcgccgaaggcggggcgctgatcaacatggatcagaagagcagcgcgcagaaagtgccgtttagcgtcaaaatggggcagatcaagcaactgatcggctcgcggatgatgatcggcatctatatcggtcagtactgcatcaacgccttaacctacttctttatcacctggttcccggtttatctggtgcaggcgcgcggcatgtcgatcctcaaagccggctttgtcgcctccattccggcggtgtgcggctttgtcggcggggtgctgggcggggtgatctccgactggttaatgcgccgcaccggctcgctgaacattgcgcgcaaaacgccgattgtgctggggatgctgctctccatgaccatgctgatgtgtaactatgtcaacgtggagtggatggtgatcggctttatggcaatggccttcttcggcaaagggatcggcgccctcggctgggcggtgatggcggataccgcgccgaaagagattagcggtctctccggcggtctgttcaatatgttcggcaatatctccggcatcgtcaccccgatcgccatcggctatatcgtcggcaccaccggctcgttcaacggcgcgctgatctacgtcggtatccatgccctggtggcggtgctgagctatctggtgctggtgggcgatatcaaacgtatcgaactgaaacctgtagcgggacgttaa

SEQ ID NO: 239829 - DNA, 444 bp, Klebsiella pneumoniae; identical to SEQ ID NO: 136212

SEQ ID NO: 239830 - DNA, 795 bp, Klebsiella pneumoniae
atgctggagattatctaccaggacgactggctggtggcggtcaacaaaccctcgggctggctggtgcatcgcagctggctcgatcgcgacgagaaagtggtggtgatgcagactgtgcgcgaccagatcggtcagcacgtttttaccgctcatcgtctcgaccggcccacctccggcgtgctgctgatgggattgtcgagcgaggcgggccggctgctggcgcaacagttcgagcagcaccagatccggaagcgctaccatgcgatcgtccgcggctggctgatggaagaggcgctgctggattacccgctggtagaggagctggatagaatcgccgataagttcgcccgcgaagataaagggccgcagccagcggtaacccactaccgcggtctggcgacagtggagatgccagtggcgactgggcgctatcccacctcgcgctatgggctggtggaactggagccgaaaaccggccgcaagcaccagctgcgccgtcatctggcccacctccgtcatccgatcctcggcgacagcaagcacggcgatctgcggcaaaaccgcagcgccgcggaacatttcggctgtcaccgcctgatgctgcacgccagcgagctgtcattaacccatccttttaccggcgagccgctgaccctgcgcgccggttttgacgacgtctggatgcgcgcgctgtcgcagtttggctggcgcgggcttctcccgctaaatgaaagggttgagtttgccgacgacagcggtcaggatgaagagaataaggtcaatccagggagataa

SEQ ID NO: 239831 - DNA, 330 bp, Klebsiella pneumoniae; identical to SEQ ID NO: 212100

SEQ ID NO: 239832 - DNA, 546 bp, Klebsiella pneumoniae
gtggaccatcagacagcagaagcgctacgcgcttttacccaacgatattgcgccgcctggcagcagcagcgccacagcctgccgcgcagtgaagagctttacggcgtcccgtcgccttgcgttgtcgacacccagggcgaggccgttttctggcagccgcagccgttttcgctggcgcaaaatatcagcgcggttgaacgcgccctcgacattgtggtacaacagccgcttcattcttattataccactcagtttgccggcgatatgtccggccggtttgccggcgaaaccttgacgctgctgcagacctggagtgaagaggatttccagcgggtgcaggaaaatttaatcgggcacctggtggtgcagaagcggttgaagctgtcgccgacgctgttcatcgccaccctcgagagtgaactggatgtgatatccgtctgtaatctcagcggcgaggtagtcaaagagaccctcggcaccgccaaacgcattacgctttctccctcacttgcgggtttcctcaaccaccttgagccagttctgtaa

SEQ ID NO: 239833 - DNA, 846 bp, Klebsiella pneumoniae
atgtcttcttacgataatcatcaggcgctggccggcctgacgctcggtaaatcaaccgattaccgcgatacctatgacgcctcgctgctgcagggcgtgccgcgcagtttaaaccgcgacccgctgggcctgcatgccgataatctgccgtttcacggcgccgatatctggacgctgtacgaactctcctggctgaacggcaaaggtctgccgcaggtagctgtcggccacgtcgagctgcccgataccagcctcaatctggtggagtcgaaaagctttaagctctatctcaacagctttaaccagacccgtttcgctagctggcaggacgttgcagagacgctgactcgcgatctcagcgcctgcgcgcaggggaaggttaaggtatcgctctaccgcctggatgaactggaaggccagccgattgcccgcctgcacggcacctgcatcgacgatcaggatatcgagatcgataactatcagttcagcgccgattacctgcagggcgccgccagcggcaaaatcgtggaggagacgctggtcagccacctgctgaagtctaattgccttatcactcatcagccggactggggctcggtgcagatccagtatcggggggcgaaaatcgaccgcgagcagctcctgcgctatctggtttcgttccgccaccataacgaattccatgagcagtgcgtcgagcgtatctttaacgatattctccgtttctgccagccggaatcgctttccgtttacgcccgctatacgcgacgcggcggtctggatatcaacccctggcgcagcaatggcgacttttcccccgccaccggccgcctcgcccgtcaataa

SEQ ID NO: 239834 - DNA, 1368 bp, Klebsiella pneumoniae
ttgattacacatgttagcccgcttggttcaatggatatgctgtcgcagctggaagtggatatgcttaagcgcaccgccagcagcgacctgtaccaactctttcgcaactgctcgcttgctgtgctcaattcggggagcctgaccgataacagcaaggagctcctgtcccgtttcgaaaatttcgagattaacgtgctgcggcgcgaacgcggcgtgaagctggaactgatcaacccgccggaagacgccttcgttgacgggcggattatccgctccctgcaggccaacctgttcgccgtgctgcgcgatatcctgttcgtttacggccagatccacaataccgttcgcttcccgaacctcgatctcgaaagttcggttcatatcactaacctggtgttctcgatcctgcgcaacgcccgcgcgctgcacgtcggcgaggcgccgaacatgatcgtctgctggggcggccactccatcaacgaaaacgaatatctctacgcccgccgcgtcggtacgcagctgggcctgcgggaactgaatatctgcaccggctgcgggcctggcgcaatggaggcgccgatgaaaggcgccgccgtcggccatgcgcagcagcgctacaaagacagccgctttatcggcatgaccgaaccatccattatcgctgcggaaccaccgaacccgctggtcaatgaactgatcatcatgccggatatcgaaaagcgtctggaggccttcgtacgtatcgcccacgggatcattattttcccgggcggcgtcggcactgccgaagagctgctctacctgctgggtattctgatgcaccccgacaacaaagcgcaggtgctgccgctgatcctcaccgggccgaaggagagcgccgactacttccgcgtactggacgagtttatcacccataccctgggcgaatcggcccgtcgccactaccggatcatcattgacgacccggcggaagtggcgcggcagatgaaaaaagcgatgccgctggtgaaagagagccgtcgcgagaccgatgacgcctatagctttaactggtcgattcgcatctcgccggacctgcagatgccgtttgatccgacccacgagaacatggccaacctcaaactctccccggatcaaccggtggaagtgctggccgccgacctgcgtcgcgccttctccgggattgtcgcggggaacgtcaaagaggtgggcatccaggccattgagcagtacggtccttacaaactgcacggcgatccggagatgatgcgccgtatggacgatctgctgcagggcttcgtcgcccagcaccgcatgaagcttccgggcggcaccgcctatattccttgctacgaaatcatcgcctga

SEQ ID NO: 239835 - DNA, 1290 bp, Klebsiella pneumoniae
atggaaaccactcaaaccagcaccatcgtttcgggcgaaacccgcagcggatggcgtaaaaccgacaccatgtggatgctgggcctgtacggtacagcgattggcgcgggcgtcttgttcctgccgatcaacgccggcgttggcggcatgatccccctgatcatcatggcgattctggccttcccgatgactttcttcgcccaccgcggcatgacccgcttcgtgctctccgggaaaaacccgggcgaagacatcaccgaagtagtggaagaacacttcggcgtaggcgcaggtaagctgattaccctgctttatttcttcgctatctacccgatcctgctggtttacagcgtggcgatcactaacaccgtcgaaaccttcatggcgcatcagctgcacatgacgccgccgccgcgcgccattctgtcgctgatcctgatcgtcggcatgatgaccatcgtgcgtttcggcgagcagatgattgtgaaagcgatgagcgtgctggtgttcccattcgttatcgcgctgatggtgctggctctgtatctgatcccgcagtggaacggcgcggcgctggagacgctctccctgagcggcgcttccgttaccggcaacggcctgctgatgaccctgtggctggcgatcccggtgatggtcttctccttcaaccactcgccgatcatctcttccttcgcggtagccaaacgtgaagagtacggcgaaggcgctgagaagaaatgctccagtatcctcgctcgcgcccacatcatgatggtgctgaccgtgatgttcttcgtcttcagctgcgttctgagcctctctccggcagacctggcggcggcgaaagagcagaacatctcgattctgtcttacctggcgaaccactttaacgcgccaatcattgcctggatggcgccgatcatcgcgatgatcgctatcaccaaatccttccttggccactatctgggcgctcgcgaaggctttaacggcatggtgattaaatccctgcgcagtaaaggcaaatcgattgaaatcaacaaactgaacaagctgaccgcgctgttcatgctgatcaccacctggattgtggcaaccctgaacccgagcatcctcggtatgatcgagacccttggcggcccgattatcgcgatgatcctgttcctgatgccgatgtacgcgattcagaaagtcccggcgatgcgtaaatacagcggccatatcagcaacgtcttcgtggtgattatgggcctgattgccatctccgcgatcttctactctctgttcagctaa

SEQ ID NO: 239836 - DNA, 942 bp, Klebsiella pneumoniae
atgtccaaccgattccgccccgcctggctgctgatcctcgccgccctctctacctccgcgctggccaaagcgccggaaaccgtcaacatcggctatcaaaaggcgaatatcttcgcgctgctgaagtaccgcggcacgctggatgagagcctgaaaaaacagggcattgccgtacgctgggtcgaattccccgccgggccgcaaatgctggaggggctgaacgtcggtagtatcgatctggccgcgaccggcgatgcgcctccggcctttgcccaggcggcgcaagccgatctggtctaccttgcccactcccccgctaacccgaaaacggaagcgattgtggtgcctgaacagtcggcaatccacagcgtggccgacctgaagggcaagcgcgtgggcttgaacaaggggtctgacgtcaactacctgctggttgccgcactggaaaaagcgggcctcagctataaagacatcaccccggtctatctgccgccggcggacgcccgcgccgctttccagcgcggggcgattgatgcgtgggtgatctgggatccgttcctcgcagaagtggaaaccaacgcgaaagcccgacagatccgcaatgccgaggggctggtgccgcactacaccttctatctcgccagccgcaagtttgcagatacctacccggagacagcaaagcaggtggtggatgagctgggtaaactcagcgcgtgggcgaacagccatcaggacgaggccgccgggctgctgtcgacctcaaccggactggataaagccatctggctgaagaccctggcccgcctgccctacggtgccgaacgcatgaccccggcggtgtataacgaacagcaggcgctggcggatacctttacgcgcatcggcctgctgccggtgaaagtcgacgtgcgcagcgccacctggtcgctggataaaccttga

SEQ ID NO: 239837 - DNA, 1224 bp, Klebsiella pneumoniae
atgaccctgctctctactggcaccgattatgacgcgctggcggccgccttccgcccgatattcacccgtatcgcccagggcgctgcggagcgcgaacagcagcgcattctgcccgatgagccgatccgctggctgaaagaagcgggcttcggcacgctgcgtatcccgcgcgagaagggcggctggggcgcttcgctgccgcagctcagcgcgctgctgatcgagctggcgcaagcggactctaacctgccgcaggccctgcgcgcgcactttgcctttgtggaagatcagctgaatcagccggattccgccgggcgcgaccgctggtttcgtcgcttcctcgacggtgagctggtaggcagcggctggacggagatcggcgcggttaagctgggagaggtgaacaccagagtgacgccgacagagggcggctggcgactcgacggcgagaagttttacagcaccggcgcgctgtacgccgactggatcgatgtgtttgcccggcgcagtgataccgccagcgatgtgatagccctggtcagcacccagcagtccggcgtggtgcgggaagatgactgggatggctttggccagcggttgaccggcagcgggaccacccgctttaccggcgctcgggtggaaaccgaacatgtctatgattttgcccagcgctttcgctatcagaccgccttctaccagcatgtgctgctggcgaccctcgcgggcattggcctggcggttgagcgggatgccgcgcagggcgtcaaacatcgctcccggatgtacagccacggcaacgccgccgtgccgcgcgatgacgcccaggttctgcaggtcgttgggcagatcagcagctgggcatgggcgacccgggccgcggtcctgcaggccgcggaatcgctgcagcaggcctatgtggcgcacgtcagcgacgacgaagcattgattgcccggcgtaaccagctggcggaagtggaagcggcgcaggcgcaggtgatcgccagcgactggatcccgcgggcggcgacggagctgtttaatgccctcggggcgtcggatacgcgaactcgccttgcgctggatcgccactggcgcaatgcgcggacggttgcctcgcataatccggtgatttataaggcacgtaatatcggtaactggctggtgaacggtgaagcgcccacctttatctggcagataggcaatggtgagaaaacggcggggtaa

SEQ ID NO: 239838 - DNA, 1422 bp, Klebsiella pneumoniae
atgagtacattaccagtggataatcccggtatcgcttcggtaccggtcagtagcgtcggggatgtggcgcggctaattaattccggcaaggaacatgcgaaatatgcgcggatgattgtcttcctcgcgctggggggcgtttttctcgacgcatatgacttaaccacgctctcctacggtattgatgacgttgtacgtgaatttcagctctcaccgctgctgaccggcctggtgacttcgtccattatggtcgggactatcgtcggcaatattatcggcggctggttgaccgataaatatggtcgctattcggtttttatggccgatatgttctttttcgtgatttcggctatcgccgccgggctggcgccgaacgtctgggtgttgattggcgcccgtttcctgatgggcatcggcgttggcatcgacctgccggtagcgatgtcctatctggccgagttttcccgctttgccggcaaaggcaacaaagcggctcgcctcgcggcgtggtgcccgatgtggtacgccgcctcaaccgtctgctttctcattatcttcggcctctatttcctgctgccgcaggagcatcttgactggctatggcgcgcctccctgctgttcggcgccgtgccggcactgctgattattgccgtccgcagtcgatttatgaatgaatccccgctgtgggcggcgaaccagggcgatctgacctctgcagtgcgtattttacgcgactcctgggggatccatgcccatgaggtcccggcggcgaagcccgcgccagcgccgaaagtgagcttccgcgtgctgttcgaaaaaccctaccgcgagcggactatcgtcgccggggtgatgaatatctgtatctccttcgagtacacggcgattgcctttttcctgccgtcaattcttgcccagttcctcggggctggcgtcttcgaaactatttcggcatcgctggggctgaacgccctgtttgcttttaccggtgggctgctcggtatgcatctggcgtggaaatatccttcgcgtcatgtggcgatagccggcttcgccctgcagtttgtggcgctgattgtgctggcgctggtggggcaaccgcacgcgacggcaggtatcgtgctggctatcgcgatgctggggctgtggctgttcgccgaagggtttggcccgggggcgcagctgatgatctacccggcgctctcctatcctactgccattcgcgccaccggggtcggtttcagccgggcactctccgggatcggcagcgcgctggcgttgtttattctgccgctgctgcaggcctccctcggcacgcagatgttctgggtggtctcgcttgccgccattattcccattttcttcctgctggcggtccgtcatgaaccgacgcgagaagatatcgacgcacttcatgaataa

SEQ ID NO: 239839 - DNA, 879 bp, Klebsiella pneumoniae; identical to SEQ ID NO: 212091

SEQ ID NO: 239840 - DNA, 699 bp, Klebsiella pneumoniae
atgaaaccgacagtcatcagtcaggataccccctggggcgaaatcccttcgctgctgctccccgcctatggcgaaacctggctgatggtggccattgtgatgctgtttgtcgtcacgctgggggggctggtgggggtggtgttgtttaacgcctcgccgcggggcttatttccgcacgcactgctgtaccggctgctgaactgggtggtcaatatgggacgttcgctgccgtttctggtgctgatggccgccattatcccgttcacttactggctgaccggcaccacgattggcatccccgccgcggtagtgccgatgatcgccgccggcgtcccgttctttggccgtctggtggagaacgcgctgcgcgagttgccggcggaggtcaccgcggtgggggtcgtctgcggcgggtcgcgctggcaaatcattgccagcgcgcagctcagtgaagccatgcccgcgctggtggcggcggtgacgctaaacctggtctcgatgatcgagtattcggctatcgccgggaccatcggcgccggcggcatcggctacctggccgtggtgtacggctatcagcgcttcgacacccacatcatgatcgcgacgatcgttgccctgatcgccacgatccagttaattcaatttttgggtgaccgtctggtcaaccgtttacgccacacgcaggggaaccttgtatga

SEQ ID NO: 239841 - DNA, 1023 bp, Klebsiella pneumoniae
atgatcgctattgatgacctgcataaaagttaccgcacggcggatggccggctcagcgcggtgctgaaagggctgtcgctgcaggtgcctgagcgctccatcaccgcggtggtggggccgagcggcgccggtaaatcaaccctggcgcgctgcatcagcctgctggagcaaccggacagcggcagcattcgtatcaatggccaggatctgtcggcgctgtccggcgaggcgctgcgccgggaacggcgggcgattggcaccgttttccagtcttcggcgctgttgagccgcaggaccgcctgggagaatgtcgccctgccgctggcgtggcttggtgtggtggagcgcgatatcaaggcgcgggttggcgagctgctggagagcgtcggcctgagccacaaagcggatgcctggccggcccagctctcaggcggccagcgccagcggatcggcattgcccgcgcgctggcgctgcgcccgtccgttctgctggcggatgaagccacctccggcctcgatcctcaggccacggcctcggtgctggctctgctcaagcggctgcgtgatgagtaccagctggcgatcgtcctgattacccatgaaatggacgcggtgcgcacggcggcggatgcggtggcggagatccgcgacgggacgatcgtccagtacgggcggatcgaagatctgctggcgcgtcccgattctctgctcggtcagcagctgttgccgctgacgccggcggcagctacccacagcgatctgctgctgcgtctgagctaccgctgggatgtgccggtggccaccgactggatcagccgcctgagccagcagtgggcgctgcagatcgatctccttggcggtcacgtcgaggtgattaatggtcggctggccggtcgcctgcaggccggagtgcgctttcagggcgaacgcctgtcgcccgcgcgactgcagggcctgctggcgcagctcggcataacggcggagatcctcgacagcgcgccgttgctcagggaggcggtatga

SEQ ID NO: 239842 - DNA, 1407 bp, Klebsiella pneumoniae
atgtcatcacaacgtgaaattcgtcttaacgctttcgatatgaactgcgtcggccatcagtcgccgggcctgtgggcgcatccccgggatcgctcctggcagtataaagatctggagtactgggtggatctggcgcggctgctggagcgcggcaagttcgacgggctgtttatcgccgacgtgctggggatttatgacgtgctgaacggcagcggcgatgcggcgatccgccaggcgacgcaggttccggtcaacgatccgctggctctgatcaccccaatggcgctggtgacggagcatctgggcttcggcctgaccgcctcgctgtcgtttgagcatccttaccccttcgctcgtcgtctgtcgacgctcgatcatctgaccaaagggcgggtgggctggaatatcgtcacctcctatctggagagcggggcgcgcaatatcggccagcagacccagaccgaccatgacacccgctatgactatgccgatgagtatttgcaggtgatctataagttgctggagggaagctgggaggatggggcggtgctgcgcgacagagagcggaagatcttcagcgatccgcggaaaatccatcccattaaccatcagggacagttcttttccgtgccggggatccacctctgcgagccatccccgcagcgcacgccggtgctgtatcaggcgggggcgtccagccgcggcaaacagttcgccgccggccatgccgaatgcgtcttcgtcgcagcgccgtcgaaggtgctgctgaagaagacggtggcggatattcgccgccgggcagctgaggcggggcgcgatccgcacagcatcctgatcttcaacctgcagacggtaattgtcggcgacaccgaccgcgaggcacaggcgaagtggcaggaatataagcagtacgtcagctatgaaggcgcgctggcgctgctctccggctggacggggatcgatttcggccagtatcagccggatcaggtgctgaagtatctgcacaccaacgccattcagtcggcggtggaggccttttcgaccgctgatccgaaccgccagtggacggtgcaggccctggccgattgggcggggatcggcggcttcggtccgctggtggttggcagcgcgcaaaccgtggcggacgaactgcagtcctgggtcgaagagacggacgtcgatggctttaacctcgcctatgccgtcactcacgaaaccttccgcgatgtcgtcgagctgctggtgcctgagctgcaaaagcgcggcgtctttaagcaagagtaccgcgaggggaccctgcgcgaaaaactgttcggcggcggcccgcgtctggccgcgcctcacccgggcgccagctaccgccgcgatgcgcgcacggcggcatcggtagaggagaaggtgacatga

SEQ ID NO: 239843 - DNA, 1398 bp, Klebsiella pneumoniae
atgagtgcagaaccgcatatcgtgattatcggcggcggctttagcggcgcggcggtggcgattgagctgctgcgcctggcgccgaacggggtgcgcgtgacgctgctggagccgcgccagtcccccggggccggggtggcctactccactgcggagccgacgcaccggattaacgttccggccgctcgcatgcagctggccggcgacgaagagggcgccttcgatcattggtaccgccatcagcctgcctttaccgtcgatgtgcaggcgctgcgcccggacggttccgtctaccctcagcgcggccagtttggtcgctatgtggcgcagcgttttgccgacgccgcggcgtccagcggcggacggcttcgccacctgcgcgatcgggcgctcgcttttcatcaggggatggtgaccaccgacggcggcctgcagcttaaggccgatctgctggtgctggcgatcagtcatccaccgccttcgctgccggcacaggccgaagcctggcgtcatcatccggcgctgattgccaacccgtggcagccgggcgcgctcgatgccatcgccccgcacgcccgggtggcggtgatgggcaccggattaaccatggccgatacggtcgcgacgctggaccggctgggccaccgcggcagtatcgtcgccttttcgcgccatggcctgctgtcgcgcggcaaccttagcggcgcaggggcaacctggcctggtgactatcagcagggcagcctgcgccagcgcctgcgtcagatccgcctcgacgtcgcgtatgcggcgcagcagggcctgagctggcaggtggtgctggatgcggttcgtcagcaggggcaacggatctggcaggcgctcagcgtcgccgatcgccagcgttttctgcgccatctgcgccattactgggatgtccaccgctaccgcgtggcgccgcaggtcgccgaggtgctggaggcgcgccagcgcacgggcagtctgcaggtgcaggcggccaggctactgtcgataagcggtgaaggcgaaacgctgcgtctgacgctggcgcggcgcggcggcggcgtgcagacgctgagcgtcgatcacctgatcctgaccaccggacccgcacaccgcgccctgaccgacagccagccatttttacaggacctcgcccgccgcggcctgattcgcgccgatgccctcggcatgggcctggaggtggacagccgttcccgggcagtggctgagccgcacgttgaggcgctgccggtgctggtggccggtccggccgcccgcgggcgttttggcgaactgatgggcctgccgcaggtagccgaccatgccgctgacgtggcggcgcaagcgttactcacgctcgggatcccgcaggactcccgatgtcctgcgtactga

SEQ ID NO: 239844 - DNA, 1173 bp, Klebsiella pneumoniae
atgacgcagcaagctcccgacaagatcaatgtcttctggttcttacctacccatggcgatggccgttatctgggtaccaccgagggtggacgcccggtcgatttaccttatctgcagcaggtggcgctggcagccgacagcctgggctactacggcgtgctgatccccaccggtaaaagctgtgaagattcgtggctggtggcctcggcgctggcgccgttgacccgccgtctgcgctatctggtggcggtcaggccgggcctgcagccgccaaccctggcggcgcggatggcggccaccctcgaccgtttatcggaaggtcggctgctgatcaacgtcgttaccggcggcgacccggtggaaaacaaaggcgacggtatcttcctcagccacagcgagcgctatcaggtgacccgcgaatttcttgatgtttacacccgcctgctgcgcggggaaaaagtggattatcacggcgagcatattcacgtggaaggcgctgaggtgttgttcccgccggtgcaggagaatggcccgccgctctatttcggcggctcttctgatgcggccattgatgtggcggccgagcagatcgacagctatctgacgtggggcgaacccccggaactggtggcggagaagctggcggtggtgcgcgagcgcgccgcggcccgcggacgcaccctgcagtacggcattcgtctgcatgtcattgtgcgcgaaacggaagaagaggcatgggccgccgccgaccggctgatcgcccatcttgacgacgataccattgcccaggcgcaaaagatcttcgcccgcatggactcggccggccaggcgcggatgagcgccctgcatcagggatcgcgcgataatctgcgcattgcgcccaatctgtgggccggcgtcggactggtgcgcggcggcgcgggtaccgcgctggtaggtaatccgcagcaggtagcggaacgcatccgcgaatatcaggcgctcggcatcagcaactttatcttctccggctacccacatctggaagaagcgcaccgctttgctgagctggtgatgcctctgttgccgctggaaaacggggcctcgtcgaaggcgcgtagcgtgaacaccggtccgtttggcgaaaccatcggcggcgataagcgcccggtgcgccaggtcagcgccagctga

SEQ ID NO: 239845 - DNA, 1944 bp, Klebsiella pneumoniae
atgctgaacccagaatccccttccaccgctcccgcgctgatcgacccggcgtcgaaggccttccagagcctgctggacaaactcgcgccaacggaggcgaccgtgctgatcgtgggcgaaaccggcaccggcaaggaggtggtggcccgctatctccatcatcacagcgcccgtcgccagcagccgtttctggccgttaactgcggcgcgctgaccgagagcctcgccgaagctgaactgttcggccatgagaaaggcgccttcaccggcgcgcagcagggacagcccggctggtttgaagccgcggaaggggggacgctgctgctggacgagatcggcgaattaagcctgccgctgcaggtcaagctgctgcgagtgctgcaggagcgtgaaattacccgcgtcggctcacgcaaagcgattaaagtgaatgtccgggtgattgccgccacccacgttgacctggcccaggcgatccgcgagcgccgctttcgcgaggatctctactatcgactgaatatcgcggtggtgccgctgccgccgctgcgccagcgtcggcaggatatcccgctgctggcgcaccactttttatcactctacgcccggcgcctcgggcggccaaccctgcgtctggcgccggaatcactggcccggctgatggactattcgtggccgggcaatattcgcgagctggaaaacaccctgcacaacgcggtgctgctcagtaaagaagaggagatcagtcctgcccagctgcgcctggcgacgctcaacgacgccccggggccggcgagcgatcatgaactggacgactttattcgccaccagctggcgcttcccggcgagccgctgtggcagcgagtgaccagcgccctgattcgccacgccatggcacattgcgacgataaccagagccaggcggccgcgctgttggggatcagccggcataccttgcgcacccagctcgctaacctcgggctgatcaaaagccgccgccgcccgcctgcgccgccgcgggcgttcgccaacgcagccggggccgatcgcgaactgcgcattggctaccagcgcttcggcagcctcgggatcctgaaagcccgtcagagcctggaaaccgccttcgccagcctcggcgtcaacgtgctgtggagtgagtttcctgccggaccgcagctcctccacgccctcgcctgcaacgagatcgacttcggcaccaccggagaagcgccgccggtgtttgcccaggccagcaatagcgaactgatgtacgtggcgtgggagccgccggcgccgcgcagcgtggcgatggtcgtcccgcaggggagcgacattcgccagctcagcgatctgcgcggtaaacgcatcgccctcaataaagggtcgaatgtccactggctgctgctgcagatcctcgaggacgccggcctgggtctgaacgatgtgcgggtggtctataccccgccgaaatatccgctgaccgccagcgactatctggcggttgacgcctggatgatgtgggatccgctgctcagcgacgccgaacacaccggcgagctgcgggtggtcgccagcggcgaaggccgggtcaacaaccatcagttttatctttcgcgacgggactacctcgctcagcatggcgatatcatgcgccgcctgctgacggagctgacccacaccgggcagtttatcgactcgcatcgcggcgaagcggcccgcttactctcggcagagctggggatcgacgcccggtcgctgagcatggccctcgcccgccgcagccatcgcccgcggccgatggatctgtcggtgatccgcgcccagcagaccatcgccgatcgcttttacgccctcgggcttatcgccaaaccggtcccggtgcgcgaagcggtgtggtacggcgaacccgcgccggacgtcatcagaccgctgatggcggtcagttag

SEQ ID NO: 239846 - DNA, 756 bp, Klebsiella pneumoniae
gtggctgttcatctgttaatcgtcgacgcgttaaatctaatccgccgcatccacgcggtgcagggttcaccctgcgtcgatacctgcctgcatgccctggagcagctgattgtccacagtcagcccacccacgcggtggcggtgttcgatgatgaggatcgcgcccacggctggcgccaccagcgcctgccggagtacaaagccggccgcgcgccgatgccggagacgctggtggccgagatgccgacgctgcgggccgccttcgaacagcgggggatccgctgctgggcctcgccgggcagcgaagcagacgatctcgccgccaccctggcggtgaaggtggcccaggcgggccatcaggccaccattgtctccaccgacaaaggctactgccagctgctgtcgcccaccatccgcatccgcgactactttcagaagcgctggctggacgcccccttcatcgccagcgagttcggcgtcaccccggagcagctggcggattactgggggctggcggggatcagcagctcgaaggtgccgggcgtggcgggcattggacccaaaagcgccgcccagctgctgaacgagtttcaggacctggaggggctgtacgcccgtctggccgaggtcccggagaagtggcgcaaaaagctggccgcgcatcaggagatggccttcacctgccgggaggtggcccgcctgcagaccgacctccagctggacggcaatctgcagcagctgcggctgacgcgctga

SEQ ID NO: 239847 - DNA, 1149 bp, Klebsiella pneumoniae
atggcaaacagaatgatcctcaatgaaacggcatggtttggccggggggcgataaacgcattaaccgatgaagcggtgcggcgcggctatcgtaaagcattgatcgtcaccgacagcactctcgcccgctgcggcgtggcggcgaaagtcaccgacaaactggatgccgccgggctggcatgggatatgttcagcgacgtgatccctaacccgaccatcgccgtggtccagcaggggctgcaggcctttcaacgcagcggggcggattacctgatcgccatcggcggcggttcgccgcaggatacctgtaaggcgatcggtattattcagcgtaacccggaattcgccgatgtccgtagcctcgaggggctgtcgcccacccgtcagcccagcgtgccgatcttcgcggtgccgaccaccgcgggtaccgcggcggaggtgacgattaactatgtcatcaccgatgaagaacagcggcgcaaattcgtctgcgtcgatccgcacgatattccgcaggtggcctttatcgatgccgatatgatggacgctatgccgccggcgctgaaggcggctaccggcgtggacgccctgacgcatgctatcgaagggtacctcactcgcggcgcctgggctttgaccgatgctctgcacctcaaggccatcgagatcatcgccggcgcgctgcgcggctcggttgccggcgacgccggcgcgggggaagctatggcgctcggccagtatgtggcggggatgggattttccaacgttgggcttggcctggtacacggtatggcgcatccgctcggcgctttttacaacacgccgcacggcgtggcgaatgccatcctgctgccgcacgtgatgcgctttaatgctgaggcgaccggggaaaaatatcgcgacatcgcccggtcgatgggcgtcagggtggaagcgttaagcctgaccgccgcgcgcgaggcggcagtagaggcggtctgccagcttaaccgcgatgtcggtattcccggccatctgcgcgaggtgggcgtcaggaaagaggatattccggcgctggcccaggcggcgctggcggatgtgtgtaccggcggcaacccgcgcgaggcgagcctggcggatatcgtcgggttatatcaggcggcctggtga

SEQ ID NO: 239848 - DNA, 648 bp, Klebsiella pneumoniae
atggaaagaaacagactggcccggcagattatcgatacctgcctggaaatgacccgcctggggttaaatcaggggaccgccggcaatgtcagcgtgcgctatcagggaggaatgctgatcacccctaccggtatcccatatgaaaagctgacggaagacaagatcgtctttattgatgccgacggccagcatgagcagggaaaactgccctccagcgaatggcgttttcatcaggcggcctaccagacgcgacccgatgcccaggcggtggtccacaatcacgctgtccattgtacggcggtgtcgatcctcaaccggcccatcccggccatccactatatgatcgccgcggccggcgggaattcgatcccctgcgcgccctatgccaccttcggcacccgcgaactgtctgagcatgtcgcggtggcgctgaagcaccgcaaagccacgctgctgcagcatcacggcctgatcgcctgcgaggccagcctggagaaagcgctctggctggcgcatgaagtggaggtcctggcccagctctacctcagtacgctggcgattaccgacccggtcccggtgctggatgacgaggcgatcgccatcgtgctggagaagttcaaaacctacggattacgcattgaagagtga

SEQ ID NO: 239849 - DNA, 1311 bp, Klebsiella pneumoniae
atgggaaacacaacgataccaacgcaaagttaccgcgccatggagagcgggcagagtaagagctacattattcctttcgctctgctgtgctccctcttttttctgtgggccgtggcaaataatctgaatgatattttattaccgcaatttcaacaggcctttaccctgactaacttccaggccggattaattcaatcggccttttactttggctattttattattcccatccccgccgggatgttgatgaaaaaattcagctacaaagccggcatccttacggggctgtttttatatgcctgcggcgccgcgctgttctggcctgccgccgaagtgatgaattacaccttatttctcattggattatttattatcgctgccgggcttggctgtctggaaaccgcggccaacccgtttgtcaccgtcctcggtccggaaagcggcggtcacttccgccttaatctggcccagacctttaactcattcggcgccattattgccgtggtatttggccagagtcttattttgtctaacgtcccgcatcagccgcaggaggtgctggataaaatgacgccggaacagctcagcgcctggaagcacagtctggtcctgtcggtacaaaccccctatatgattatcgtggccattgtcctgctggtcgccctgctgatcgtctgcacccgcttcccctccctgcaaagcgatgaccacagcgacagcgcgcagagcacttttttcgcctcgctgacgcgcctgatgcgcatccgccactggcgctgggcggtactggcccagttctgctacgtcggcgcgcaaaccgcctgctggagctacctgattcgctacgctatcgaagagatcccgggcatgacggccggtttcgccgccaactacctgaccgccaccatggtctgcttctttatcggccgttttaccggcacctggcttatccgccgcttcgcgccgcacaacgtgctcgctatctatgcgtttatcgccatgctgctctgcttgctctccgccttcagcggcggccacgtcggtctgctggccctgaccctgtgcagcgcctttatgtccattcagtacccgaccatcttctcgctggggattaagcatctgggccaggacaccaaatatggctcgtcatttatcgtcatgaccattatcggcggcgggatagttaccccggtgatgggctttgtcagcgacgccgccggcaatatcccgaccgccgaactggtcccggcgctgtgcttcgccatcatctttatttttgcacgtttccgttcacaagcggcgacgaactaa

SEQ ID NO: 239850 - DNA, 1776 bp, Klebsiella pneumoniae
atgaaaaaaatcagtttaccgaagatcggtattcgtccggtaatcgatggtcgtcgcatgggggtccgcgagtcgctggaagcgcaaaccatgaacatggcgaaagccaccgccgcgcttatcagcgagaaactgcgccacgcctgcggcgcccgggtggagtgcgtgattgccgatacctgcatcgccggcatggccgagtcggccgcctgtgaagagaaattcagcagccagaacgtcggcgtcaccatcaccgtcaccccctgctggtgctacggcagcgaaaccatcgacatggatccgctgcgcccgaaggccatctggggctttaacggcaccgagcgtccgggggcggtctatctggccgcggcgctggcggcccatagccagaaagggatcccggcgttctccatctacggacatgacgtgcaggatgccgatgacacgtcgatcccagcggatgtcgaagaaaagctgttgcgcttcgctcgcgccggcctggctgtcgccagtatgaaagggaaaagctatctgtcgctgggcggcgtctcaatgggcatcgccggatctatagtcgaccacaacttttttgagtcctggctcggcatgaaggtgcaggctgtcgacatgacggagctgcgccggcgaatcgatcaaaaaatctatgatgaaaccgagctggagatggcgctggcgtgggcggataaacacttccgctacggcgaagatcagaacgctgaacagtataagcgcaatgaaacgcagagccgcgcggtgctgaaagagagcctgctgatggcgatgtgcatccgcgacatgatgcagggcaacccgaagctcgcagaaaaagggctggtggaggagtcgctgggttacaacgccatcgccgccggtttccagggtcagcgccactggaccgatcaataccccaatggcgataccgccgaagcgctgctcaacagctcttttgactggaacggggtgcgcgaaccgtttgtcgtcgctaccgaaaacgacagcctcaacggcgtggccatgctgatgggccatcagctcaccggcaccgcccagatgtttgccgacgtacgcacctactggtcgccggatgccgttgaacgggtcaccgggcagacgctcaccgggcgggcggagcacggcatcattcacctgattaactccggctctgcggcgctggacggctcctgccagcagcgcgacgcgcagggcaatccgacgatgaaaccccactgggagattgagcagagcgaggcggatgcctgcctcgcggcgaccgaatggtgcccggcgatccacgaatacttccgcggcggcggcttctcttcccgcttcctgaccgaaggcggcgtgccgttcaccatgacccgggtgaacatcatcaaaggtctggggccggtgctgcaaattgccgaaggctggagcgtagcgctgcccaaagcgatgcacgaccagctcgacgcccgcaccaactccacctggcccaccacctggtttgccccacgcctgaccggcaagggcccgttcagcgatgtgtactcggtgatggccaactggggcgccaaccacggcgtgctgaccatcggccacgttggcgcagatttcattaccctcgccgccatgctgcgcattccggtctccatgcacaacgtggaagaggcgaaaatctatcgcccttccgcctgggccgcgcacggcatggatatcgagggccaggactaccgcgcctgccagaactacgggccgctgtataagcgttaa

SEQ ID NO: 239851 - DNA, 1419 bp, Klebsiella pneumoniae
atgaagcaagacgttatcctggtcctcgactgcggcgccacgaacgtgcgggcgatggccgtggatcgacaagggaacattatcgcccgcgccgcaacggcgaacgccagcgacatcgcggcggaaaaaagcgactggcaccagtggtcgctggaggccattatgcagcgctttgccgactgctgtcggcagatccatgaccagctggcctcctgcacggtgcgcggcattaccgtcacgacctttggcgtcgatggcgcgctggtagatgagaagggtgccctgctgtatccgatcatcagctggaaatgcccacgcaccgcggcggtgatggagaaaatcagccagtatatgcccgcgcgccagctgcagcagatagccggcgtcggcgcgtttgcgttcaacaccctgtataagctggtgtggctgaaagagaaccacccgcagctgctggcgcaggcgcatgcctggctgtttatttcatcgctgatcaaccatcggctgaccggggagttcaccaccgacctcaccatggcgggcaccagccagatgctcgatctccggcagcgcgatttcagcgcgccgatcctgcaggcgaccggcctgccgcgccgcctgttcccgcggctggttgaagcaggccagccgatcggcaccctgctgccggaggccgctgcgctgctgggcctccccgtcgggatcccagttatctcggccgggcatgacacccagttcgctctgtttggcgccggcgccgggcaggatgagccggtgctctcctccgggacctgggagatcctgatggtgcgcagcgcgcaggtcgacacctcgctgctctgtgactacagcggctccacctgcgagctggacagccagccgggccgctataacccggggatgcagtggctggcctccggcgtgctcgagtgggtgcgcaaactgctgtatagcgctgacaccccatggcagacgctgattgacgaagcgcaggcgatcccgcccggcgcccagggcgtcaggatgcagtgtgacctgctcgccagccagcacgccggctggcagggcgtcacgctcaacaccacccgcggccatttttaccgcgccgcgctggaggggttaagcgatcagctggcgcagcatctgcaaaccctggaaaaaatcggcggcttcagggcgaaagagctgctgctggtgggcggcggcagccgcaacgcgctatggaaccagatcaaggccaaccgactcgggataccgatcaaagtcctcgacgatgccgaaaccaccgtggccggcgcggcgatgtttggctggtatggcgtgggcgagttctcttcgccagaacaggccagagcgcaggtcgcgtaccgctaccgctatttctggccgcaaactgaacctgaactgatagaggaagcctga

SEQ ID NO: 239852 - DNA, 423 bp, Klebsiella pneumoniae
atgctcaaaaccatttccccgctgatatcgccggaactgctgaaagtgctggccgaaatgggccatggggatgaaatcattttttccgatgcccatttcccggcgcacagcatggggccgcaggtgatccgcgccgatggcctgcgagtcagcgatctgctgcaggcgattatcccgctgttcgaattagacagctatgcgccgccggtggtgatgatggccgccgtcgaaggcgatgcgctcgacccgacggtggaacaacgctatcggcaggcgctctcggcgcaggccccctgcccggatatcgtgcggattgaccgctttgccttctacgaccgggcgcaaaaagcctttgcgatcgttatcacaggagagtgcgctaagtacggaaatatccttttaaaaaaaggagtcacgccgtaa

SEQ ID NO: 239853 - DNA, 711 bp, Klebsiella pneumoniae
atgaaagcagcccgccagcaggcgatcgtcgatctcctgatcacccacagcagcctgaccaccgaaacgttgtcaaaacagctcaacgtcagcagggaaactattcgccgcgatctgagcgagctgcaggcgcagggcaaagtgctgcgtaaccacggccgggccaaagtgatccaccagcgcagccaggacagcggcgatcctttccacatgcgcctgaaaagccattacgcgcataaagccgacatcgcccgcgaagcgctggcctggattgacgaagggatggtgatcgccctcgatgccagctccacctgctggtatctcgcccgccagctgccggaccgcccgctgcacgtctttaccaacagccagcccatctgccaggagctggccaaacgcgaccagatcacgctcacctgctccggcggcactctgcagcggaaatatggctgctacgtgaacccggcgctgatttcccagctgaaatcgctggagatcgatctgtttattttttcctgcgaaggcatcgacccgcagggcgcgctgtgggactccaatgcgttcaatgccgacttcaaatcgatcctgcttaagcgggcggcgcagtcgctgctgctgatcgacaaaagcaagttcaaccgctccggcgaggcgaggattggtcatctggatgacgtgacgcatattgtgtcggatgcgccgcagccttaa

SEQ ID NO: 239854 - DNA, 1101 bp, Klebsiella pneumoniae
atgaataaggttgtcctctattgtcgccctggttttgagaaagagtgcgcagcagaaattaccgataaggcagcccgccttgaggtgtttggttttgcccgggtcaaagaagactctggctatgtaatttttgaaggttatcagcaggacgacggcgagaagctggtgcgcgatctgccgttcagctcgctgattttcgcccgtcagatgtttgtggtcggcgaactgctgcgcgacctgccgccggaggatcgcataaccccgatcgtcggcatgctgcagggcgtggtggagaagggtggcgagctgcgtgtggaagtggcggataccaacgaaagcaaagagctgatgaagttctgccgcaagtttacggtgccgttacgcgcggcgctgcgcgaggcgggcgtgctgaccaactatgaaacgccaaagcgaccggtggtgcatgtgttctttatcgcacccggctgctgctataccggctactcatacagcaacaacaactcaccgttctatatgggcattccgcggctgaagtttccgtccgacgccccgagccgttccaccctcaagctggaagaggcgttccacgtttttattccggcggacgagtgggacgagcgtctggcgaacggcatgtatgccgtcgatctcggcgcctgcccgggcggctggacctatcagctggtgaagcgcaacatgtgggtctcttcggtcgataacggcccgatggcccagagcctgatggataccggccaggtgacctggctgcgcgaagacggtttccgctatcgtccgaaccgcaacaacatctcgtggatggtctgcgatatggtggagaaaccggcgaaggtggcggcgctgatggcgcagtggctggtcaacggctggtgccgggagaccatcttcaacctcaagctgccgatgaaaaagcgctatgaagaggtgtcgcagaatctggcctatattcaggcccagctggacgagcacggcgttaacgcccagatccaggcgcgtcagctgtatcacgatcgtgaagaggtgaccgttcacgtgcgccgcctgtgggccgccgtcggcggacgtcgcgacgagcgttaa

SEQ ID NO: 239855 - DNA, 396 bp, Klebsiella pneumoniae
atgaccagccgttttatgctgatattcgccgcgattagcggctttatctttgtggctctgggcgcctttggcgcgcatgtcttaagtcaatcgctcggcgcggcggagatggcctggatccataccggcctggagtaccaggccttccataccctggcgatttttggtctggcggtggcgatgcagcgtcggatcagtatctggttctactggagcagcgtatttctggcgttagggaccgtgctgttcagcggcagcctctattgtctggcgctctctcatttacgtctgtgggcgttcgtgaccccggtgggcggcgtaagcttcctcgccggttgggttttaatgttaattggtgcaattcgtctgaaacgtaagggcgttgttcatgaataa

SEQ ID NO: 239856 - DNA, 825 bp, Klebsiella pneumoniae
gtgacgcaggccgcagtcagccatcaaatcaagtctctcgaggattttctgggccttaagctgttccgtcggcgcaatcgttcgctgctgttaacggaagaagggcagagctattttcaggatcttaaagagattttttcgcaactgacggaagcgacgcgtaaactgcaggcgcgcagcgccaaaggggcattaacggtcagtttattgccaagtttcgccattcagtggctggtgccaagactcacaagctttaactcagcttatccgggaatcgacgtcaggatccaggcggtggaccgtcaggaggataagctggcggacgatgtcgatgtggcgattttttatggtcgcggcaactggccgggcctgcgtgtggaaaaattgtacgccgagtatctgctgccggtctgttccccgctcttgctcaccggcgacaaagcattgaaaacgcctgccgatctggcgcaacataccctgcttcacgatgcgtcccgccgcgactggcaaacttatacccgtcagcttggtctaagccatattaatgtgcagcaggggccgattttcagccatagcgcgatggtgctgcaggcggccattcacgggcagggcgtggcgctggccaacaacgtcatggcgcagtccgaaattgaagccggtcgtctggtgtgtccgtttaatgatgttctggtcagtaagaatgcgttttaccttgtttgccatgacagtcaggcagaactgggtaaaatagccgctttccggcagtggatcctggcgaaagcggcaagtgaacaagaaaaattccgctttcgttatgaacaataa

SEQ ID NO: 239857 - DNA, 231 bp, Klebsiella pneumoniae; identical to SEQ ID NO: 136056

SEQ ID NO: 239858 - DNA, 1206 bp, Klebsiella pneumoniae; identical to SEQ ID NO: 136055

SEQ ID NO: 239859 - DNA, 432 bp, Klebsiella pneumoniae; identical to SEQ ID NO: 136054

SEQ ID NO: 239860 - DNA, 822 bp, Klebsiella pneumoniae; identical to SEQ ID NO: 136053

SEQ ID NO: 239861 - DNA, 1098 bp, Klebsiella pneumoniae
atgaaaggacgttgggcaaaatatgtagcgacgggggcaatgctggccatgctcgccgcctgttcctcaaaaccgaccgaccgcggtcagcaatatagcgatggcaagttcacccagccgttttcactggtaaaccagccggatgccgtcggggcgccgatcaacgccggcgacttctccgagcaggttaatcaaattcgtaacgcctcgccacgcctctataatagccagagcaacgtctataacgcgctgcaggagtggctgcgcgccggcggcgacacccgtacgctgcgccagtttggcatcgacgcctggcagatgcagggcgtcgacaactatggcaacgtccagtttaccggctactacacgccggtggtgcaggcgcgccacacccgtcagggcgaattccagtaccccatttaccgtatgccgccgaaacgcggtaagctgccgtcccgcgccagcatctatgccggcgcgctgagcgataactatgtgctggcgtacagcaactcgttgatggataacttcatcatggacgtgcagggcagcggctatatcgactttggcgatggttcgccgctcaacttctttagctatgccgggaaaaacggctggccctatcgcagcatcggcaaagtgctgatcgaccgcggggaagtgaagaaagaagatatgtcgatgcaggcgatccgcgagtggggtgaaaagcacagcgaagcggaagtgcgcgagctgctggagcagaacccgtcgttcgtgttctttaaaccgcagtctttcgcgccggtgaaaggggccagcgctgtgccgctgatcggccgcgcctcggtggcctccgaccggtcgattattccgccgggaaccaccttgctggccgaggtgcctctgctggataataacggcaagtttaacggccagtacgaactgcgcctgatggtcgccctcgacgtcggcggggccatcaagggccagcatttcgacatctatcagggcattgggcctgacgcaggccaccgtgccggctggtataaccactacggccgcgtatgggtgctgaaaaacgccccgggcgcggggaatgtttttagcggctaa

SEQ ID NO: 239862 - DNA, 531 bp, Klebsiella pneumoniae
atgtaccgcgtccttaaaaaagacgcactgatggtgagcttctacagctggaaccgtgtggaccgctttatggccgcgtggaaggcggcaggattctatgccgtgggccagcttgtgttcaccaaaaactatgcctccaaccgtcgtaacgccagggcccgacgcggatttgtggactactgccatgaaggggcttatgtccttgccaaaggccgccccgtgccgccccttaaaccgctgccggatgtgctgcccttcccgtataccggtaataccctgcatccgacgcagaaaccggtggaggcgctacagccgctgattgagtcattcagcgccccgggcgcgattgttctcgacccgtttgccggaagcggttcgacctgcgtcgctgcataccgtgccggacgccgctatatcggcatcgaaatgctggcgcagtaccaccgggccggaaccgaacggctggccgccatgcaccgggccgtcaacaccccggcggcgaacgatgaatggctcccggaggctgcgtaa

SEQ ID NO: 239863 - DNA, 531 bp, Klebsiella pneumoniae
atgtaccgcgtccttaaaaaagacgccctgatggtcagtttctacggctggaaccgtgtggaccgctttatggccgcatggaaggcggcggggttctatgccgtgggccagcttgtgttcaccaaaacctatgcttccaaccgccgtaatgcgaaagaccgtcgcggattcgtggactaccgccatgaaggggcttatgtccttgccaaaggccgcccggtgccacccctcagaccgctgccggatgtgatgcctttcccgtataccggcaaccctctgcacccaaaccagaaaccggtggaggcgctacagccgctgattgagtcattcagcacccctggcgcgattgttctcgacccgtttgcggggagtgcctcgacctgcgtcgccgcataccgcgccggacgccgctatatcggcattgaaatgctggcgcagtaccaccgggccggagccgaacgactggccgccatgcgccgggccgtaaataccccggcggcgaacgatgaatggctcccggaggccgcgtaa

SEQ ID NO: 239864 - DNA, 258 bp, Klebsiella pneumoniae
atggcgctgttctgcgttcattttgccggaacctcggcgtgggggctggtacaggtgctggtcagcgagcagaaagttgcctcggtggcggcgattcagaatttcggcagtttcgtttttgcctcttttgccccggtcgttaccggttgggtcgtcgacaccacccactcattcaatcttgcgctggtcattgccgcctgtgtgacttttaccggcgcactttgctacttcttcattgtaaaagaccctattcattag

SEQ ID NO: 239865 - DNA, 186 bp, Klebsiella pneumoniae
atgatgatctcatatcaggaacttgttcgcaccttccttaaaagattgagcatcaagagtaacattatggcaaataaagccgaatgttttgaatttatttattatgttgtcatcaataaaatggctgatgatgtgaatctcataacctgcatcacgggaggcgatggcacgatcgatccagtgtaa

SEQ ID NO: 239866 - DNA, 204 bp, Klebsiella pneumoniae; identical to SEQ ID NO: 239786

SEQ ID NO: 239867 - DNA, 210 bp, Klebsiella pneumoniae; identical to SEQ ID NO: 169826

SEQ ID NO: 239868 - DNA, 738 bp, Klebsiella pneumoniae
atggcatcagacacggtacccgtggtgctgccgggtggcggctgcgccttacccggcctacaggatcctctcacaggctcgcactccgtaggcccgcgcaagcgcagcgccgccgggcgatggtatcaggcacggtacccgtggtgctgccgggtggcggctgcgccttacccggcctacaggatcctctcacaggctcacactccgcaggcccgcgcaagcgtagcgccgccgggcgatggtatcaggcacggtacccgtggtgctgccgggtggcggctgcgccttacccggcctacaggatcctctcacaggctcgcactccgtaggcccgcgcaagcgcagcgccgccgggcgatggcatcagacacggtacccgtggtgctgccgggtggcggctgcgccttacccggcctacaggatcctctcacaggctcgcactccgtaggcccgcgcaagcgcagcgccgccgggcgatggtatcaggcacggtacccgtggtgctgccgggtggcggctgcgccttacccggcctacaggatcctctcacaggctcacactccgcaggcccgcgcaagcgtagcgccgccgggcgatggcatcaggcacgatagccgtgattttgccgggcggcggcggcgccttacccggcctactggatcctctcacaggctcacactccgtaggcccgcgcaagcgcatcgccgccgggcgagatatcaggcacgatacccgtga

SEQ ID NO: 239869 - DNA, 597 bp, Klebsiella pneumoniae
atgagaaaactagtttgtccgcggctcccgcaatttcaggcctgcgtctcaccgctgggtcaactgcatactcgtccgctctttggcggctacagcctggctattgatgatacggtgtttgcgatggtggccgaggggaacatttatctgaaggcctgcgagcagagcgctgcttatcgggtggaacatcgtaatcctctgttaacgctgcgccgacacggccgcatagtgccgctgaagtattatcaaattgacgacactttatggcgcgatgagcagcagctttttcggctatcgctactgtcgtggcagagtgcgcagcgcgaaaagaactgccgacgggcgtcgggccgcctgaaggatttacccaatatcagctttcatatggaattgcagctgattcacgcgggcataccggacgttaggacgttgcgggaagttggtgcgcaggaggcatggctgaggctacgcgtaaataatgcttctttatcgctgagcgtattgctggcgctggagggggcgattgccggggtacatgccgccgcgctcccgacgccacggcgtcaggagcttctcgaatgggcggccacccggtag

SEQ ID NO: 239870 - DNA, 414 bp, Klebsiella pneumoniae; identical to SEQ ID NO: 136954

SEQ ID NO: 239871 - DNA, 261 bp, Klebsiella pneumoniae; identical to SEQ ID NO: 230755

SEQ ID NO: 239872 - DNA, 246 bp, Klebsiella pneumoniae
gtgaccaaagacggcgggggcctcgatcgggaagcgagaaagctgatgctttcgctgaaacgttgtgacccctgtgaaggtgccggagtggcttgctattcgggctcaacagtttcccatgtcgggatcgttgtgatgctcgataaccagctgcaggtcgcggaatgtaatccaggctcgggggttacgtttctgccactgtcgcgatttatccgtcgctttaaccgcgtggagttctggcaatga

SEQ ID NO: 239873 - DNA, 504 bp, Klebsiella pneumoniae
ttggcgaagcgtgtcaccatccatcagaacgaagtgagtaacgtcgttcgcaaagctggttgcatcggttccggtggtcgtaaagccgacgtcagtagcagcattcaggcggtaatactggttgttatagcggatgtactggttacgtgcactaaactgaaatggaccatgctcatagtcgccaagaaaaacgtagccggaggacagaaggaattgctcaaaccgattagctctgtccagctgcgcggcttcgaactgattatttcttccggtgttcgtcaggcgctttacaccaagacggtcagtatagaattcaccggtgccagtaacttcttcgtcaagcttcgcgcctgcaaataccgcattgcggatatcggtactcggtaccgtaacctgcgtcggtgtagggagtggaacttctgccatgtcttttcgccctataaaaggcgcacgaagccctcagaagtgaatctgatggtgtgcgcgaaggttgattatgggtaa

SEQ ID NO: 239874 - DNA, 270 bp, Klebsiella pneumoniae; identical to SEQ ID NO: 234344

SEQ ID NO: 239875 - DNA, 882 bp, Klebsiella pneumoniae
atggaaggcaaggaaatatacgagcatgagttttcaggtttgttaactaaatttgaagaggtttgtacttggttcgatagtttgggctttaggtttgcagtaacaagatatggggtataccacaaaaaccttcaaaaattgaaagcactatcaaatggagaaaaaattttcaaagatacacccgatgaaaatttagttgcctttatgaaggagatgatgaattctcacgtggaagctaatgaaatcataagggtttacaatgatcttaaagggcttgatatccaggaatatctcgatcaaataaagaaggttatcactggtcaagaatttcgtgctacttctgagaacgatcctgcaagagactttctgtttgagttgtcaatggctgcaagattcctgcgtggagggtataaaatttctcttaaaagcatttgtgatatcgaagtgaaactctctgacggcagaattctttttgtagaatgcaaacgagttaagtcgttaaaaaaactatctaaaaacataaaagttgcaaaccagcagatcgtgcgcaggataaaggatagctcatcacttaaaaatctaggcatggtggccgttaatgttactgatttgcttcctaaagtgtctctcattaattctgaagatgcgagaatggcaataaatgaacatcgtgagttgtcacgaaattttatcttgagaaatgtagaggattttatggcaggggaaaacaaaaaatgtataggtgttttatgtgaaagttctttgtccaagcttattccaggaggtttgatatattcccggcatattaataacatcccctatgaaagtgatgatttatttgagagattaatgcctcaactcagcaatcaggatattgcttag

SEQ ID NO: 239876 - DNA, 525 bp, Klebsiella pneumoniae
atggtattttatataagaaaagttgaaaaaaataaatgggattacttacctccggaggatggcgatcatttgcatatgggtactgatggtgtaactaattgctgtaaaacaagcaataacacgttatccatttgggaaactcctaataacaatcccgatagtaatgaaaataaacaaataattgtagctattaatactgcgggagatcgaccatctactacggattttatttttatatctgatgctgaaatatcacaactaggagtctctatctcccatactcctgattcggcaacaacactaataaaatcgatgaaatgcaagcattatgatattaaagacttgaatattgactccttgggtaaaattgggatgttaattcatcagaaagttaacgatgacaaacaaatttatcgaaaaactgttggtgaaattaagaaggaaactgtttcactctttcctgataagacaccagaggctaatgacatcaaaactaaagataactgggctgccttatacaagtaa

SEQ ID NO: 239877 - DNA, 696 bp, Klebsiella pneumoniae
atgaataacaataatgttaaagatttttccgtaaactataactttcacaactcatatattcctactaccaacggttatgtgatcaatgatgccaatctcttttggtatcataatgttttttcagattttaatgaggcaatatttataccatccgatgaacttgatatcaaaacaacagaagcgcatttcaagcctgtacaaactgatatcattggtgacttacaacttaatattgttaataaaaaaaataacatatcgcccgttgacactgattttatatccaataaaatttacaatcatttcatttttgatgaaatatcttttgacacaatatcgaagactaaatatataattgatcgattaataaatgagtatggttatcaacaagtagactacgctcttctcaacttaattagtcgcactattttcattagcaatgatgacgaaaaaatcataaaattcatatgcttgctatcttcagtttctgttagtgacattcctctttcattttttacaacaatagtttcattttacaatcataaatcggactctgttaaagaggctgtaattatggctgttgagtattgggaaactaaagacgcaataacttacattgaaatgatggaaccattcaaaaggccatatttggaaaaatacaaaaaaaacgtattgacttatcttaaggagttaccttaa

SEQ ID NO: 239878 - DNA, 681 bp, Klebsiella pneumoniae
atgcctattctagcatcaagttatgcatttaactttatcacgaataatatacaaatatctcccgatagcgagggagttaccaaactagttccaattattacacaaggatttttaccctccataaatgacgaaattataaatggagttcctgcaaaaatattaaagcttgaaaaaaacgaagacaatgttggagcagccatcttatttagaggcgatattattgcaattgagatctccagtgataatatattagagccaacgttaatcgaacaaaaattaacttcaataattagcagtttatctccttttttaaataacttaaaggcgaaaagaatttctagtgttatcaacataataactgataacagtgataaagcctttgaggacaaaatatataactctttcttcaaggatgaaaataatttatttgaatggtctgtgaggaaagttagtgagaaagatattgatggcgaacaaacatataatctaataaccgtacataaaggtcattcaataaaatcacaaaacggtgtttttcaaaatataaaaacaatcactattacagctgataataataccgtacctttaaaccaacttgaacgctttgatttcagttatagtagtttacttagcaagcttttctctaagtctctcgaagatattcatagcatcataaaatga

SEQ ID NO: 239879 - DNA, 1743 bp, Klebsiella pneumoniae
atggataataagagtgcaacgcctaaagtaattaaaatacttaccaggaatggtctgaaaaattttgttattgtgttatttctttcagctatttcgtcagcgttattatcaattactccggtttacatatcatccatcaccgaacatttaacgaataatgcccctcacgagagacagatgatttatattatcggtgcaatgtacgtcgccacccttggaatacaaaagtgtttacaattcctctcagtatactgccagagccatttaagaattgatgctataataaatatatcgcgcacttatcttcaatcattatacgaaaaagaaagaacgctggcccctgatgaaaacacaggggatatcagtcataagttgaatcaggcgactaatgatatctatgtcattatcagattgcttgctacaaatttatttccttctgtcctgcagattttgatatctgttgtctttatattcaggtcaggagatgtttttacctcggtattatttttactgtattccattgtttttattgttgtcaatacttatttcagcaagagaatattaaaaagcaaaagagttttactcgatagtgggcgaaaaacctatagtctcataactgatagcgttaaaaatatatcactcgtcaggagcatgaatacctttgattttttctttagtagatttcgagctactttagaaaacgaccggaattcgcaacaggactactggcatttaaatatcaaaagtcaaatcgcctccggccttcttaatttaattgtttttggtattgtattttttaaggtgttaaatgatacggtaaatggtttcgttccgctcagtcattttatactgattacatcttacattattctttttattactcctcttgaaggtctagcccagtcattaattgaattaaaagaggcgagttctaatctcaatcaatttctaaaaaacctaaatctcgtagggccaagtaaaaagctggccagaacagacggtgaaattgatatccttgccaaagaaatcgaatacacatataacagaagaaatgagcaacaaaattttaagcttgggcctgtgaatctgacactaaaatcaggtttgttttacagtttaaccggagagaacgggtctggaaaatcgacttttataaaaatattaaccagacagttaaaggattaccatggtggattgacaatgggcaacaaagattatcagtctatccaggacgatgatttctataatgttgtatcgtatgtatcccaggatgattatatttttatggatacactgaaatttaaccttatgattgcgaaccccaaagcaacagaagaacaaatgcttcaggctcttgagttatcgggattgaacaacactaaagataccaatatactgaacagatcaatcgctgacggcggcgtagatttttccggcgggcaaaggcaaaaactatcgcttgctcgtttattactgcgcagtcccaaaatcatcatacttgatgaagtgtcttcttctatggatataaagacggaagagcattgttttcgcactatcaggagcaaattccctgacgctacaattattaacattactcatcggcctacctcattaatattgtctgatgaaatctttgtattccaggatggtaagatagttgagtcaggttcagttgatgagctgatgaatacaggacattatatttcagcgctgatgagaaagtatggatcggaaaaagtataa

SEQ ID NO: 239880 - DNA, 1590 bp, Klebsiella pneumoniae
atgcttattatcacaggcaataaaaaatccacgggagtagatgattatatctgtaaacataatatgtatatatatgcagatgaaacttacgatacatgggattataagggtacgtatataatattcaaaggttattgttttgatgaagatggcaatgggattgcaataaataaggattcatttctccctgaagtattggacagattaccagagtttagtgggttctttgtcttgattactatatctaaagataaaactgtcatttacaaaagtctcagtagaaatactgatgtattttatagtattgacgataataacctaacgataagcgatagcattaaactcctgtcagagttattgggtaagaaaactatagatccaaaattttttagttcctttgttaataatgcatgggtggcggtatttcttagccctataagtggcatagagaaaataaacggtggttgtaaatatgtttttgactctgccggtgttcatgtttttaagcacgcaaatcttaccccaacgaataaagactttattgaagttacctcaaacatgataaaatcagtgtgtaaaaataaaaaggtatttttacatctatcgggtggattcgattccacatttatattttattttttaaaaaaaacaaatattttctttgaagtctatacacatgcgcctgacagatatgataatgattctgaagttaatagagttagggaattatgtactaaaaacaatgttccatttagggtggtatccgggttcccggacattcttaaaagtaataaggaggttagtatcccttcggatgttaatgtaatagagaacgaattagaagataaccaatataatgaactattgaataatcaccatatagttttcttaaatggccacggtggggattgtttgttcgttcaaaacccctcactcaagagtgttcatcacagactgaaacatggtagattaatcaatggcttatgtaacgcttataaattatgcaggctaaaatatttgtcgttcgcagaaataattaatccgcgaagtagaatccactgtaataactggtttagtgatacaaaatacaaaggattttaccaacatcctttacttatcaatattgacgacagtagccctgaatacgatcatatagctaacatgttatacttcatggaaagccttccacttcaattaaaagggggcgcaatgattttttctccatttctgatgtcttgcgccttcagggtttttatgaaataccgatatgattataattttagctccgaacacgacaggattttagccagaaagattgcatataacatcgcgcatgatattcaattgtttgatgtaaggaaacgttcctctaataaccttttgtttgattttttacataaaaacaaagaaaaaatacttttattaattaatagggggtttacccaggggatgggggaagtaacaactgatgatttgaaagagtcacttgagattaatacatcgattggtatcgatgggaacgcaacaaaatttctaaaattaatgatgctcaatcgttatgctgaaatgaatatgttaacgaaggaatag

SEQ ID NO: 239881 - DNA, 618 bp, Klebsiella pneumoniae
atgttcaacatgactcattatctgcgcttcagtatttataaaaatgatttggttatcattgatataaataatgatgagttctttattatgaacgacgtcaatcatgaaaatataagcctgttaaccgacgttgaggaggaattattggccgcaggattaatacagtcactaacaccgattggtggaaataatgaaaacttctatgatgaacgatggttaccgagaaaagcaacactccgcaaaattaaccctgtcctattattaaaggtatgtagtgtttttgttaaatgcaaaaagaaccttgacagtaatggttattacggagttatatacagtttacaaaatgtcaaaaaaaatcacaggtgggataaatattctccgggagatataattaactgcctaaattttataatgccatttaaacactgtgaaaatccttgcctgatttactcatatgccttagtaactatgttaaaaaaagcaactggcaaagggactctcgttgttggagtcagaactcgtccctttataagtcatgcctgggttgagttagacggtgaaataatttcagataatatttacttacgggataaactcagtgtcatcatggaggtttaa

SEQ ID NO: 239882 - DNA, 255 bp, Klebsiella pneumoniae
atgaacaaaatattcaattccctgcagaataattttatgaactccttcgggttcccggccacgttacgacggcagattaataatggggttctacaggcctataaacctgatcggcaggatacgatctggctacgatccgtcgtagccaggcataactggctcagctatgagcaacattgcattcgctacctccgtccgggccataacggtgatttagaatatcgtttccggtccatttataaattttactcataa

SEQ ID NO: 239883 - DNA, 1185 bp, Klebsiella pneumoniae
atgccatttgttatttatgttttcactatcagtgcctttgcgctcggactcgcggaatttgtccccattgggctgaccgacgtcatggctcaggggttgggggtgggtgtggagcagaccggtgcagcggttacgacctatgcactgggggcaacgttcgcggcacccgtactgtctgcgctgaccgcaagctggaaccggaagaatgtgatgcttaccactgccgttgtgtttaccgccggtagtctggcggccgcgtttgccgccacattacctcagctactgttggcgcggttcattgccggtctgggacacggcctgtttctggctgcggcatccagtaccgctgctcgtctggctggaccaggtaaagcaggcagagcggtggctgtggtatttggtggctttactctggcgatggcaatcggcgtgccgctgagtacatggctgggaggcgtggtctcatggcgtccagttctcggcgctattgccgctttcggcgcgctcggattccttggactgttgttcggtatgacagaccccgtacgcagtgtgcccggtgaacatagtggctcagcaatgcagaatattagcatgctgtttaaccgtaagttactggccggcgcgctggttacggtgctggcatatgcaggctcgtttacggcttacacctttatcgcacctattctgatgcaggtgacaggcgtaaccggagcaacggtgagtctgtttatgctggtttatggtattaccgctgcggtaggcaacattctgggtggaaaacttaccgacagcatgggggtgaatcgtgccaatatactcattataagcggaattattattgtcgtactgggtatgtggctgctggcttcctcaccagcgagcatgggtattctggttgcgctgctgggtatgatgacatttgccgcagtgccggcactgcaggcccgtctgattggtgtcgctgagcaacatgctcctcatgcccatggcgttgctgccggcctgaatatcgcgggcttcaactctggtatcgctctagggtcggtactgggcggtcttactatcacacacgccggtatcgtgtataccggtataagcggtgcgattgtttctctgctcggcctactgttgctgcttgcgcaaatccgtcgccgtcacagcagtaaatttcagcaggcttaa

SEQ ID NO: 239884 - DNA, 693 bp, Klebsiella pneumoniae
atgcttacccgtgaagatatgctcaatggcgcatttgtcagagcgcatgaaacgctgctcccggtacacatgcgctgggacgctgaaaaaatacgggcatcaatgtactccactctggaggagcgcccgatgggcgctcctgtgtggatatttgcctacgggtcattgatgtggaatcccgcgctggcgattgaagaaatgcaacgggcccgcctgaaaggatggcagcgcagtttctgtatccggctgatatccggacgagccccccctgatatccccggcagaatgttatctcttgacgagggtggaataaccgaaggtatggcgttcagactgccggaatcgactctgatacatgagctggagatggtctggacgcgagagatgattaccggtctgtaccgtccggtctgggcagaaatttcgctcggaaacggtgaggaaattcaggcgctagctttcgtatcagacagattgcatccacattatgaacaggacaattttacagcgaccgtagcgtcgagcatcgcatctgcccgcggagacattggcacgaatgcagattatgtatggaaactgcaggccactctgggtgcgttgggaatacgggatgattacgtgagtgaactggcccttgctctgcatgaggctccctgtaacgataaacttcatcagcgaggcgcttcactatga

SEQ ID NO: 239885 - DNA, 882 bp, Klebsiella pneumoniae
atgagccatctgagccacctgcgaacgtttcttgaggcctatcgctctggctccttttcaaaggcggcagagctacttggcatcactcagcccgcagcgtcacaacatatccaatctcttgagactctggttggtaagcgtctgttcatcaggcaggccagaggcgtgacggcgaccgaagctgcggatgagcttgcccgctccgtttcacccttcattgacggtctggaagaaaagctatcgtctttccggtcaggccctgtgcgcgggggaacaattaatctggcaggacctccggattttattcattcccggcttggggcagtaatggctccattgatgaaggaggggtatcgcctgcgctttcataccggcaataagcaacgtatttattcccttttgcatgacgggagcgccgatctcgctgttaccgcatccatgcctgatgaccgtctgtacggctatgcacatctcctgactgaacgcatgcttcttgttcatgctcccgccatgtcagagatcgtcggttcaaaacctggtgctgaaacgcttgcctcattgccgctgattgcttatgacgaagagttgccgctgattagagcgctctgggtcacaatgtttcagagggctcctgagatgcaggctgcgtttaccattccggatttacgtattatccgcgacctggtctgcgatggtcacggatggacggttctgccggattatcactgtaatgatgacctgaaaagtggccgcctgatttcagtgacccctgcagatatcgccccgactaaccatctttatctggtctggaacaaaaggacggctaataacagccgggccgcctacgttcgggattacattcttaaagcgtttcagcgttga

SEQ ID NO: 239886 - DNA, 801 bp, Klebsiella pneumoniae; identical to SEQ ID NO: 195685

SEQ ID NO: 239887 - DNA, 1182 bp, Klebsiella pneumoniae; identical to SEQ ID NO: 195686

SEQ ID NO: 239888 - DNA, 1335 bp, Klebsiella pneumoniae
atggttaagttaaaacgtagatgtctcttgtttaacttacataatggtaacatcatgaataacatctctgaaatttctgaaagggtagctttaaataaaataccctttacaagctatgatgctggctgggttattctttgtattggtatggcaatcggtggcggtattatttttctgccagtccagattggactgaaagggatctgggtatttaccctgtcggtcctgattgcatacccggctctctatatgatgcagtcgctttaccttaaaacattatcacaaagccctgaatgtaaagattattctggtgtgataaccttttatcttgggaaaaactggggattctttctgggggtggcatattttattatgcttctcaaaggaatgttaacctactcgctggcggctacctttgacagtgcatcgtatttacagacattcggcatatcgtctgacaaattatcagataactggtggtatggacttgttgttttagccttactcgtcagtattgcagcccagggtgagaagttgttgttcaaggtttctggccctatggtgctggtaaaactggcggtggtggtgcttttaggtctggtcatgatccctcactgggatatgcggaacatcagtaaccttccgccttttggtgaattactggttggcacagttctgacgttaccttttacgctgttttcaatcctttttgttcagatcctcagtcccatgaacgttgcctttcgaaaagtagagccagacccgcaaattgccaccctgcgggcgttacgggtcagtcgtattgcttatggcatcctggtttgtgctgtacttttctttgccttttcatttaccttttccctcagccatgaacaggcaactgaggctgctcagaataatatttccgcaatggccatcgtggcgaaagttatcccgggcgaggtggtcaggataatgtccgttcttctgaatatctttgccattgtaactgccttttttggcatattccttggctttcaggaggcaatgaaaggaatagttatgaacatcctttcacgttttgtagatgagaaatcgataaatgaaacgggtgtcagtatcggtgtgtcaatatttatcgttcttttgttgtgggtatgggtgctgacacactttccgatcctgctactacagcagataggggcaccggtttatgggattgtctcctgcatcattccctgctacctggtgtttaaggttacccaactcagaaaatactattcctggcgtgtgctgtttatctcagcaacgggtgttctgctgtgcctctcgcccttttttaaattgttcgagtaa

SEQ ID NO: 239889 - DNA, 939 bp, Klebsiella pneumoniae
atgctaagttcaggtacattgagtcagttgagtgtttttgtcagaatagtcgaaacaggaagctttacaaaagcagcccatgagctgggactatcccgctcagctgtcagcaagagcctgtcaaaactggaagaacaactgggtaaagtccttataaaaagaacaacaagaaatattttccttactgaacagggtgaagctgtttttaaccgtgccatttcgctgctggaagaatgtgaagatatgttttctcaggtacgaagtttcaccgaaccggaggggcatctgcgcctgtcatcttctgtagcttatggggccaacatactgccagagttaattacctcttatcaaaaaaaatatccgcttgtaaaatttcatgttaatttaaatgacaatattataaatttatcggaaactaactttgacatggtcctgaggataacgaaaaagcttacagagtctgaaagcaattactatctcgggaaaattaactggatatattgttgctccccacagtacctaacaggaaagccagaaattaaaatgcccactgacctgatccatcatcgttgcctcaccaatccggtaatggcatatcatgataactggattttttcaggagaaaacggcgacatcatggtgccagttgaatcagctgttacatctaactcaagcctgacattgttaaatatattattatcccataatggcatatcctgcctgccggactatctggcctcaatatatatcaaaaaagggagcctggttaatatacttcctgaatatcacgcagggctctctcatcatttatatggcattgaaaaaaaatcaagatatatcaacccattagtaagatcatttatcgaacatttacggcatgaactaaccggacctgataccttacccggggctttgttgaataaatcgaacttttgctga

SEQ ID NO: 239890 - DNA, 642 bp, Klebsiella pneumoniae; identical to SEQ ID NO: 107999

SEQ ID NO: 239891 - DNA, 219 bp, Klebsiella pneumoniae; identical to SEQ ID NO: 195684

SEQ ID NO: 239892 - DNA, 897 bp, Klebsiella pneumoniae
atggacagatttatcagcatgcagatttttatcgcggtagtggaagaaggaagttttgcggcggctgcaagacgctttaagctttcagcggcaatggcaggaaggcatgtcagttctattgaatccaatttaaatgcacgacttattcagcgttcaacacgccgtctgagcctgacggatgtggggcagcgatattatgaacgttgcaaagttattcttgaggctgtggaagatgcgaacagagaagcgagtgatgttcaggcaacaccgcgcgggttacttcgcattgcggcgccggttgctttcggtgcaatgcatcttggtgcgatcgtgtcacgctatctggaactatttccggaggtcagtctggatgttgtgcttgaagacaaatacgcagacctgcttgaaaatcgaattgatgttgccatcagggttgggcgtcttgacgatccgtcgctggttacccggcggctggcgccctgcaagatggttttgtgtgcatcaccagagtatctgaaaaaacacggcacgccagagacgccggaagatatttcccgcgcgccgcgtctggcgttcagccaggcggtttcagcgggagactggacaatttacgaccctgaaggcagcttgcaccgtatcgaaagtgcatgccgaatcacgtccaataatattcagttgcttctggaatccgccctggccggaacaggcataatatatggtcccagttttgttttttgtgagcatataaaaaaggacagactgattgagctgctgccagcgtacaagaaaacggaacttaccattcaggcagtgtatcccagtgcgatccgcattcctttcaaggttcgcagctttgtagattttattgctgaagctttaagagatacacagctgtaa

SEQ ID NO: 239893 - DNA, 1164 bp, Klebsiella pneumoniae; identical to SEQ ID NO: 195633

SEQ ID NO: 239894 - DNA, 1005 bp, Klebsiella pneumoniae
atgatgaacaaaccggttaccgttgcctgcgttcaggccgcccccgtttttatggatcttgaaggcaccatcgacaaaacagtcaccctcatctctgaagccgcccggaaaggtgcggaactcatcgcttttccggagacctggatacccggttatccgtggttcttatggcttaactcgcccgcaacaaatatgcccctggtttatcagtatcatcagaactctctggtgctggacagtgcccaggcgaagcgaattgcggatgcagcgcagcaaaataatatcgttgtcgttctgggcttcagcgagcgcgatcacgggagtctctacatctcacagtggctgattggcagcaacggggaaaccattggcatccggcgcaagcttaaggccacacacgtggagcgtacgctgttcggtgaaagcgacggttcctctctgactacctgggagacacctctggggaacgttggagcactctgctgctgggagcatctgcagccgctgtcccgttatgcgatgtattcccagcatgaagagatacatattgccgcctggcccagcttcagtctttacaccagcgcaacggccgcgctgggtcccgaggtcaacacggcggcttcacgcctgtatgccgcagagggtcagtgcttcgtgatagccccgtgcgccgtggtttctgatgagatgattgatttcctttgtcctgacgacgaccggagagcgttactcagtgccggggggggacatgcccgaatttacggcccggacggaagagaactcgtcacacctctcggggaaaatgaggaaggactgcttatcgctgagcttgactcttctgcgattacctttgccaaactggcggctgacccggtaggccactattcacgccctgacgtgacacgcctccttttcaatccttcagtcaacaagactgtgattaaacgtcattcgcctcctgagctaattgccgaacaggctgctgctgaagaagaggaggagtag

SEQ ID NO: 239895 - DNA, 945 bp, Klebsiella pneumoniae
atgaatacctataacactgctgatgttttgtatgctgagcggagtgaatactggcggcatgccatcagccacacgtttgttccgctggaaagtactttttcaggaaacgacaggcacggcgttatcagatccgggaactggggagacctgcggctttcagaggtcagcactagtgcccaggacgtcataagacgccgaaaaggggctgataatcatcctgataatgccatgttgctgagtttcatcagtcagggtaaaacgtccgtgattcaggcgggtagccatgccgctcttggtcagggtgaattcgggctttatgacacccgctttccttacgaactgcaccttcatggtgaatcgcgtcagcatgtggtgcagatacccatagagcatctgagacagagactgggaaagacagaacaccttgttgcgtattcctttggcaaaaaacatgccctgacgccttttctttacgtacttctgaataacctgatggcgcagccagaagatattgcgtcccgccacaccagcgtcctttacagacagctccttgaactccttacagtaatcatctcagatgaatgcagagtaaaaagttcgtcccgttcatccgcaggactgcttcttcagattaaaataatgatagatcagcagctttcggatactacgctgtcagtatcaagcattgctgaatcattccgtatttcaccgcgttatctgagcatgctcatgaaaagtgatgggactacctttggccggtatgtcctgactcagaggctgaataaagcttcgctggctttgcagtccccgctctattcagatatacccatcagtcagattgcatggaattcggggttcaatgatatggcttatttttctcgtgcattcagggaaaaattcagctgctcaccaacggaataccgtcatcaggctggcgaggcttag

SEQ ID NO: 239896 - DNA, 348 bp, Klebsiella pneumoniae
gtgcagattggttctaagcagcagcttgtcgcagcctcctgtgaacccggtgtgtccatatcaaagctggcgcttgaaaatggcatcaacgccaatctgttatttaaatggcgtcagcagtggcgagaggggaaactcccgctgccttcggcagaccttcctcagctgctccctgtaacactcgatgccaccagtgccctgctggctgtgccgccagaaacgcctgcagataagtcggaaaccctcagtatcagctgtgaggtgacgttccggcacggaacgctccgtctggatggcgctgtcagcgaaggcctgctgacaatattgatacaggagcttaaacagtga

SEQ ID NO: 239897 - DNA, 213 bp, Klebsiella pneumoniae
atgagcgattttgttcagcgcagcgcggcaaacttcaccgtccaggggatctcgccggatgccgcgcagacggcggcgctgaaaaatctttccgctctggcgctacgggaggcgcgaacccaggcattttccgatgctttctacctcatcatgatgggttttttacttgccgcgctgctggttcccttgatgaaaaagccaccggcacactga

SEQ ID NO: 239898 - DNA, 888 bp, Klebsiella pneumoniae
atggtttatgacacgattatcgtcggtggcagctacgccggtatttccgcaggtctgcagctcgcacgggcgcgccggcagattttgatcattgatgcagggcaacgccgcaatcgctttgctgacagctcgcacggctttctggggcaggacggagtgaatcccggcgcgatagccagcaaggcgcgcgagcagctgatggcctatcccacggtcgaatgggtgacggacaccgccatccatgcaaaagcggagcaagagggctatgccatctctgtcggatccgggctgtcgtttgcggctcggcgcctgattctggcaacgggggtgaaggatgagctgccggccatccctggactgaccgcgctgtggggaaagaagatttttcactgtccctattgccacgggtatgaactgaacggcggaatgatcggcgtgctggcgtcatcaccgctggctatccatcaggcgctgatgctgccggactgggggccaaccacactgctcctcaatgaggcctacacaccggatgccgcgcaactcgcccagctggcccaacgtggcgtaacggtagaagccgagccggttttgtccatcggggaagatcaggctgatataaccctcgctagcgggcgaatcatcaggcttgccgggctgtttattcagcccaggacacgcctgagttctcctttagccgttcagctcggatgtgagctggaagcaggggcaaccggagagtttattaaggtggatactatgcgcgaaacgaacgttcccggtgtatttgcctgcggggatgcggcggttgccgcaggtaacgtggccattgccgtcggcgacggcgcgcgcacaggcaccgccgctcatcagtctctgatatttcgctga

SEQ ID NO: 239899 - DNA, 429 bp, Klebsiella pneumoniae
atgagaaatgacacccgtctctcccgcatgttgcacgtattgatccacatgtcccggcatgaccggcccgccacgtcggataacatcgcggagatgcttaataccaacccagtggtggtgaggcgcaccatggcgctgctgaaagaaaagggctatgtgcgttcggaaaaaggccatcgggggggctggacgctagcgaagccgctggcggatatcaccttactggacattcataaggcgctgggctcctcttcactgttcgcgatcggcttgtcgaccgatcatccggagtgcctggttgagcagacggtgaacgccgcgttaaccgaagcgttcgacgcggcgcagtcgttgctgttgaaacgactcgaaaacgtcaccctggcagagttagccagcgattttgaattccgctatatgacgcgttaa

SEQ ID NO: 239900 - DNA, 399 bp, Klebsiella pneumoniae
atggacaatttgcacaagttgtcccgcagactgattaacgaaaaccaagttgtctgcgtcgaatccctgaaagtgaaaaacatgctccgcaacccgcaactgtctgaagcgatagctgacgcaggctggagcgaacttgttcgccagcttcagtacaaaggcgaatgggcgggaagtagcgtggtcgctattgaccagtgcttcccgtcgtccaaacgctgcagctgttgcggcttcaccatgaaaaacatgccccttgatgttcgtaaatggcactgccctgaatgcggcgcagaccatgatcgcgacattaacgcggcccgtaatattaaagctgccgggctggcagtgttagccgacagagagccggtaaaccctgaatcgcagcacgcggcttag

SEQ ID NO: 239901 - DNA, 324 bp, Klebsiella pneumoniae
atgaactatctggagtttgttgaaaccagcgctttcagtggactgcgtaaggaactcatggatgatgatgaattccgcgaactgcagacctatttactggaagcccatgatcggggtgacaccatcagtcataccggtggatgcaggaagattcgctggggtcgcccggggatgggtaagcgaggtggcgtcagggtgatttactacgttcgtcttgccagcggcagactgtatctgctgctgatatacccgaagaatgcgaaagatgagctcagcgagaaagaaaaagccgttatgaaggcattaacacagcagctgaagtaa

SEQ ID NO: 239902 - DNA, 303 bp, Klebsiella pneumoniae
atggaaaagaaactttttgatgccctgatcagcagcatggaggaaatggtggccattgaaaatggccagatccagcccgctgcagaacaggttcaccgccatacactgccggatgtgaaagccattcgtaaacatgccggcatgaaacaggctgaatttgcagaagtggtgggggccagcgttgaccttgttcgcagctgggaacagcaacggcgtgttccgtcgggtattgcgctgaaaatgctctgcctcatcgagcgtgagcctgcactgattaatacgttgcgtggtattcacgtctga

SEQ ID NO: 239903 - DNA, 207 bp, Klebsiella pneumoniae
gtgacgaaatccgtcacaaaaaaacccattgcggtgaatctgcaactgacgcacagtgaatcctgggcgctcgcccagctggtcaagcggctgggattcagtgactgccgccgcctggcaacgtcagatacggaggcatacctgatgatggatggtatcgaccagctcatgaaagcactggcggaagaaggctattcaccccggtaa

SEQ ID NO: 239904 - DNA, 384 bp, Klebsiella pneumoniae
atgctggagcagctatacattttctataccaataacgacatattcgtgaagagttacgatgttgcccggggacgcctgcagtacgaatttgaggagaacgactgtcatccgcagctgatcacaaaacgctgcggcaggaaaaatatctggcacccagaaatgttgggtaagcgcgatccggaacgcaacggcgggtatttctggccggacgatcgggagattatcaatagtgtcatggcgcacctgcaggagaagcagcgtatgatgaacaaggaagaccttgagatgctgacgcggtattctttcgggatggacgaacaacggtcccgttacaagctcgccgatcacaccggtacgacagaacagaagactgacattgagtga

SEQ ID NO: 239905 - DNA, 573 bp, Klebsiella pneumoniae
atggcaatggtcaatgaagatatcgtcgtgcggctggcgcaagactctgacattccagaggtgaaacaactgctggagcgctatcacgcaaaaaatctttcgggagagcaacgggcgaatggatttgtcaccaccgatatgacggagcagcagttaaatgaactgcgttcagccgaaagtggtgtggtgattgcggttgatagtacatgcgacaaggtcattggcctgttgcttggtggatcgtgggaatttctcagcccctggcccatgtttaaatacatggcaggtattctcaacgaatatcactaccaggggaaaaaactggatgcggctagctcatatcagtatggccccatctgcgtcgcagaagagtatcgtggccggggcgtgggcgagatactgcttgagtatcagcgcaaggtgttcgcagcgcgttatcccgtcatcgttaccttcgtcaatgtactgaacccgcgctcgtatgcgtttcatacccgcaaccagttcgaagacgtcggtttctttaacttcaatggcaataagtaccacatgatggcattaccgacctcctga

SEQ ID NO: 239906 - DNA, 729 bp, Klebsiella pneumoniae
atgagtaatcgcttgtggttagttgtttttatactggctttgctggccttttgcggtgtttttattgtatattttctatggtttaaagcttggcttaattttcacttatctaaaaatcctgaagtatgggggcaattcggtgattttgttggtggtgtattaaatccgatactcagttttatcactgttgttatattgataatcaccaccatttaccagcaaaaacagtatgagaactcggaaaaaagagaactaaataaaaggtttgatgatagattttatgggatgatctcttaccagagagatttggtggcaaattttaaactcgctttacctgggaactctgatgcaggtgtgaaagatgccattacttatgccgaagatgttttttttaatactaatgaccattcttatattaattctcaagggtttaaggaagccatctttccggttgtaagaacattttacatcttgatcaaaatgattgatgaatcatccgaggatgaagtgagtgaaaatattgcatcaaagtattacgagtggttggttaacttgtctgattatcattttttgaggctcgttttcttttgctctttttattatgatggtatatcttcattcgattatataaagtcgaataaaaacattgttagtagtttggcaaaaatggggtgggacaaatacacatctgaaataattaaaagaaagcatcagctaagtattgcttga

SEQ ID NO: 239907 - DNA, 831 bp, Klebsiella pneumoniae
atggcggtcactgatgtggatttcgagctaaagatagagtctggagctaacttggttgatatggagtatggcttggaaaccatgacggggttctcaggtgccattgctattaccgctgattgtattttgtctaatgaagtaccatcaaaaatgagctactctgataatgttagggcaaagctaatgggggcttgtcttgggtcatataagcaagattttaagctggttatttcagatcctgttaaaagtgctaacctagaaagaataggtaactctgttttatctgagttaataacgtactttatttgtgaaaccatgtatgttgaacccccagctttaaccaagaaggctgaaaaaatattatctaaaatggagaaaatagaaagtaaagtaatagataggatttatgagcgagtgaaagatatgcataaaatttcccgttctaataaatatcctgttgttttgaaaagaaaaacgcaattaaggaattttaagcttttcgagataaatgaaaatactgcaagtaacctttttaatctaactacggataataactccgttgaaatagatgcgatcgttacaagatttaattccttcacagggaatgggcgacttcttgctgatggtgattcagttactataccatttagtttttctggtccttatagtaaagtgaaggcgtcaacaaagaggcttatgtccgagaaccttcatgacaacaacgctgttgctgatgagttaataacgagattaaaaataacagcaaatgctaagcgtaatatatcaggggatatagttaagtatatgatattgagtgcggataagccatga

SEQ ID NO: 239908 - DNA, 405 bp, Klebsiella pneumoniae; identical to SEQ ID NO: 92381

SEQ ID NO: 239909 - DNA, 747 bp, Klebsiella pneumoniae
atgagaataagtaaaaaaagtaatatgccaaaatggtttaatttagagaattataataaatttattacattggatgatgagatgttcattacccaaataatcgttagaagtaatgatgagttgacgggggtatttgaacgagatggttactttgaagataaattatccgctggattgtatccgttgacttatccacagtgtaatttaaaaaagatagcggatggcccaagaatagcagcgagcagaatttttcaaccaatatcattgctttcactaggttttattaacgaaaaccttaatgcggctataggtgaagggaaggaaagtccctacagccatatagatgcgatatccaaaattccttgttttgatggtgatattcactgttctattagattggatgtccaagacgatcttatcataaatgacctgaaacggttgctacctcaatggagaaaacaattaggaataaatcttgatgaagatagaattaaaaactcttgggcggtggtgagaagtaaaataataagctatcaggcaattgctttatatgatctactactatggcaaaaggctaccgggaaccagataacaaatggagtattggcggtttctctttatcctgaaggtgattttgattccacaaacattgtacaaactataaagccatttgtagaaaatttgtttagtgactcatctatagaaaaatttgacgcagaaatatctaacaaaaaaagcgagagataa

SEQ ID NO: 239910 - DNA, 210 bp, Klebsiella pneumoniae
atgaatcaatttgaacaatccataattccagctgagcgcatgatccgcgaggtagagtgccgcaagttaaccggcatttgtcgaacaacccgttacatgatggaaaaagaagggaaatttcctgcacgacgcaagttaggtggtcgtgcagttggctggcttttgtctgaagtttcagagtggcagaagagccgcagcaaagctgcgtaa

SEQ ID NO: 239911 - DNA, 174 bp, Klebsiella pneumoniae
atgtcaatgcaagagttgaaaaaatctccgcagtaccaaatgcgtttaagcgaagagttccgcgcacaacttgaagaagaaatgcgcaaagatggtgactcatcccttgctacatggatcaagcggatattgcgtaaagagctgcaacagcgcggtatcgagccaaaaagttga

SEQ ID NO: 239912 - DNA, 183 bp, Klebsiella pneumoniae
atgcgtaaaacatttcaggtttacgggttcgccgttaataaacgcggccacacgttaggcattcactacaccctagataacacaactcctgaagaggctaaattagctgcgcagttactggcccaaaaagacggctataagcatatccgtatcaactttgttcgggaggtgttcaatgtctga

SEQ ID NO: 239913 - DNA, 192 bp, Klebsiella pneumoniae
atgtctgatatgaatcctctgaacatggccgataacctccactctctggaggttctgttgtgcgctgcgatggaaatggactggagaaaagccgatgaaagcgaaattgctggagagttgattgagatagcgattcagcgttgccgaagactgctccaaaaaccggatggcgtgggggtgaaaaatgcatga

SEQ ID NO: 239914 - DNA, 261 bp, Klebsiella pneumoniae; identical to SEQ ID NO: 198687

SEQ ID NO: 239915 - DNA, 258 bp, Klebsiella pneumoniae
atgcgcgtaaactttgatgttttgatgatccttgatgcccttgaccgccacggatccttcgccaccgccgcggagtcgctgtataaaacccccgccgctctgagctatatgatccagaagctggagagcgatctgaacatcgtgctgttggatcgttccggccatcgggcaaaattaaccgataccgggcggctgatgctggagaaggggcgacagcttttaagtgccgccagagatctggaaaagcaggcccagtag

SEQ ID NO: 239916 - DNA, 165 bp, Klebsiella pneumoniae; identical to SEQ ID NO: 136347

SEQ ID NO: 239917 - DNA, 747 bp, Klebsiella pneumoniae
atgaaggctaactggatcgcgggcggactgctgctggtcctctatctgttgtggctcaccgccaccgctccggcgcgcctgctggctcccatgctgccgcccggcgtacaggtggggcaatttagcggcagcgtctggcgcggcgcggcgcaaccggtctactggcatggggaacggcttgaacgactggcgtggtcgctgaccctggcgggctggcaggtctctctcagcgatccccgcggcgtgatgggtcaggcccggctgtggggccttcgcgatctgcgcctacaggaggggcggctcaccgcccccgccagcctgctcagccgctggttgatgtcgactatgcccgtcaaggccgcgggggaggtcaccttcagcctgaccgaagggcggttcagtgacggacgctgccggcatatcatcgccggaggcgcgcagtggcggcaggcccgactgcactccccggtcggcagcctggagctggcccaggttaatggcaccttccgctgtacggtggacggcgccgtggcgctgactctccgtcaggactctcatcagctgagcctcagcggccaggggactctgtcgcccgatggccgctatctgtttcgcggcacgctacagccccggcagggaatgccaccgctgctggcgctgctggtcacgcgcccgacagcgaataacgccccgggcccgacgccgtggcagctgcagggaaaatggttaccacaggagcaaaaatga

SEQ ID NO: 239918 - DNA, 354 bp, Klebsiella pneumoniae
atgataatctccggctcgatcggcgcgttcgtgctgctctctggtttgccggtgactgatgtggtgttctggcgctgcctgattggcgcgctaaccctgctggtgtttatcgtgttaagccgccagcccttcagccggctaacgcgtttcactctcgctctggcggtgattggcggcgcggcgctggtcgtcaactggctgctgctgtttgccgcctattcacggatctcaatcggtatggccaccgtggtctataacacccagccgtttatgctggtactgatggggatggtgctgggggaacgggtcagcgccgtgaaatggggatggttactgctggcctttgcggcctag

SEQ ID NO: 239919 - DNA, 390 bp, Klebsiella pneumoniae
atgaaggtcttccgctactctgacgtcgggctggtgacgccgctacgcgatggtatgaatctggtggcgaaggagtacgtcgcggcgcaggatccggataaccctggcgtactggtcctgtcgcagtttgccggggcggcgcaggagctgaccagcgccctgatcgtcaatccttacgatcgcgacgaggttgccgccgcgctggatcgcgcgctcagcatgccgctggcggaacgtatcgcccgtcattcagcgatgctggacgtgatcagagaaaatgatattcataactggcaggcgcgctttgtcgaggatctgcagcatatttcaccgcgcagcgaggagagccgtctgcgggggaagatagccaccttccctaaactggcctag

SEQ ID NO: 239920 - DNA, 1008 bp, Klebsiella pneumoniae
atgagtcgtttagtcgtagtctctaaccgtatcgccttaccggacgataaaaaatcgagcgctggcggtctggccgtcggcatcctgggggcactgagagcggcggggggtctgtggtttggctggagcggcgagattggcgatgaccagcagccgctcaagcaggtctcccgcgggaatatttcctgggcgtcgttcaaccttaatgaacgggaccatgatgaatactacaaccagttctctaacgccgtgctgtggccggctttccactatcgccttgatctggtcagctttcagcgcgaagcctgggagggatatctgcgggttaacgccatgctggcggacaagcttctgccgctgattgagccagacgatacgctgtggatccatgattaccatcttctgcccttcgccagcgagctgcgcaagcgcggggtgaacaatcgcatcgggtttttcttacatattccgttcccgacgccggagatttttaacgctctgccgccgcacgctgagctgctggagcaactgtgcgattacgatctgctgggcttccagaccgaaagcgacagaaccgcttttctcgacagcattgctatgcagactcgcctatccgacctcggcgataaacgctatcaggcatggggtaaggcgttcagtaccgaggtttatccgatagggatcgatccggacgaaattacgcgcaacgctaaaggtccgctgccgccgaagctggcccagctgaagaacgagctgaaaaatgtgaagaatatcttctccgtggagcgtcttgactattcgaaagggttgccggagcgattcctcgcctacgagacgctgctcgagaagtaccctcagcaccacggcaaaagcgttatacccagatcgcgccgacctcccgcggcgatgtgcaggcctatcaggatatccgccaccagctggaaaccgcagccggacgcatcaacggacagtttggtcagcttggctggacaccgctctactatctga

SEQ ID NO: 239921 - DNA, 3117 bp, Klebsiella pneumoniae
atgccgcactttttcattgagcgccccatcttcgcatgggttattgccctgtttattgttctgacgggactgttgtccatacctcgtttaccggttgcgcaataccctgaagttgcgccacccggtattatcatttcagtgagttaccctggagctagcccggaagtgatgaacacatccgtcgtgtctctgatcgagcgtgaaatttcgagtgttgacaatttactctattttgaatcttccagtgacacgacagggatggcgtcaattacggtaactttcaaacccggcaccgacatcaaactcgcccagatggatctgcaaaaccaaattaaaattgtggaatctcgcctgccgcagtcggtaagacagaatgggataaatgttgaggcagctaattccggttttttaatgatggtggggttaaaatcgccaagcggagcctatcaggaagctgacttaagcgattattttgcaaggaatgttactgatgaactccgtcgcgtacctggtgtaggtaaagtccagctttttggcggagaaaaggcactccgcatatggctggacccgatgaaattacacagctatgggctctctgttacggatgtattaagcgccatcagtcaacaaaacgtgattgtttcaccgggcagaaccggagatgaacccgcgacgagcagtcaagaggtgacctatccaataacggtaaaagggcagctctcttcggttgaagaatttcgcaatatcacgattaaatcacaggtctcagccgcccgggtgacactggcagacgttgcccgcgtggaatccgggttgcaaagttacgcatttggcatccgtgaaaatggcgtgcctgcaacggctgccgccattcagttgtctcctggcgcaaatgcgattagtactgcgtcgggtatccgcgcgcggttaacagaactgtccggtgtgcttcccgagggaatgacattcaccgtgcctttcgatacggctccatttgtaaagctatcgatattgaaggtagttgagacatttgttgaagccatggttctggtctttttcgtgatgctgcttttccttcacaagatacgctgtacgcttattcctgcgattgtggcacccgtggcgctgctcggcacatttaccgtaatgctattaagcggttattccatcaatattttaaccatgtttggaatgatactggccatcgggattattgttgatgatgctattgttgtggtggagaacgtcgaacgactgatggaagacaaaaaaatgtctccacaggatgcaacgcgagaagcgatgcgtgaaattacgccggcaatcattggtattacgctggtgctcactgcggtgtttataccaatggcctttgccagcggttctgtgggtattatttatcgacagttcagcatttcgatggcgatatccattttactgtcggcattcctggcgctgacgttaacgcctgcgctttgtgcaaccctgctcaaaccacatggtattcatcagggtaaaagcagcgtattttcagcgtggtttaacgctcactttcatcgcctgacttcgttttacgccactggtctgggatttgtactgaagcgtactggccgtatgatgatgatctacgctgcattatgtttggcattgtttgccgggctgtccaccttaccatcatcatttttacccgatgaagatcagggttattttatgtcctcaatccagcttccttctgatgccacgatgcagcggacgcttaaggtcgtcgatacatttgaagaggagatcgcccatcggcaggcggtagaaagtaacattatgattctgggatttggtttttcagggtcaggccaaaattcggccatggcattcaccaccctcaaggactggagacaacgcaaaggaaccacggcacaggaagaagctgaccatattcggtcccaaatggcaaacgtgccggacgccgtaacaatgagtctgctgcctccggctatttctgatatgggaacctcatccgggttcacttattatttacaggacagaggggggaaaggctatcaggcactcaaaaaggcggccgatgagcttattgtacaggcaaatcataatcctcaccttgccgatgtctatattgatggacttggtgagggaacaagcctttccctgcatgtcgacagggaaaaagcggaagccatgggggtttcgtttgatgaaataaatcaaaccatttccgttgcagcaggttccaattatgttaatgactataccaataatggtcgggttcagcaggttatcgtccaggcggatgcgccataccggatgcagcctgaacaacttttggctttgtctgttaaaaaccgtctggggcagatgcttccattatccacttttgtgacgctttcgtggaatgttgcaccgcagcaactgatacgctatcagggatatcctgccatacgcataaccgggagttccgcacagggaaaatcgtcaggtaccgcaatggcggcaatggacaatctggctaagcacttaccaccggggttcgccggtgagtgggcgggaagttcgttacaggaaaaagagtctgcatcacagcttccgggtcttattgtgctctcggtactggtggtattcatggtgctggctgctctttacgaaagctggtccattcccttcgcggtcatgctcgttgttcctctggggctgctcggcgctgtgctggccgtatccgttacaaatatgacgaatgacgtctttttcaaagtgggtctgataaccctgattggactttccgccaagaatgcgattctgattatcgagttcgcgagacaattgatgaaagaaggaaagagccttattgacgcgacattgacggctgcaaagctacgcttacggccaattctgatgacttctctggctttcacattaggtgttgttccgctgatgcttgccagtggagccagcgacagcacgcagcatgcgattggtaccggtgtattcggcgggatgattagcggaacgctactggccattttctttgttccggtatttttcgtgacgatcacacgatttacaggcatgcgaaaatatagactggggaatagccggaacggctaa

SEQ ID NO: 239922 - DNA, 609 bp, Klebsiella pneumoniae
atgatgaaactgcttcacattaaagtcagcccggatttatcaggatcgacatcccgtgtggcgtctgagtgcctggtagaaaaattacgcgcgcatcatgccgggcttcaagaatcagtgctggacctggctaaaaggccgctaccacatcttgatgcatttaccattgctggtttttttaccccaccagacctacgcagtgaagctcagctcaccgctattcagacttcggaacaactggtagatcagcttttagattgtgacacgctggttatctcatcaccgatgtggaacctcggcctgccttctgtgttaaaggcctggttcgatcatataacccgcgccggacgaactttcgcctttacgccagagggcaaaaaaatagggctcgtcagcggcaaaaaggtgtattgcgttgtcgccagcggcagcgtatttgcacacggtccatttgtagcggatgaccagtttacgccatacattcgcgtagcgcttgaatatattggcattaccgacgtgcaatttattcgggtagacggtacgcatgatcccgtcgctcgtactacagcgttacctcatgcactgcaaaccattgatcgtttattttaa

SEQ ID NO: 239923 - DNA, 540 bp, Klebsiella pneumoniae
atgacagcagaccagattatcgaggggatcctcggcaaggagggtggttatgtcgatcatccgtcggataaaggcgggccgacccgctggggcatcacgcagaccaccgcccgtgcacatggctacaccggtgatatgcggaacctgcccagggaaacagcaaagcaaatcctgctgagcgattactggaccggcccccggtttgaccaggtggcagctctatctacgttactggcagatgagctttgcgacactggcgtgaacatggggccaactgtagccagtaagtttttccagcgctggctgaccgcaatgaatatgcgcggaaagctgtatcccgatctgattccggatggcgccattggtccccgaaccatcaccgcgcttaagggatacctttccgcccgcgggaaagagggtgaacaggttctgttgcgtgcgctgaactgcagccagggtgccagatacctcgaactggcggagggccgcgaagccaacgaggattttctctacggctgggttaaggagcgtgtcctgtga

SEQ ID NO: 239924 - DNA, 984 bp, Klebsiella pneumoniae
atggataataataaagaaaatataaaaaaaagcaaagaggttgatgagactagtgccgattcaaattctcagggaagcatccagctgactaaaaatcaaacggcgtcatcttcaacgcaattacctgtcggtgtaacgggaagattgagtacttcatcgctaaactttataactccataccaggctagcagtgctattgctgattcacggtatgctgatttaataacagccaatgcgaatcaggttggggctttagcatttaaaattcaacggcacgcagttaaggggggtaaagatgtagagtgtgaatccctcgatgcgagtaaatattcatcgcaagttaattatggaggaggggataattctgtaggaactgctagcaactcaaactcgttcaactaccatgcttttgataatagcatgtcaacattaaatgaaaaatcagtgccaacaactcttggtgacatcaagagttttttatggaaagatatcaatcagaagttgtctaaattttcaaaagatttagaaaaaagtaaaaaaagtataaatgagagtatgagagaaataagtaaaataagggtctctgtctctcaacaaacacgaaaaatagaagcgtttgatgccaccctatctgagtcagaaaatagagtaaagaacaaggtcaaagaattcgaatctgagataataacagcaaggaactctcttttaggtgtgatagctttatttgcatccttttttacatttatctcaatctcagtgaatattttttctcgagatatgtctttgagtacttctatatcagtattgctcgttatttggtcgtgcctggtaagttttatttttattttcatggccgggattagtaaggggggtaatttcttcacgagttcagcatttataaagcatgcgatatttatggttgttctctttatttcttcatttataattccgaaagtgattttttcaattatttcagtcacatga

SEQ ID NO: 239925 - DNA, 666 bp, Klebsiella pneumoniae
atgaatattgcacgatttcaaatggcttttttctacgattcttcaacttcagttgattttgatgggttatcttattttgttcgaaatgcgttaaaaaaaattacgggtaaggaaatttccaataatccgatgttaggggtattgcctgcagatgcaccagttgaaatccctcgcctccaattaaactcgactgataataagttgagagttcaatcctcgcttcagcgatttgatttctttatagaacgtggcgaaacagaaaaagatgttagtgcgcaagtgtttagtcaagttttcgatgaggttattgaaatacataaaaaactcaacaaggaaatagtaagggttggattgattgctcttaaaacagaggaggatgacgcaccaactgaaagtattgtgatgaaatatctaaatgctaaagctcttggggacggtaatttgatagacgatgttaatttggcatttaatagaaaatttgaatatgagggtcagagttttaattgccacttgtctattatgacaggaactgatttgataaggcagcgcaatttattagtgaagcaaatagatataaactcattcgaaggagtgttgttctatgaaaaacacacccccgaagtaattaagaatgcattttttaatactattgaaagtattaactga

SEQ ID NO: 239926 - DNA, 294 bp, Klebsiella pneumoniae
atgagtatgcataacaaaaaaagtgattcttactttagtcgaaaccaaaaatggttgagtccgcttgttattctcgctttttgcctgttaagctcacaggtctggaaaattataggcgaaatcaatgtactccctgtttacattataaaaattctcgcaaccattgcgcttttcatctgcgcatttcttgcaaggatgacaccaactgtgtctgccagattcattgttactacgttctattttggtgtatttggtgtgtttgtcttgctaattttaaactatgttagagggtag

SEQ ID NO: 239927 - DNA, 744 bp, Klebsiella pneumoniae
atgagccctgtcaaaaatggcgacatcatgaaacgcctcagaaaaatgatgcccaagaccgttgatcctgcattcaattcacctgaggagttgttgcaatggcagcgggaacagggacagcttcgctcggaggcccttgagcgcgagaatagagctatgaaaatgcaaaggacttttaaccggtcagggatacgtccgctgcatcagaattgttcatttgataactacttagttgaatgtgaggggcaaatgaaagcactcatgctcgcccgccaatatgtagaagaatttgaggggaacatcgccagttttattttctctggaaaaccaggcactggcaaaaaccatttggcagcagcaatctgtaatgacctcttgttgcggggaaagtcagttttaatcataacggttgcagacatcatgtcgtccatgaaagataccttcggcaacaggaataccagtgaagaacaactactgaacgatctcagtaaagttgaccttctggtcattgatgaaattggagtgcaaactgaatcacgctatgaaaaagttatcatcaaccagattgttgatcgcaggtcatcatcaaaacgccctacggggatgctcactaacagtaatatggaagaaatgaacaaacttgtaggtgagcgcgtcatggaccgcatgcgtctcggaaacagcctatgggtagtgtttaactgggaaagctaccgacatcgtgtttctggaaaagaatactga

SEQ ID NO: 239928 - DNA, 291 bp, Klebsiella pneumoniae
atgatgtacgaactgtttggttttgaacttgccgactttagagagctcttctatgtcttttgcctgggcgtgcttgtctaccgctactgcactgtcggacacaaatacccgctcttcggtagacgtaagaaagaagtcagtacggcagaaacagttgaatccgataaagcacctgaaaaagacaatgcaacacctgtctttcttgatgtgaatctaactgattattacgactaccgtacaaaagagcactggagtcctatcaacagagagctggataaattccaacaataa

SEQ ID NO: 239929 - DNA, 249 bp, Klebsiella pneumoniae; identical to SEQ ID NO: 31917

SEQ ID NO: 239930 - DNA, 621 bp, Klebsiella pneumoniae
atggcaaatacgctccgaagcacggtagagacggccgacgatccggtcgtgggtttcgaccactgcgtcggccaacatcgcctgccattccgagacgcaaacagccaagatcgcaagccgcctgtcctccgggagatcgcgcatgccgtcggcataataccgttcaccctgcctgcgcagacgagtcacccgatgggcaggaacgccggcaagcagatcctcggggagatcgatgcgttgcagatattcgagccggtcgagcagccggttggccgacgaagagttcgagccaggctcgaactggcgcagccacacaaaacgggtcacccgatcatcagccgtctcctcgagcaatgccagcaactgttctcggatcgacataggcagccgactggcgatcctcgtctcgatgcgtcgctcggcatcgacgagagccgcggcacaaagccgctcgatcgtggatgtcgcgggaaggacagtgcgggtgcgtcggcactcggctacgaagcgacgggcgatatcctcgttcgacaccgccatctcggcttctcggaacaaccattccttcagctcgctcgcaccacgtccggagaaggtgcggaagccgtagagcccccgtaa

SEQ ID NO: 239931 - DNA, 570 bp, Klebsiella pneumoniae
atgagcaatccagcaagcaacactgcatccattctgcagaaaaacaagaaggtactgatcgcgagcctgaccggcagcgccatcaaatggttcgattattttctctatggcaccgccgccgcgctggtgtttaacaaaatcttctttccgatggtcgacccggtcattggtctgatcctctcctggctctccttttcgctcaccttttttatccgccccatcggcggagtcattttcgcccatatcggcgatcgcatcggtcgcaagaagacgctggtgctcaccctgtcgctgatgggcagcgccacggtggccattggcctgctgcccacctacgagatggtgggcctgtgggcgccggccctgctgattaccctgcgcattattcagggcatgggtatcggcggcgaatggggcggcgcgctgctgctggcctacgaatacgccccggaaaagcggaaaggctttttcggcagtattccccaggccggcgtgaccatcggcatgctgatggcaaccttcatcgtctcgctgatgaccctgttcgatgaggcgcagtttctcgcctga

SEQ ID NO: 239932 - DNA, 1782 bp, Klebsiella pneumoniae
atggctgaactattaccacaaacgacttctgtacaaaccatttattcttggtttactgaaggtaagatttttgttaatagacgttatcaaagaaaattagtttggactgtattagaaaaacaaaagctaattgagtccatacaaaagaaatacccaatcccagcagttcttcttgccgaaagggaaaatgaccttggcacatatgaaataatagatggtctacaaaggttgcatgcaataatgtcttttatcgagacaggatatgagtcactcgatgggaaacgctttaatcttgatgcttttccgaccgcgaaaaatcgggccgatgaaggtaaatttacagcagtaaaaactgataatatgttaagtcagcgcgaagttactcagttattggattattcgctagctatgtctattatgcgtaatgcaactgagaacgaaataaacgatgtttttgatagaattaatacgtatggtcataggcttagcgatcaggaaaggcgccaggcgggtatacaaaataaattttcaaatatggttagggacatagcctgttcccttagaggtgatgtatctgacgatatattgcttttagagaaaatgccatctattagtatagatttaccgctaacaaaacatggttatcaagttcaatcagaagatgttttttgggtaaaacatggaatcttacgttcaacagaccttcgtgacagtatggatgagcagtgcatcgcagatatagcagcatgtattgttggtggtaaactaattgaccgttccaaagatgcacttgatcaaatttataataatgaagaagatgaatatggtcgtatcggatctgctattaatgtttatggcgaagataaatttgcagaggaattcaagttttgcattcaagaaataacaaaggtttgtaatagtgatggagaagtaaaactcagggatttaatttttacaaaacgcactacaaatgctttcccagctatatttgctgtactatttattgcatttcatgaactacttattaaagaaaataaaaagataaataactataaaggtgttagggataaccttaataatgtagtcactcgtttggatacgaaaagatctgctactggcggggatgaaaggagaaaaaatattaattcaatcattggattgataaaagataattttattgatagcgctgataatagtcatatatataattctcataacactattgatattgaagatattttgcgaagatctgaaatcgaacttgcaaactatgagttgaagcagggtttattaatgcttggtggaaatagagatcttgataatagtattcatgataaaatattttcaacaatttgtgccattgctaatattggaaagggtaataagaacggtgtggttggtaagttattgattggtgtgacagataagccaagtgattcagttagagtaaaagagcttgatgatatagatgcacatgttgttggtgagcgaagtgttgttggcataaaaagagaggcttcaaggcttggcatatcaatggaggaatattacagacgattctgtaatgaattaaaaaaatcggcgttaagcgaacctctaaagtcacaagttgtgagtttgattgactataatgatttttatggctatggtgttatagttattacagttccacttctatcaaattattctagttataatggggatatttattatcgctctggagataatacaaaaaaagctacggttatagaagcagccgatattgcaacacgctttagataa

SEQ ID NO: 239933 - DNA, 723 bp, Klebsiella pneumoniae
atggttaagttctcatttaaagttccagttttcgatttctccctaacatttgacattatcgaagtattaataacgcaaagtgaatcctcaattgaaaaagggattgcagagtataaagaaaaaggcccagaagaatatgtaattgatatctctcctgaagaaggactttatcagtccattgatcactatatgggtcttgatagttcattagttgatctagatgagatgttccttgagtattacccaagtgtatttagaaggtctgttttcttaactatcttcgggatgtttgagcacgaaattgaaaaattctgcaataatttttcaagcagacaccaaaccccaataaacctttcagatcttaagggcagcggatttgagagaagtcatcttttcatcaaaaaactcataggaataagttcagcggctcactatccagccatcagaaaaataacaaaactaagaaatagttgcgcacacaacgatgcaaaatatatagaaaatgatggacaggatagcaaacttattatcgaactaatgaatgttcatccggctttattcaaaaaagatggaaaacaagttctttttatgagtggcgcattgaccatggtcttagacgccttcaaatcgtatctaagtgaagttgagcaagcagtagatgagtacgagaagaggaatcaaagtggcgacaaagtggcggcagcggttggcattaccccgtaa

SEQ ID NO: 239934 - DNA, 867 bp, Klebsiella pneumoniae
atgtacaatacttatagaacgttagttgttgttattttatataataaaaaaattgtagattctctgacaatagattctataaatgattcctctcttgaaaacgcaacgttatttgtagtcaataatggccctagtatcgtaacattgaatgatgagtgtgcaccttttctaagtcgtcctaataacgatgttaaactttttaattatactgaaaatagaccattaagtgttatctataatgaatgtctttcagttagtgattacgataaatatgtattctttgatgatgatagtagtttcgaacgtgactattttgatgagcctcaaaactttgcaatgattgatgaaaaagttgatttgttgctcccccagataattgataaaacaactggtggagttacatatcctagaggtgttaagttgggggattatgaggcaggatttatttttccgcaagataattacttttactctatcggttcaggattaataatatacaagtcattgatagataagtttaataagtataatttgagtttgtttgatgagcgatttgccttatacggtgttgatcttagtttgtttcgtaggattgagaagttgaagaaacaaaatgtagttatcaaggctatggtgactggaaaaatattccatttgctatcgtccacgtcggaaaagatgacggagtggcgttatcgtgaaaggctgtatgataaagttctctctataaaatattattcaaaaaatcactttcgattaattgctggtttggcaaaggccatcttaattgaaatttataatgtaaattttaaaaatgtctatcatatattctctgtctttataaggggtaagcatcctagaacttaa

SEQ ID NO: 239935 - DNA, 1440 bp, Klebsiella pneumoniae
atgtcacttttaaataatgctaagtggaattttttttcacaagcatttaagattttagctcagctaattaatgtcgtttatttggcgaaaataattcctccagctgagtatggtattatggcgatggcaatggtagtgattaatctaggtactctattacgggacttgggaacttccgctgcaataatacagagaaaagagttaacctcaaatttggttaacaccgttttttggcttaatgtaataatgggtgtcggattatgtattatagttcttggttcatcatcatttattgcgagtttatatcaccaagataaactattttatgtactggtaattctaagcgtggtttttcctttatcaagttgcgcagcggctcatcttgcacttctggaaagggagtctcaattcaagaaaatctccattatagaagtatcatcatctacagtttctgtgatcgtcgctattgtattggcgaatcttggatttggtgtatatagtttagtttttcaggcaattgtactaaatttaatgtctgcaattcagttttgggttgcatcatcttggcgtccatcgtttaaaaccatcataaatggtgatgaattaaagaaaatattttcattcagcgctaatttatctttgttcaattttataaactatttttccagaaatacagatagcttcatgattggtaaattcatgaatgccacaattcttggtagttataatttagcctacaggataatgcttttcccacttcaaagtttaacatttgttgctgcacgctctttatatcctattcttagtaaatcacaagacgacaaccttcagatttctaaaatttacataaattgcgttttctttattttattgataactgcgccgctcatgagtgggttggcattttatagtaaaccttttgtaagtattgtttttggtgagcaatggcatattacaggtgatattcttaaatggctggcacccactgcgattatacaatctgttctcagtacttcaggatctgttttcatggcaaaaggtcgaactgatgtattattaaagcttggcattataggtgcttttttacaagtttcatcttttttgatcggtgttcattatgatatcagtacttttgctatgtgttatatgattgcaaacatactaaatttctttcctgttatgtatcttttaatgaagattattaatgatacacttttttctttggttaaagcaatattccctattttcattgctgtcgcagtaatgatttttttattgtcaatggtccattcgcattatcccttgggaaatattgatagtgctttcttgcttataatgttttccttacttggggcggtgttttatttttttgcaatccttactttctccgcgtattttagagggatgttcttagctcgtatgaaacggaaaactgtgtaa

SEQ ID NO: 239936 - DNA, 222 bp, Klebsiella pneumoniae
atgatgcgacaggactggcattctgccgacattattgcggcgctgaaaaagcggggaatgtcgctggcggcggtttcccgtaatgccgggctggcgtcctccacgctggctaatgcgcttacccgccactggcccaaaggcgaaagaatgattgctgaagcgttagatgttgcgcctgaagacatctggccatcgcgctaccgtaaatcagagtatcgataa

SEQ ID NO: 239937 - DNA, 462 bp, Klebsiella pneumoniae
atggctacaatcctcactcagacacacccgttacttgctgttccctttaatgccgccacggatttcactgtactggccgatcactgcgaaaacttcgccgaaactctgattgaaagcaacgatcccacactcaaaatggcgctctgcggcagactcaacgcctgtctgacgctgttgcagcccactctgttagaacccgttcctccccatcttattgaaagcctgaccgttgacaccctccctgcaaattccccccgtttcgagcctgaatgcacagagctttgtcgctactgtctctccctgacgcagatgctggcagggcaaggcttttactctgaaatggagaaacaccttagctgcctgctgtatgaactgatcaactatttcgctgcggaaatgaaagcgccgcgctggctccgcactgccgatggcgtgaagtttatcgacgaggtggccgcatga

SEQ ID NO: 239938 - DNA, 4854 bp, Klebsiella pneumoniae
ttgtctgatacgaatctgagcggtccctcaaacggtggtggcgcggcaaccagcagcggtattgtctttcaacaacaattaggcgcgttttttgccgctcagatcctgagtaatgacccgttggatccttcattgatactgggtgatgcaacacctgttcggcttcgtttcgaaactgaagcgccagttgatgatattcttgtggcaacttctgtgggtggatttctcgcaattcaggcaaaaacaaccgtcccactttcagacaatgaaaagagtcctttttaccggacgattgaacagttcgtccgacactggctaacctgtcgggatggtgatggttctctggagtggaaccgccctctgtcgccggagaaagatcggctgattttagctgtaagcaccaaagcatcagcgactgttcaaaccgacctttccgccgcgttacgccatctttcccagcaaggccgcggagctatgaacaggaaacagaaatcagcgtctgatattttcgaacgctgtgtgttgaccgcgtggggccgaattaccacggaaccccggccatcagatctgttagccgaacttgcccgtctgattgtcgttcacgttgttgatgttgaaaatatcgcatcaacacttcagatgcgacttagccgcagccttgccagagaaactgactcagcagcagccctgagtattcttgtcaccacctgtggggagatgatgtcccgacgtgatggctgtgatgccttattattacgtaacatgctggtaggaaaagggattaaactggccgcaccgccacaatatcaggcggatatccatcaacttatctgccattctcagcacgttgctaatgtcttgcagcagtatgaaaccatcgataatccctccggccaaccgcttactttgcacagggaatgccaggatgcagttgagcaggctgtgcagtccggctcgttattaattattggtgaacccggagccggtaaaagcggcgtgctgaatgcgctggcacgtagcctgcgcaatcgtggggacgatgttcttgaactggcggttgatcactattcggttgagtcgctcgaaggactgagccgtgaactccggctagatcattgtctgactgaagtgcttgaagcatgggatggtacgtctcacggctggctgattattgatgcactggatgcgacccgtggggggaaaggtgaggccgtttttcgtcccctgattgaacaggtactgaatcaaaaggggcgatggcgcgttattgcctccattcgcagtttcgatttacgtatgggggtgaagcttcgcgatctgtttaaagggcatcctccagtgtcggaacgtgccgatacgcagttttcttcggttcgccataatgttattccacgctggtcagataacgaattcagccagttactggaacaatcttcggcgctgacagcagcacttaagcagctttctgacaggcttcgcgatttagcaaaagtaccgtttaatacacgattgctggccgacctggtttcgcaatatgcgtatattaatctgagtcgtatttcatcccagagcgaattattaaaactctactggcagtatcgcgttgagaaacatgggctgaacgcccggcagtgtcttaaggctctggttgatcatatgattgccactcgttcactcagggctccatccctgttgacgggcgcagatgctgatatgattgatacactctctcgtgaaggcgttgtcgtcagggaggctaacgatcgctgggtacagtttcgtcatcatctgctctttgactatgctgcggcaaaaatatcattcgatcctgacgcactcattgcgggaaccttgcgtttccctaaacagcaggctcaggggttgatgctttctcccgcactgggttttgtgctccaggaaatctgggattataacgaagatcatcacggtttctggcaagcagtaagtcatctggttaatgatggcgatggcgatcccattatccgtagttcgacaggccgaattgcggctgaatatcctgttgcacaaaacgacctgctctggctcgctaaacgtgtggcaatggacgatcagaacgttatttccacgctcagtcatctctgcggcgcgctggcaattcggtttgaagatgaaaaagaagtggctctgcttccatgggtatacctggtctctgctttaacgcctgacatcaataaagtcgcggagacgttgcgatttttgctgcatccgcttactaagcaggtgactgatcctgatctacgcaatattctgggtacagcctgccgcgccgtgctttcttatggccttaagcagagtgagccgggctattttgtcagaagtgctatacctctcgttgcagatactatcaataccgatgttgatgcatcttgccgtttactggagcaaattatttccgtcaaacgtctccagcattttggttctgaggaaattcccgtactctgttataacatcaataaaatcgcagatcgtgcgcctgagtttgtcgccatggtattcgagtttgtctacagctacgatgtcaccgaagaacgggaaactacgcttgggaacagccgaattctgcctttgagatcaaatgcccgacaggactatgaatcggctcgttattccctcggtgagtttttctcccattttctcgaacaacatcccgaacaggctgttgatgctgccgttaacgctttaaatggatacgttgcccggcgccatcctattgattcccctgtgatgcatttatccatttccgggaatgatatctctcttagggccgatcgcagccacatccgggcgtacaatcctacaggcgaacacgcgcatgacggagaagtactggttaagaaactattccagcatttgaaaagcgcgactgaaccagacgtgttagttctcgcagaacttattcgtcaaaaagcctcactggcaatcttctgggccaggctgtttctggcggcaaatgaacgtaatgatagcctggttgattttctctggcccattgcagcgcaggaagcgtttatccggaacgaagatactcgtaaagatgctatcgatttggtcagcaaaggaattgcccggcgtccagtggaggaacggcaagtgctggagaatgcagcattccagtataatttctctggctatatttacccggaagaggcaaagaaacgactgttatatcgtcttttcaacgcgattggatcagataatctttctactgaagccgtccgggactttctgaaaaatacacagggggatgatgaaatatcaagcaataaaaggcttttcgatatttctccggtcaacgttagtacgggtataccttatgattttatcgaaggtctggatcgaaatgagccagccaatgccatgcttatcagtgctgtcaaaacagcaaaaactgcactggggttaacgacaaataatacactctcctctgaattatcgctggaagatgtttttagcgttctcgagccgcttcgtgaacaactcaatgctgcaaatattcatacctatgtgcgcacaaccgcagaggatgttattgttcgggcctgcgctgcggctgttgaacagaaattattaccacctgccaatgacaaccaggtagatgaactgacgcctcattttttggacttattgcatatgacttctcgcgcaatatctccaactgtcaacgaagataccgaggataattttgccaacagcgttagctggggctctccttcaccgaggattgatgctgcacgaatttttctggatgtaattcctttacgtcccgatctgtatgatcgactgaaacctgatatcgaaaggatgttgattgaccctcacccggccgttcgccttcaggcatcaacacgcctgttaaggttgtgggatattgctccggatagcgtatggcattacctgaatgaacgcgtggagcaggaaatcaataccggtataatagagcatatggttggggatggaattagacgtctgctatataccgacccgacgcgttctttctgtctcatccagaaactgctgggacgttttagtaacgatcctgaacgtcagcaccgtattcgcaagatagttagcatcgatctggcaattctctggggagtccatgaaatcagggaagcatatgatattcttcaatgctggattgtcgatcccactatttatagccatgaacttaaacaaattttatttacattaagggatggattcgttcttggctttgccgaacagagtacaccgaaggacattggaatcagacgacgggcgttagatatagcctatagcattattgatgctgccggaaaaaaactggaagagtcttcaccccgcaccgatctgacagagattgaactggaagacgtaagacgctgttttgcaattatagacggagcatgtctgcaacttcgctttgtttgtgaagggaaacataatcctgagaaaccattagaaaaagaagaacttaagagatttctaaacgaaactgaactgctcatgcggcgcattggtgattgcagcacgccacacactatttacaaccttctggaactgctggaaacgcttgttcctgtcgatcctgcaaaatgttttgatctaatggcccatgcattacgtcacggaacaaggtttggtttccagaacgaacatatgggaatggaacagctggtaaaaatgatgggggtgtttcttgccgactataaaatcatttttgaagaagaacaccgacgtacctgtttgatagaaagtctggatatttttatggatgcaggctggccatctgccaggcgtttgctttataggttgccggagttgattcagtga

SEQ ID NO: 239939 - DNA, 2127 bp, Klebsiella pneumoniae
atgactgatgtaactgatagtctacagcataatgaaacggatgttgtgatggctgccgaatgggaccttcagcctccagattatgcacctaaagcacgaacacagctctttgatattcatgatgctgcagatgtaatgttggaaaagcttctgcaattaccctcggcaaatggttggggaattgatgcaatctgtatcaacaaggtaaaagaatacaccatgaaatgggatgatttttttattgaattgcacagagagattcaaaatatattatccttaaaactaggcgtgaagaataacagagatttccagtatcaaacgttaagaaaagcaaacagctatcttgtgatgtttctgtcacctgatgcccgtccgtatcatcaatggattaatgaactaaaaattaagggctttgatcaatataaaatttctcaaactgtgctcgggctgcgtctgaaactacattttttagataatgccggaaagtattttgatgtgagtcatggggcttataatagcgaaatttttctgggtgccgtcgtacaaaaagaagaaccagacaagagaggaaactattacgtcgatgcattgcaaagtgacctcttttacagcccggattatggcgacctcacttttaccctgaaaggggtctgcttcagagctaaagcggaagagcttggtgtactcagcgattatggtcggattctgattaagggtaaaaaatcattgcagttgcttgagaaagtagatggtagaaaataccggaaaatgccatatatgcgttttgccagtaaagcttattctggctgcaaaaatcatgcagaaaatctggttcaaaacgtgctcggtgatatactggctcaggctgacatcgctttttcaccacgtgttttttgtgcaacccacagtcaattagactttttaacaaccaatatcaaagcacttcaacgcccgttagttattatagacaatcttgataatggcgaagaaccagaagcgcaccaacgatttattcactatctgaaaaaagaattaggtgcagtagatataatttcacctcaggaacttattgatcttgatagaaatattaactatctggtgcttaatcagtctaaaaaaataaatgggtccagcatttcccttggtgaagatacctttttaaactctacctggcaggcactgaatgaggcaaaagcgggtaaaaaagatctgttagattattattcaaggctaaaagtggatttcatccttgattttgagaaaaattatcagcgagtctttcagggatgtaatattgaagccatagagcagaataaaaaagaccctgttacccaagtggttaaaaaagttcttaatcctgtatctgtcgctaagttggaaatgatccgcagcgaactctggctaaaagaagctgtgctggtgagaaagaaacttaccggttttagcattaacgatggtgagtacattcttgtctcaattcggtgctcctcttccggaaacagaagagggaatgatttttatggcgttgctacacccgtcgtattcagccatggcgtaatgaacatcgcagagccaaaaatgtatacaaatgaggtggatttccgtaataatgttccggggatgaatatcaactgtattgataaattgcgtgatgataatttctatcttgttgatacaataaatcaggttgtgattaagcgatacaatactgttcgcattccgagattattaggttcttcggaacgttgttctcttcaggtagcagaagagaatcatgataaaattaataaattcggtgcggcggataaaacatgtttgccttactacttaacgccgaaacctaaaagtcatgctgtcagtcagtatcaacaactctttattgaaaaacgaggcaatgaggcattacttttttgtactaaaagcaaccagcccaaccagattatggacagggcaaccttagtttataatttggtggcgacaacatttgacggtaaagaggttgatgtgatgacgcaaccagcaactgaattactgttgcgaactttaacttacgataccacccgttataatgaagtcagtcagacatctcttctggaaaagatatcgcgtttgatgctgcataactaa

SEQ ID NO: 239940 - DNA, 3984 bp, Klebsiella pneumoniae
atgcagtcagaacaaaatcacaactcccgacatcttccattaccacaaagtgtcagagaagccattaccgcagcaagaaaacaggccggtacgttttacgcttttaccgaagcagatacaccactactgattcaatcccaggatggtacggcgagcggtaaaagctataacgtttttgctcaatacatcgaaagcgtaaatccagcaatcaaccctggcaatagtcatcgcaatctggtgtttatcacaccgttgaaatcacaaattgacatcccggaacaactcatcgctcgcgcccgagataagaagattgaattgttaccttatctttcgcaaggggatgtcgcagatcttggttttacgtcatgggtcaaatctcctgaagggaaaacacctacaaaccgggaacgttatcgtcgctggatcaagcaagccaacgaattgatgtcgggtgaaattcagcttatttttcaacgtcttaaagctgaagttgatgcacgtaatagtttggaagtacgtctggaaacagagattaaagtgggggcaacgtttgaacaaaaacgtctggaggatgagttacgtctcaatagttttcatttagccggccgcttacaggaagcgactgtggcgatgcttaatgccctgaatcaggatctggcggctttacttgatggggaagcgactaaccctcgatatgcactggcgacggaaatggttaaacatcttttcccgtttcagattgcactgtatcgccgatgtatcctgttggccacgacgaaaaagttcgatggcagtgtgctgttactgaaacgcgataaagaaggcggctatcaccggagttcacaaaacctggaccacgttctgggtcagaaaaaaagcctcaaagtgaatccgttaggcgagattgctaaccagactaatccacagcgaattgagagcttaaaagagcaatattggataaccgacgaagactcaccttttgcacaacgtgatattcgttttacattagttctggacgaagagcacgaagcctaccgtatcttccagcagaatgtttgccagacattaatgaacgacgatcagcaacttccttcgttactggcaattttacatcgtgtactggaatatgtggatgaatgttcttcagatgaaagagcgccagggtatacccctctgaaaaattatgtcgatgagatcaacaaagccttattacaatgtgatttacgaccagatttcgatcttaagaagctgaccagactctttagaaatagtttgcttgatatcgtcgtcgatagccgtaatgctgagcaggttatcgcgttaattggtaatattttcagttatcagattcagcgattttaccgggagtcagatcttcgtcgtattcatttacgtagtcacgggcgtcactcatacactgaagtctatgtttctgaagatgaaaaaaaagttccagatgaatttaccttatatgaactgtatcagacactgaccgctctattattagcctctgctcggctggaaacacccaaacatgtctgcgatttgctggcacagcaggagatggcaaatcagaataacccattatcagttttcattcgtaaagcccaaagcattaaaggagatatagatcatttatcttccagtgagcctcagaaagaacagttgatagatgacttttttacctattttcaacccaaaacattgttttccctttcgccacgtgaacaggtaagaattgaggctgaacaattgaggggatgggtattactcaaatttcggatggagttaattaaggagttacccgaaatagcattattacgtgtgctttataatacacgtaatactattattttactgtcagctacagcaggatttcctgcaacgtataatgggcagtacagccgcccgtttctggataaatactcccgtgacttgaactatcgcatcaggcagcgggatgttgattctgcttcgcccctgtcggcgatccgcgataacagaaaccttcaccgccctgtagcgctggaggtatttgacgatcaggtactggagtttttaccacaaaacgaggagcctgagttcaggaatgcatatcgtttctggctcaaaatgctcgaaccatactctacatcagttcagtttaatcgctatcataaacgagagtttcatcgtcagttacagagtatgttacttgcggcctatactggtcggcacattttatgtattgggatcagtagccgtttttttgcgattatcgggaattttcttcgtgccaataagttaagtgcaaatccctatcgtggggttgctattcttgacaatgaaacacgtcgggggaatgatttacctcgtgtatttgaaatcactccttttgctgagcggcatagattgcgtgtcgtcatgtttgattcaaaactcaaccgggaagatccggtaagagactatctgcaaattgatcaccaaaacttagcaatatgcatggtttcccacttccagggggctggcacagggcttaattactatgtcacttatccggtaccgtcagaacctacaggagcagattcagagcaaatcgacttcgatgaattagcaatggtctgcggtagctactggagtcagattaatacaactccatcgcgaaacacgctggaaaattatattaccttactcaagcattatgctcatggaagtgtgcctcgtcaggttggtgatttcgatacggatctagttgattctgatgctgcccaattgctggatactgaacataccgtcgagcttcataaaattgcaatgcaaactattggccgtacagaacggcgtgatgcccaaatgaatggggttattcgtttaccttctggtgttcatcataatgcattgtgtgtttttcgggatttggatcgtcacccaaatgcacaatcgttacttgcttccctgagtctgcataaccacctatggttcaaacgctcaaaaaaggatttattaaaagccagcttttcttccgatagtcaacgtagcgaatttgaaattaaagttgctaaagcaatagatatgtatagcgactttgaagctgaactgaaaaataaaattctgccactggcaaggcaaggtgatcgagatgcaattgagttaaatgaagcattacgtcaccgggacagttttaccgatcctcagtcatatataaagcgtcttaaacgcaacgtgattattaagaaaaatgcttaccttagcgactgtgtaagccatttttatctggagcgtactgccgattggaaaagtgtaatactggctaaaaccttagatggttatggattaacagatatttcagctggagcaaatccatacaaaccggaatattgtttaccccaatatcatgaagccatggctgaagagtcatccggaactgaacagcgtatttttgcgaagattctgggattagatgccaagcctttacaacaatacatccccattccttcattgatgccacttctaattggcaatattggtgaatggcaattacatcttgtgctccaggaaatgaatattacgcccattccatcacaagagctatcacactatctggatagtcattgttatgagttgtttgatgtgtattgcattaacaagaaccgaattgttgcaatcgatgtaaaaaactggcgaatgcaaggaaataaccgtcaattagcgaaaaaaatgcataataactcattgggaaaagtcagtgagttgcagaaaatagttgcagcaaaaacacagtttgatggtgttgacgtcgtttatcttaatacccgatatgctttaaacagcctcaacattcgtgccgaacactctaaccataaaggcatctgctattataacctttttaaaaatatttcatcttatgaaaaagataatggcaaaaatcattatgatgcaaaaataaaatcagaattaagaataaatcaatacttacttaatattctaggagtgaattatgactga

SEQ ID NO: 239941 - DNA, 510 bp, Klebsiella pneumoniae
atgggattaacaacatccagaatggcattcgagaatatgtgtctcccgccacattgtgtatcagggacggagactcaagagcggttggctgtaaagcacattgtgtcgccaggaagccattgtttaacatcgcggacactgaaaaaattcaatctgaaaacacctctctgccttttgactggattttttcctgccccgcgatggtcatcgattgcctgtgggacgattttcacccatcgcgatccctcgaaccgtttaggcgtattacgtccgggcagtaaagaggttcaggaacatattaaaaagcgcggatggcaagctttttgtcatttgctgcagagaagagatcaatcttgtaaaggtgcccccggcattagtcgccgaacttgctcagcatacgacgaacttctatctgttagctttttcactgcggaaaccctctcatattcaactggagagcatcgctcctggggacaattattcgctatatcgttttaccccggagtctga

SEQ ID NO: 239942 - DNA, 2157 bp, Klebsiella pneumoniae
atgacttcagttataaaaaataactctcctaccacagattctgatgcaattgaaataggaagattaatcggggagttaattgatcaccgcaaactaataattgctgttacatccgcatttacagtattagctgttttgtatgcacttttggctacgccaatttatcaagctaacgctttgattcaagtagagcaaaagcaaggaaacgccattcttaacagcttgactcagatgctaccagatgcgcaaccacaatcagctccagaaattgctttattacaatcaagaatgatccttggtaagacggtaactgatcttgatttgcaaactgtagtaaagcaaaaatattttccaatcatcggacgtggcttagcccgtgcactaggtgaaagtaatgggaaaattagtataacaagattatatcttcctggttcagatgatgcagatgcgccaaaagttattctcacagttatagataatgaggaatatgaaataacaggagatgattttacagttcatggtaaagttggcgaattacttgaagataaaaatatctcaatattagtcaatgaaattaaggctgaaccagggaccaaatttaatgttatatacagatcacgtttaaaagcgattaatgatctacaggaagtattaagcgtatccgatcaaggaaaagatacaggtatgctaacgttaatgctttcaggagatgacccagctctaatttctaatatactaaatagtattagtcaaaattatttagcacaaaacgtcgcaagacaggctgcacaagatgctaagagtttggaatttctgaatcagcagttaccaaaagttcgctctgacttagatattgctgaaaataaattaaacgcttatcgacaaatgaaggattctgtcgatttgtctatggaagcccgctcggtattaagtcaaatagttaacgtagacaatcaattgaatgaattaacatttagagaagccgagatttcgcagttatataaaaaagaacaccccacttataaagcgcttattgaaaaaagacaaatattacaagaggaaaaaaataagctgaataaaaaagtaagtgatatgccaaccactcaacaagaagtattgagattgagtagagatgtcgaatctggtagagctgtttatatgcaattgctcaataggcagcaggaattaagtattgcaaaatctagcgctattggtaacgtacgaataatcgataatgcagtaacagaaccaaaacctattaaacctaaaaaactaatgattgtggcaataggcgtattcttaggcttactggtatctgtaggtttagttctattaaatgtatttctacgaagaggcattgaatctccagagcaattagaagatatgggggttaacgtttatgcaagtgtccctgtatcagagtggttaactaaaaatgttggtaaaaataaacggcgcaaaaatgaatcagatgcacttcttgctatagaaaacccagcagatcttgcagttgaagctatacggagtttacggacaagtcttcattttgcaatgatggaggccaaaaataatgtattaatgatttctggagcaagtcctaatgctggtaagacattcattagtacaaatttagcggcaatcattgcatctactggtaaaaaaatattatttatagatgcagatctccgaaaaggctatgtccataaaatgttagggtttagtgaaagtgctggtttatccaacatcctttcaggtcagaaaaaaattgaagatgttgttactactgttaaaaatgcaggttttgattatataagtcgtggtaatatcccacctaatccggccgaactactgatgcatccaagatttgaaaatcttctaacttgggctacaaataattatgagttggttattattgacacaccaccaatccttgctgttacagatgctgcaataataggaaagtatgctggaacaacattactggttgcaagatttgagtcaaatactgtaaaagaaatttcggtcagtatcaaacgatttgaacaaagtggtattgcaattaaaggatgtattttgaatggtgtcgtgagaaaagcaagtagctattatagttatggctataatcactatggctattcatatactgataagaaataa

SEQ ID NO: 239943 - DNA, 132 bp, Klebsiella pneumoniae
atgcttttagggcactggttaaaccagaaagaaattcctgacccctataagaaaagtgacgaagcattcgagtcagtatatgaactcattgtccagagcagtaatagttgggttgataaattagacagataa

SEQ ID NO: 239944 - DNA, 921 bp, Klebsiella pneumoniae
atgaactggaaagacaataaagaaattgctgcatactttaagttttcgaatgttatggaaagtgactcaagtgagttacgccaagcaatagttagaaaaatggcatcaatacatccagacaacaacagtggtatttttattgacgatgagtcaaaaaatctatggcagcatcttaattcagcaaaagaattcattgataatcagtctattgaaaaatctaagggtgaaaatcataaacagctgatacccatgtcacaagtaatggatttggttaaagtgattactgcggcaggaactcagactgttagtctgactccttcattaataaagtcagaagttcggagtgatacgcgaactcgtgcattccttcctcgattggggtcaggagtatttgcgactctaagcgctttcttttttacatttcccaatacggctaaagataacccaatcattggcccttggttacagcgtcctgaatcacaatattatttattatgtgtatcgttattatcaggatggctctttattagaacttggattaaagaaaagagacaggaagaattaatagattttttatcctcagatgagggacttcgaagaattctatctgaaatgtcctgtggatatgttgggtttaatatttcagagcgaaagttttcacttcctgctttcactcgtgccattaatttaagatataataatcgagagcctgttattgcaagagtcattatgggatataaatcactattatttggttcgatgcctaagctatctcgatctattgtagataaaatagccttaatgcaaatcgaaaaacttattcaacggggggtgattgtggagttaccccattccggattggatcggatgttcgaactctccgaggctgcgtataatgacattcgccatggtcattattaa

SEQ ID NO: 239945 - DNA, 1206 bp, Klebsiella pneumoniae
atgagcgagctaaattatctggaaaaactgttggatggggcaggggtggattggttgccattgggtgaactaggcgaactagtgcgtggaaatggattacctaaatctgatttcacggagttaggagtacctgctattcactacggtcagatatatactttttacggactatcaactgaaactacaaaatcatttgtttctcatcaaacagcggaaaagctaaaaaaagtaaatccgggtgatattgttattactaacactagtgaaaattttgaagatgttggcaaggcattagtatatcttggaaaaacacaagccgttactggtgggcacgctacaatctttaaacccagcaatagaattatcggaaaatattttgcttattacactcaaacgggattttttgcaagcgagaaaagaaagtactccaaaggaacaaaagtaatagacgtatcgacaactgatatggcgaaaattactatcccaatcccctgcccagacaactcggaaaagtcccttgccatccagtctgaaatcgtccggattctggatacatttactgcacttaccgctgagcttaccgctgagcttagcatgcgtaaaaagcagtacaactactatcgcgaccagttgctgagttttaacgatggtgaggttgaatgcaagacgctgggggaaattatacagatgcgtgctgggcagcatatttcgaccagtaaaatcatggaaagaagagaagatgattatgtatatccttgttttggtggaaatggcattcgcggttacgttaaacaaaaaagtcatgatggagaacatctgttaatagggcggcaaggggctctatgcggtaatgtcaaaagaatgaagggccagttctatgctactgaacatgcagttgtagtttcagccctgcccggggttaatattgactgggcgtttcacatgttaacagcaatgaatctaaatcaatatgcttcgaaatcagctcaaccggggcttgctgtggggaaattgcaggaattgaaattacctgtgccttcaataaagagacaggagtacattgcatcaatactggataaatttgacatgttgactgactccatcaccgaaggccttccccgcgaaatcgagttgcgccaaaaacagtacgaatattatcgggacatgctatttagcttcccgaagccggaagtcgcagaggcgtga

SEQ ID NO: 239946 - DNA, 1221 bp, Klebsiella pneumoniae
atgccgaagttagcaacaaaactcactgacacagagatcaaaaaggccaagcccacagagaaagagttcacgctatgggatggagatggcttgttcctgcgtatcaaaccaagtggcaaaaaaatctggcacctcggctataccgttcctttaaccaagaaacgggccaaaatgagccttgggttctatccctacctgactcttgcacaggcaagagcgctccgggatgaatacctctctttgcttgcacagggtatcgatccccaatcccacaatgagcaaaaagctaaagcgctcaaagatgccactgaacacacattccagacagtggcgaaaaaatggcttgatgaaaaaattaaaacatcaggcatatcgcaagatcatgctaaggatatctggcgtagccttgagcggaacatcttacctactttaggggaggttcccattaaagagatccgccctaagatgttgaaacaacatcttgaccctatcgagcaaagaggtgtccttgaaactctacgccgtataatttcacgactgaacgaaattttccgttatgcggccacagaagagcttattgagttcaaccctgcagataacctcacacagcgtttcagcaagccaaagaagcaaaacatgccagccctccccccaagtgagctacctcgtttcatatcagcattagcaaacgcttctatacgtttagaaacacgtatgcttatcgagtggcagttattgacttgggttcggcccggtgaagccgttcgggcgcgttggactgacatcgacgaagagaaccgattctggaacatccccgctgagttcatgaagatgaaacggccccacaaggttccattgagtaaggaagctatgcgtattcttgaatccatgaaaccaatcagcggtcatcgtgagtgggttttccccagcatcaaagctcctcttagccatatgcacgagcaaacagctaacgcagcgataatccgcatgggttttggcggtgaaatggtggcacatggtatgcgttctattgccagaactgccgccgaggaatccagtaagttcagaacagaagttcttgaagcagccctcgctcactctaaaaaagatgaaatcattgcggcatacaaccgtgcagaatatttagccgagcgtgccgagttaatgcaatggtggagtgattacgtccaaatacaaaaatataagtctattgccgcatga

SEQ ID NO: 239947 - DNA, 1740 bp, Klebsiella pneumoniae
atggtaaaagatgaacttgaggagttcagtaaacttgcggatcaatacatcattacatgtgatcacgcttctttagctgcgttagtcgaaagttatacaaaacaggatttcaccttttctcaccccttgtacgaagcccattatctctactgtctaggaaattgttattccaaactctatgaaacacgtaaaacagagtggtattcagatgatttgatgaaatcggtcatcttctacagaaaagccatacatactctccctaaagcaaactggcaggaacacgtaaataacattcatgcatatgatagtcttagatctatgattgagacaaatttagctaaccgtctttcatcacagggaagagcactatgctgtatccctcactatgacaaagctatttctatagataacaatcccgtagcaattatatcaaaagccaataatgaattatttcttggcaattcactatacgatgaaggacattctgaatatcattatttcattgcttacaatctattaaaaaagggactcgataatttcaaaaaacaatatccagaacaaaaagaatcacttgaagatggggggcgattacacaatttccaaaaatggtttgaggataattttgagatatcatctttcgattatttcatgaaatacactgaaaaactcacatcaataaaacagaaaaagtattttgaatggtgtgcaaaaaacaagcttttccttaatgatttaaatgatgtttgcgattaccagattacttaccaagatattttttcattaccatcatttatccaatctcttaatggtgcgcttacaatgcatgaagaattatcataccatggtaattatgatgaattaaaaaatgattactgctatgcgcggtatttaatatactcctcaaaggatataccggacgatgcgcctcatatattcaactcaacttttcaacacgttgaagatatgacttactcaattaacaatttaaaggttgcccaatacaaatcagcattcagaataatatattcactttttgacaaaatagcatacctaattagccatttttttgatttaaatgacttaaagcatgacagaaaaataagcattgacaatttatttcgcgacttcacaggcaagaataatgaatggaagccccataaaaaacttaaggatagtgataatccttttatccatgctttattctatatattaaaagatattcgcaaagttggtagctctgattcagtatcaaaatggttagatccaaatgctgtagcatttgctgaaatcagaaatgctatggaacatcgttcattgaaaattgttgatgattttggctatgaactcgcaacatcacataatacttacaatgatgaagaatttacaaaattgcaaagagaggtcaatacgataccagatgaaattagagaaattgaattaaagataaaaaaaacaaatgaagaccatgaccctcatttatctaaacagcttaaagaaaagattaacaaactaaatactaagcattcagacttaaaagcaaaaatccatgaaaaagaaaaactatcatcacattgtcttttagtgccaataagccaattcgaatcaagaattatgcaactcattggcttagctcgtaactcaataatgtatctatcattagctatccattttgaagagcgaaaacgcccaaacgacggtatttacatgcaaagagaagtaccactcaagcataatttatga

SEQ ID NO: 239948 - DNA, 465 bp, Klebsiella pneumoniae
atgttttatttaatatgtatggtttttatggtcatgttttttattgcttgtatgttgtcggttatatatgcgtctgaaatatatcagtggcagcattataacagctataagtttaagcgatggttaaaaagtgggagtataaaaaaagatgcgcatgaagaaaaaataaaaaaggaagtgaaaaaaatgactatagattatatattaaaacttcttaaaaaatacaatatagattttgatgctaacgagtttgtaaaagcaagttttaatattaagatgaaatactacaagttaatattaaatgaaaaggagaggctgaaagaaaataaaatattagatgaagcagttaaacaaaaaataaaaatagaaactgacacatttgacgctgaaaaatttcaaaaagaagctgatgaacgttataagttattcatggaacgccgcaatctctccaatagagaaaaataa

SEQ ID NO: 239949 - DNA, 237 bp, Klebsiella pneumoniae
atgaatatattaggtttaatagcaaaagcaaaacctgcggtagacgatggcggcggtagtctcattcctgccgcgatgggtttttttatttgtgcttttttagttgctatcattgcctctgttgtttctagtgcttttcgttctgctaaaaattcagcagacgtgagtataaacaatgcaaaaaaatatcacatagcactaataaaagagcagtatagaaagaaaggcgggggctga

SEQ ID NO: 239950 - DNA, 411 bp, Klebsiella pneumoniae
atgaataacttaagacctaacccgaaccctccacgcgagggaacggcggacatgattaaccgcctgaacttctatgatacgtcttttacttgcttacattttttaatgatagattttgataatgacatgcaagaaatgaaaagaaaaaaagattttcacccactccagcttttaaacaagcacgatagagaaagtttagattttgagatattaaatattattagaatatcacttgctagcaaaatgttagatattcaaagtgaagaactattgagtgctgatttatattttaataaaaaagatgagttagacatgggggaggatgcgagaataataggttttgtgtttagagactttgtaaaacaaagaatagaaacagcgattaaaactattgaggagaaatatatatga

SEQ ID NO: 239951 - DNA, 351 bp, Klebsiella pneumoniae
atggcatttaatattgataaatataataaattgaaaaaagaacttgaacaaaaagcaaacttactaaataggttggagcaagaaatgaaagctgaaaaaagaaaagaagatacagcgcgtaaaataaaaattggtgctgagttaataaggatagttagagagaatagcaaagaagtatctgacgagttagattttactaatgatttatcgctattggtcggggctttaactaatcatatggtattaaaaagaatatacgatcagcgcgagtttttgagagcggaaggggataagaggcttaacgaatggaaactaaaaaataataaaaaaaggagtaaaacggatgaataa

SEQ ID NO: 239952 - DNA, 336 bp, Klebsiella pneumoniae
atgattggaaattataacaatgattacgactatgatgataatgagtatttaaatgatgacactatagaaatccctttgagctgtgaagatgacgaatatagagaggattatttaagagaacaagagcaagaacaaaaatctgttttacagaaaatgattgagtataaaaatgaaaatgcattttttggtcatttatacgaaatgtccggcgtttttggttttactgttgttttattgttagggtttatttttacgctgccgattttgtttatagctggattgattgcgttttttattacgataaaagaaaagagaggttctaaaaatggcatttaa

SEQ ID NO: 239953 - DNA, 186 bp, Klebsiella pneumoniae
atgaatgataatgataaaaaaatagaagtggcagcgtctgaacttgttagattgattattaaaaagctacaagatgaaaatacggatgttatatgtagtacaagcttatttataacttacaatcttttttctcatgaaagcgattttactgttgtttatgacacgttagggggagatctggaatga

SEQ ID NO: 239954 - DNA, 1302 bp, Klebsiella pneumoniae
atggcaatatttcatatgagcgctcaaacaataacacgcagcaaggggcatagtagcgtagctgcggcagcttatcgccacggcgaaaagttaatggacgaacacacaggagagatccacgactacagcaaaaagaaaggtatttcagacagtatgatattaatacctgaaagcgcagaccgtaattttttaaagcctgcgtatttatggaacacgatagaaaaaagcgaaaaaagaaaagatgcgcagttagcacgcgagtttaatattgcgcttcctgtcgaaatgacagacgaacaaaaaaaggtgttagcaatagatttttgccaagagcattttgtaaaaaatggaatgattgctgatatagccttccacaaactcgatagcgacaacccgcattttcacgtaatgctaactactcgccgccttactcctgacggcgcggggttcggtcagaaggaaaggaaatggaacgataaagaactgttagagcaatggcgcaagagttgggcagacacagcaaacgagcacatgcaaaaggctggcatcgatgcgcatatcgatcacagatcactgaaagaacaaaaagcagagtttgacgctatcctgccccctctcagaacggttgagcaagaggcgcaggcaatcagcttagacagaccgccgactatccatagaggccatagccgcaatccagagcgacaagcacgctttgacgtgctccaagaagtgaaagtatcacaagaggcaaaagcacttaaccacattgaacagaaacagcttaagccctcgccgctggctccagcttcctcccctgccgcatctttgcaagatgctacacagggaggcaatgaaaacaacccgcaaaatagactcggcgaagttggcgaatatcttcaatctaaactcaataaagaagataaagcagatcttaatgctgataatgaaatcaaagttcacaccactaaaaataatagtaaaagcagttcagcagcggctatagtttcaacatcaaatattaatttgaccgatgagaaagtagataagaatctacacttaacagaagcacaaaaagaagagttagaggatttagaaaataaagaagcagcagcaaagaaaaaagcttatctgatgggcggcgctgccgttcctgaactttctcaagataacaaaacacagtcaaaaagtgagtttaaaaataaacttcatacagctaaacaatcaatatcattaactgaacagagatttaatgaagaacgtgaaacatatgagaacagaagaaaccgaccaataccgcgctag

SEQ ID NO: 239955 - DNA, 495 bp, Klebsiella pneumoniae; identical to SEQ ID NO: 128224

SEQ ID NO: 239956 - DNA, 378 bp, Klebsiella pneumoniae
atgaaaagattgattgcggcagcatttattattcttcctttggcgagttgtaccgtttatggaaacaaatctattaaagacgaaacacagcagaatatagcctctaagattatcaagggtaaaactactcaacaagatatccttcgtttttatggggagcctcagactaaagaaactaacgatggtaaagaaatgtgggggtattccgttatgtccggtgaatcccagatttcaaattacataccgggattagcattattaaagaacagcagcacagctcacatgaaagatcttgagatctggtttaaaggtgatgttgttgaacgctatacctttagacaaacggcaagtaaaacttctcgcggtttgttagattaa

SEQ ID NO: 239957 - DNA, 966 bp, Klebsiella pneumoniae
atggtttatatagttgttctgaattggaatggtcttcttgatactttgtcctgtctaaattctcttttagaacttcaagaggagaaatttaaggtagtaatttgcgataatggttcttctgatggttcagtattaaaaataatgaattggcataatgaattaaaggaaggtttaaaggagcattttccaatcaataaaatagatttacctgttaactttagttctattaaaacaacgaataacagtggaatttatttgattaatattggtaaaaacttagggtatgcaggtggtaataatgttggaatcaattttgctctttctcaaaatgacatgagttatgtatggttgcttaacaatgatacagaagttgatcctcatagtttgttaaaaatgaaagaggcgttttctaaagataaaaaaatcggtatatgtggttccaggttggtatatttctctgagagggataaattgcaagggttaggaggagtctttaatcctcttttttgttcttcatatcattataaagcaaacgagaacgctaccatagagtttgatgatgaggtgatatcaaactccatagattatgtaataggggcgtcaatgcttattagtgctgaagcattaaatgatattggagttttgtgtgaagattatttcctttactatgaagaaattgactattgtttacgtgcgaaaaatctgggatatcgtatttactgtgctaccgaaagcatagtttatcataaggaaggggcctcgactcaaaaaggtattctttctgattatttttgggttcgaaatcgtattctgattgctaaaaaatactatcctgcatctattcttcctgtatatttgtcgctatttgttactttttttaacagaattagacgtatggaattgtcaaaggccaaaaatgttttgaaaattatttttggtagtcgtgacttatataacttaaaataa

SEQ ID NO: 239958 - DNA, 465 bp, Klebsiella pneumoniae
atggatcgccacacactcccgactaaaattatccactacagtcagcgcccggaaacgtgttccgttaaacagattatccgacacgaaatccatactccagcactgatcgattccgctcaggaccggacgttgctgacgatgtgctgcactgacatgcctgcgggggcactttttgcgcaggttgaggccttccagacagtaaatccggtgtgttttcttgtggttaacaggccagccttcccgccacagctgaatatgaatacgcgggcaaccgtagcggatccgggtttccgctatttcccggatacgcagggttatcgcccgatcatcccgccggctctgccagtggtaaacggttctgctctgcatcagcagtccgcatccccgtcggacactgatacggtaagcctcccgcagaaaatgcaccgcctgacgcttctgagccggcctcagaactttttttga

SEQ ID NO: 239959 - DNA, 564 bp, Klebsiella pneumoniae
atgaaagaaaaaggcaccctgctggttgttggttcactgctggccttaagtctggctactgtgaccaccgcccgcgcggcgggtacactgaatttcaccggtaaaattattaacgagtcctgccagatcgccaataacggtggcgatgttaatgtcgattttggcaacgtcgatatgtcggcgctgaaatcccatgaagcgaaaaccgcagaaacgccgttcactatcaacctcaccggttgcccactggcgcagaacatcagtatcagcctggaaggtactccggacaccaacgctaacggcaccagcgccgccgtgctggcgctctccgacgccgcggataccgccaaaggggtgggcattgaagtcttctcttcccctgacggctcaacggaaggcactcagctgacctttgacaagcagagcaaaacggcggtttcgcaagccgacgaaaacggtgatattgcatttaactttattgccgatctgaagagcgattcctcacaggatgtcaccgccggcaatattaatgccacggccaatattgatattgtgtacgaatag

SEQ ID NO: 239960 - DNA, 264 bp, Klebsiella pneumoniae
gtgaaaaccgtcgccatactgcggccggtgaccgggaccgccttcgtcacgtccgccgagttgcagggcgagggtatgcagttccgcaatatgtgcgacggagcgggcgttaagcgccaccatcgttccattacccaccccggcaggctgttggtcaaaaggaacgcccacgcacagcccgcaggtgtgattgccgttgaaggtgcctcaggacgccccctgttcgttacggccggctttgacgtgccccagcagcgccattaa

SEQ ID NO: 239961 - DNA, 369 bp, Klebsiella pneumoniae
atgactattgcttccagactgaaagagacacgcgagaagaaaggcatgtctcaagccaaactcgcggaattatgcgggtgggtacagtcacgtatcggaaattatgaggctgggcgtcggaacataggcgttgatgatgctataaccatctcgaaagccttaggcatcagcccgtcagagctcatttttggtgaggataacgctgagtcttggctcactcctaagcacagaaaattgatttcactttttgaccagcttccagagtctgaacaagagcggatgattgatacctttcagctacgacttaaagaaatcgatgaatatgtcgagaaatatctgagaggccgttttaaaaaagcagacgaataa

SEQ ID NO: 239962 - DNA, 264 bp, Klebsiella pneumoniae
atgcaggccacccttgagaccataaagtcggaagagaagcagacctatcactaccctctgaagacgtactaccgtgagcacatccatagtcctgagggagttcacggtccggttgagcactccatgctgatggatatgctgaaaaagatggatgccgacgggcataatgttgccggtgccgctgcggagttaacgactatgttctgctacatagctggcgtcagcaagcgctgcgagaaatcgagacgcatgctcagtacgtga

SEQ ID NO: 239963 - DNA, 2124 bp, Klebsiella pneumoniae
atgcttgcagaaatagaaaaagataaccaagaggcgacagaattacgggcgaaaaactatgctgtagcaaatccaattggctggcttgaaggcaattttacatcagaagatactggtgaattagatatgcgtgccgttggcctggtagaatctggtggcaagcatcgtaatgctgacggcagtcttgtcacgtctccggctggagctcagggcgaatttcagttaatgccggatacagggaaagaactggcagctaagcgtggggtggaatacaacccggaagatccggtgcagcatgcgcagcttgcgcgagactatgccgggcaacttagtaaaaaataccagtctgaaacgttggccggagcagcatacaactggggaatgggcaacgtcgataaactgatcgctaaaatcggggatccccgtaagggcgatatcagtatcgaggattttgtaaagcaattaccgtcagaaactcaagggtggttatcaaggtacaaaaaaaatacgactggtatggacccattatcaatatataaaattgataacattgcacattctcaaatcgagaaacaaaggagtattgtccttaaagaacttgagcctgcttataataacacaatggcccaactaaataatggtgaggtcccggattctatcccgtcaataccatcgataatgtttggctttggagagaagggcaaaaaaatggtaactcagcttgatattgccatggacaatgccaagacttttcaggcaatccaatacctttctccgacagagcaaaaagctgaacttgagaaggtaaaacctcaggttaatgacccggattacgcattaaagtttgatgcgtatggaaaactaaatgcattagtagccagatccaatgagacgattcagtctatgaaggattccaatcgttttaatgaggctttagcgattggcgaaaaacttgacccaagcaataaatccatgcagaaagccgctgacaacacttcatctgcgcttaatttccgcattaatgatgctactacccatgacgcgatcgtgcagcaggtcaaccagaccggcattattcctacccaagttacatctcagctaaatgccatctcccgctcaagtagtcctgaagtggtaaagcagggagctaatctgtttaattctctgtacgaaacggatcctgcctctgtgggtgatatgcctaaggatatgcagagtttttacctgactgttaagcaacttaccgattccggaatggcgtcagacgaagcggtgaagcaggcgcagaacgttacttataaccagtctgacgctctgaaattacaattgtcttctacgcagagtacgaaggaatacaaaaaagaacgtgccagcgcgatggattccgctgtcagtagcatgaagccttggtacagctttggcgggccagttgcagatgaccagaatgtaaacgccgtcaatttccgcaatgactaccagtcactttatgacatcaattatcgtaactcgggcggtaatgctgatgttgccaaaaagatgaccaatacccagatcgcccgtacctggagtctcagtgatgtgaatggcagcgctcagtttatgaaatacgcacctgaggcgctctataactatgggccatctggttggcaggctgcgcagtggaaagaagaaaaagagcgcctgacctatggagagcgtgaaggcaaaattgaaaccagcccgactcaactgggaatcacatcaggctctgcgccagttattaagtctaataccccagagtccagaataggtggtgaactggaaatcacccctgatgttctaaccacgcataatggtgattacgccattatggttaggatgaaagataaagatggcattgagagcgtacagccttattacgataaatatggccgacctatgcgctggaaaccgtcgctggaggattggaagccatatcaggatatgcaaaaagaaagcgagataaaaggccagcaagagattattcgaggccaggaaattagaaatttcaaagataagcatcgggctatggatgagcaatatcgtaaattccataacgatcgtattaatcggtttaaaaactatttttcatgggatgccgaataa

SEQ ID NO: 239964 - DNA, 228 bp, Klebsiella pneumoniae
atgacagatgccaacgggcttcctctgtcgctggtcgtcgccgcagcgaacacgtatgacatcaaactggttgcggatacattcaaaaccctccagacgggtcatacgggacaaaaactcagactctgcctggaaaaagattacgaagcaggccggctgagtcgccgcgtcgagccgcatatccagtcccgtaatgagggacacaatagtttcaaagcctatcgttag

SEQ ID NO: 239965 - DNA, 186 bp, Klebsiella pneumoniae
atgataaaagactacctgatcgtgttctacctgacgacaattgctacctggccagtcacgctgaccctgattggtctctctgcaggagtgtttctcaatgcgaagtgcagggggccgggtcttttccctatcattccgttcatgctggtgactgttgctgtatggcagtgtgagcgtttcacgtag

SEQ ID NO: 239966 - DNA, 1038 bp, Klebsiella pneumoniae
atgctatgttcagaatgttttaaagatgaagggttaagattattagcggataaaataggttttttatgcaacgataagtgtgagaactgtcattctcattcaggacataaattagataaagaaagattaatatatttagcagaccgtttttatcgagcaggcactttacagcgatttgattacggagctgctcctgcgattacattcaatgagatgcaaaaaacctcggtaaattttgatgaaatccttaatgaagatactaaactactttcattacatacaggcatgggtttttttcattacggcccacggtattggatgtttggcgaagttgaacctttaaaagcattacaaaatgaaaccactatagaaaccatgctttctacaattattgatgcctattcagaaaccaaatatgataaaaatacaaagttttatagacttagaaaaaaccctgagaatcctgaaattgaaagccagtacgatactccccctaaagcattcggagagggacgcttagattctgtcgatatgcctgttatgtacgcctcatttgatttggaagtctgtatacatgaatgcagggtgacggcagatgatgaattgtatttggcaaccttgagacccaaaaaacaactaagactgatagacttctctcagattttagaagaagaaaatgtcactgagttcgagagcatcgatatggcagtgttcatgcttttcatggctcgagataattcttacccaatattgagaaggttaagtcaaaaggtatatgaaagaggatatgatggtttaatttatccatcttactttagcatgctgcattctggctctgagccatttgaaacaacatttggtttatctcataggaggatcgcgtggtataaggagcatgaagaacataaagtccacaagaacctggctatatttggaagaccaataagtgatgaaaaagtggtaatagaaagaataaacaagctatttataaggcaggtaaaatatgaagtggaatttggaccagtgacttataattaa

SEQ ID NO: 239967 - DNA, 198 bp, Klebsiella pneumoniae
atgatggcggcgccccgcatccctccgcagatgataggtatcattcccaacaatacaggcggctgtagtgatgttgaaaaggccagtcgcatatttgtccacaatgaacggataccgctacagaaacgtctgtgggtgcttaacgactggctaggagagaacattataaaattttctaaaaatactttggttgaatag

SEQ ID NO: 239968 - DNA, 720 bp, Klebsiella pneumoniae
atgaaactgaataaggtgacctcatccggtcagggcctcgatcaacctgaagccagccagaatgacattctaataaattataaatccgagccgcgcattgattctcgagtcatttcggagcgggccggaatacagcatcaaagcctaggcgcgacgattaaatcgcaccatgacaaattccgtgagttgggagcgctgccccgtcagtctctcaaggaattacccgatttgaaatcgggaaaagccggtcgcaaacgtgggcgtcccgagatcagctatctgctgaatgagccccaactcgactatttgctgcgaatcattcgtgggcgtgatcctgagcgtgttaaccagctcaagctggatgtcactaaggcattcaccggtcgtcgcgccacccagcctgtacgccgggaatatctgcccggttatcatgaaagccgtaatggcttaaaagcactgggggcgcagcgacaccactacatcaatctggcacgtgctgaaaaccgcgttgctggcctgtcagatggtaaacgcggctccgctgatgcgcagcagctaggtgtactgatcgttatgcagaaaattgagcaggccgcatttcaggaagcgattaatagcggcatgacaccgacagatgcggtgagggaggtagctaagcgcatggaggcattcgccagtcttatgagcggcaacgccattctgggggtaggtcatgcgtaa

SEQ ID NO: 239969 - DNA, 198 bp, Klebsiella pneumoniae
atgtctctaaagtttatccgtctttccgaagtgcaacgtcgcacaggctatagcaaggcctggctttaccgtcttatgagtcaaaaaaagtttccatcctccgtgaaaatcggctcccgttctatcgcattcattgagagtgaaattgatgaatggattaatcagcgcatagctgaatcgcgtggtgaggtggggtaa

SEQ ID NO: 239970 - DNA, 933 bp, Klebsiella pneumoniae
atgttgaatacaggttcgttaaaaaattgccataaggttatatcgactatatgtcgaaaggaattattatgggtgccaaaaagaaatttatgtacccaattaagcttttatgatggtagaacgcctataccccctgaggcagtacatggcctgattaaaacacatgatgattttcatgagtatttgtctgtcattgatcaaggtattactgaatacctacccaaagaaagtttagtttcctgtaatgatgtatggaatgctattcgcgcagataaatatattaaacaatctttaactaaatctaatattccatttgaaatcgcaattgaaccagtcagatacgtcaagtatagaattttagctgggcgtcttaaaagctcagagaataatcggatgtatgattactggaaagaactctatgactttagtaaagatgaaattgatagttttaatcatgcttaccttcgttttcatgaacggttaattgcaatcatgtatggctacatttctggagagcttcgtattgcatatgccaatggtgctgattccattagtaaatataaaatattgttgaagcagttggctgaaatagagagtgagtttgtttttaagtatgtatttgatgggagtagaaaactaatcaccgatctggagtgggatttaatgattgctgataatgtgtctgaatttatagtgacaaacagaaatgatgaaacactatctgaacgcgctcttgttactgagctccttaaagtttttatggagtatggcgaaggaaattgcgtatcggctgtttatcgatttactcgttcagcattcatagaaaacgacattgaaaggaaaactatccagcgatgctgggaatccttatgcaaagcggtggaagcaagagattctgcaagatctgcatatgttcaagaagccaagaggtag

SEQ ID NO: 239971 - DNA, 588 bp, Klebsiella pneumoniae
ttgagtctacaaatcaactttacagaaggtggcggagaagtacttgacagggttattgaggcttacggatttaaaacaaaaatagcgcttgctgatcatctcggcatcgcaagtagtagcctagccatgcgttaccgtcgcgattatttcccttctgacattgttgtccggtgcatggctgagacaggtgcaactttggaatggttagccactggtttcggctcaaaatttgataccgatgaaatcgatatgcttcgaatccccagacaaaagatcgtcgacggtcttttatatgactccgaccatttgaagttagacaaagcaacaattttgcctggcagaccttctccctcgaagccaaaatgtgtaattgagggctccgttacctacgttgtggaatgcgattttcaagagatttttgatggggagtggctggtagagattgaaggcaaaaccagcatcaaatcacttacaagaatccctgttaaaagagtcagagtcagcggaaatggcagcgctgcttttgattgcggactcgatgatattcgcgtaatcggaagagttattttaaccatagcaaatggataa

SEQ ID NO: 239972 - DNA, 195 bp, Klebsiella pneumoniae
gtggataaagatttaagcgagcacgtaatgattgaacgggtcgaaatgattgcgcgtttaacaactgagggggcctgccaagaaagggaccgtgaaatagcacttggactgatagctgaacttgctaaaggcaacttaatgaaaagcagccatttttctattgttttttccgtgaaatcctttgaaaatcaatga

SEQ ID NO: 239973 - DNA, 939 bp, Klebsiella pneumoniae
atgccaactgtagtatcgctgttttcagggtgtggtggttcagatgcaggcgtgttaaacgctggttttgacgtgcttatggctaatgacatattgccttacgcccgtgatgtgtatcttgctaaccatccagagactgactatgtattaggcgatgtcggtggcattacctcttttccaagtgctgatctcctcgtagggtgctacccatgccaagggtttagtcaaggaggagtgcggaaagcagatcgaaaaattaacactttatatcttgagtttgcgcgagcactgagagttattaagccaaaggctttcattgttgaaaatgtatcaggaatggtgagaaggaactttgaacatttattacaagaccagtttaaagttttcactgaggctgggtataaggttaaatcacaaatattaaatgcctcacattttggggttgcacaaaatcgtaagcgaatctttattgttggtatacacgagagtttcggaactgaatatacgttcccacaagcatccttcggagaaggtctgaagccatatactacaattaaggatgcaattggtgacatgcctgaatggccgacgggtgagttttatgatattgattttcattggtattatatgtcgcgaaatcgccgtcaaggatgggatcaagtatccaaaacgattgtcgctaatcccagacacatgcctctccatccgattagtcctgaattagagaaattaggacccgatgcatggcgtttcgttaatgacaatcccgctcgacgttttagttaccgtgaagcggctcgtttgcagggatttggagacattatgttccctgatacagagcgagcatctatgaatatgaagtatactgtaattgggaatgcggtaccgcctcccttgtttgaggcggtagcaaaagcattaccagatatatgggattag

SEQ ID NO: 239974 - DNA, 930 bp, Klebsiella pneumoniae
atgttagaaaatttggattcattgccagataatgaaccatatttgtgggctgattatctggaaatttgggctacagtaagtattgacaagtgctttagccggggagagcttgccagtatttgtgtggcgcaagccaagccaaaaaacagagctttttcagatgagaaatggcaatgggctatcacttttattgatacccgaatcgctctttttggagataattatcctttttacctatcgaaagatagagatactatttatctgaaatgtgatgattatcgtcaatttaacgaaaatgaaagactttatatcgcattattgttttgttcaaacgttaaatatattaagtctaaaaaaaggcatattctaactggtgcctttgaaaaaattagtttacctgtattcaaaagtcttatgcctgtaggtgccatagtagcaccttgctgggccagtgcaggaaacgcgggtgtttacactgggttactgtacaataaacttactcggatagcgcaagatatcagatgtacagcaaacttcaccatcaatcattttaaagaaggagatcgtggagatggtggtattgatatgttggcttggcatgatatggccgataatcgcccatccattccgatagcatttgctcagtgtggctgttctaaagatgagtgggtggctaaacaattggaagcctccccaacaaagatgcaccatatgctgccagttattcatccttgggcaaattactactttttaccacaagatctgcgatggcataacgttgaatgggctcatcaaagcgatattggtgcggcgatatttgtcgaccgtttgcgtttgataaatcttaccacgcgaaatgatgagatctctcatcgccggcatatcagatttgttccatatttgataagtcggcagatgagaatcagctag

SEQ ID NO: 239975 - DNA, 1080 bp, Klebsiella pneumoniae
atgtccaacgaaatccaatacatcgagaccggaaaacttgagttcgatcctgaaaacccacgtttttatagattgaatgaaagggcggggtcagacgatgcagtcatagaagaaatgcttgatgatgagagcgtgcaagatctgatgctttcaatcggggagcaagactatttcccaggtgagcctcttttagtagttaagaaaggcaagaaatttgttgttgtcgagggtaaccgtagactagcggccgttaagcttcttaatggtgacttgaaaccgcctaagaagaaagaaaagggtgttcagcttattttggatgaagctgactacaaaccaagaaaccttccgtgcctggtttacaagaatcgtgaagatgtattgaggtatatcggctatcgccatataacaggagtcaaggagtgggatgctctgtcaaaggcaaagtatcttaaagaattaagtgatacgttctatcaaggtaaggaccatgatgttttgttcaaatctttagcgaaggagattggcagcaagccatattatgtcggtttgctattaacttctttgaatctttatgaacaagctttagataaagatttttttgatttaccaatgaacgaaaaggatgttgatttttcgtatataaccacggcgttaggttataaaaatattactgactggcttggtctcgaagatcgcaatgatttagatgctaaaaatctagatatcgaaaatttaaataaattgtttgcttggttctttgttcgagatcaacagggtgaaaccattattggtgaaagccgcggaatcaaaaagttaaataagatagtggcatcccatgccgctgtcgacaacttgattaaatcaaaaaacatagaggaagcttatctttatacaaacggtcaagaagaagctttggaagaagcccttaatttagccgagtcaagtttaaaggttgtttgggatatgcttctgaagaataataaattcactgagagacaagagtctcatgctaatgaaatatcttctatagcgagaaaaataaaaaggcacattgaagatgctagagaggatgaaaggtga

SEQ ID NO: 239976 - DNA, 597 bp, Klebsiella pneumoniae
atgaataactcgttgatggcgacagggtcgtcggtgctggagcaacgagccgcagcggcatgcgcctctatcagcgatttatccgtaccgctacgcgatttgtggaacccgtggaaatgcccggcaaaatttctgccgtatctggcgtgggcattttctgttgatggctgggatgaaagctggagtgagctggaaaagcgaacggttatcagtgagtcattccggctacatcagcggaaggggacaatagctgcaatccgccacgtagttgaaaaaatgggttactccatgtctatcgaggaatggtggcatgttgcagacccggcggggacatttcggcttgaggtcgatattaacgatattgggataaccaccagaattctggatgagttaacacggttgattaacgacacaaagccggttagtcgtcacatggcgcaattcaatatatccacaaaagtgcacggaaatattcatgtcggttcaacgctgtgtagtggcgacactattagtatttatcctgccgggtatgaagccgcagacaatattatttacaacggcgtgattttccacgacggcaattttaactacgggtaa

SEQ ID NO: 239977 - DNA, 195 bp, Klebsiella pneumoniae
atgggtactaaaaaatttattgaactggaggtgggggacgttatcgtccctgttccgggaatggaaataacagtgacgtctgcgcccgtcctgaccaaaacagatgatggtgaaaattacaccctgaaagggaggcggaatggtgatgaagttggtctggcggggttctccagttcagctattgaagtcaaataa

SEQ ID NO: 239978 - DNA, 1158 bp, Klebsiella pneumoniae
atgagcaaaatctttaaatcgttaattacggttgccggtcgggaaaaaattggcgcagcaatcgttagtggagataaggtcgttttctcacaaatgtctgtaggcgatggtggcggtagtgcaaccactcctgacgaaaatcagacttcattgattaacgagcgtttccggactcagctgaatagcctgaagttgtccgatactgaaaatattatcattgctgagatgattattccgccagaggtgggcgggtttactatccgggaagccgcgctgtttgatgatgctggagtgtgcatggcagttgccaatgtcccggaaacctataagcccgccctggcggaaggttcagggcgttttaccattctccgcatctggctggcagtcagcagcaccgaagccgttgagctggttgttgatccgggcattgtgctggcaacggtggaggatgtgattaacgccggtaatgagattaaagattataccgatgagcaactaagtgaacatgcaggatcgcgcgatcaccctgacgccacactggaagaaaaaggctttacccaactgagcaatgatattgacagcagcaatcaggataaagccgcaaccccccttgcggtaaagcgtgccatagaatcagccatacgcgaggcatgggagctggataatcctgttggcaccgtaaaattttacgcgcagaacgttgaccctaatgagcgctacccgtggacggaatggatctataccggggaagataaaaccattcgtatcggtaaagccagcggcgcaaacgtcggcgagaccggcggcagcgataccgtcatgctccagcagtccaacctgcctgccgtgcagatcagcgtcactggcgagaccagcgaacagccagggcaaacgctgaccacaaaacccgccggtaaacacaaacatggcggcgtgccgagccgggataacccgtgggagattggcggtgatatcagccagcgttttaacccagcaaacctgggcgaaaccgacgaggaggcggaccatgagcatgatattgatatcccaccgcatcaccatgacgtcaccggtaaaaccgacaacctcggcgagggtaaatcgttcagcgtggtggaagcgcacaccctgctgatgtgctggagccgcgtagcctga

SEQ ID NO: 239979 - DNA, 318 bp, Klebsiella pneumoniae
atgggcttcccgtcaccggctgcggattacattgaaactgctttgacagtgaactctctgtgcaacatcacagcaaactcgcgagttatctcaaccgaccgtgggtatgttgttctggacttatcgctgaaggtaaagcaggggagtattctgcttatacgttcggctggcgaacttcagtttgtgaagctaatgggtagatcgttcattacggtagaaggagaatcgattgaaggagatgccatggatgaggttgaagtgttcggagttgcaacgcacgtgatcaacgatatgaggcaggatgatagtcctgtttga

SEQ ID NO: 239980 - DNA, 873 bp, Klebsiella pneumoniae
atggaaagaggggttgttgctataccagccatattaaataagttagatggaggattttttgtccaaagaggaattctacctgaggaaataaactactacgcactgtactgggattacatatcaataccaaccaataacttcatacattttggcgtttggatggagaatgatttaatagactgcggggttttaaatagaccacaacttcacatttctcgtatgactagtgctgaatatccgcgcattcatatcaaatcgcaatttaaaacattagataagttaaggaaagataggtctgacattgattggagaattcatcaaataagtgatgaggttttaatgcctgagttaccaacttcgttaatgtcgactaatgattgtgttagattgagtcttgataggttgcttcccgtgccatcaagagaagttcatatatgtgatattttagagtttaagttaaggcgtaagccagagcttatggcacttcatgcatactgtgacgatttatacttagaggttattaattcggcagatcagaacttattgcatgctaaaaatttcgagaaattaaaattggctatagaggatttagataaggttagctctgagaggtggcaatttccaattaaatttaacttggatgtatcaccagaatttgatatttcacaatctagagcaggcattgcaacaatagtttcagccttaaattctccaaatcctgcggaaactattggagcaggtgctgtaatttcagttctagagggttttataaagataaaggctgagattcgtagcttcaggaagtcagtaagaaaaaacaatgactttatctatctttcaaatgctatcaaagaaaatattataaagaggtga

SEQ ID NO: 239981 - DNA, 201 bp, Klebsiella pneumoniae
atggctactaaaaaatttattgaactggaggtcggggacgttatcgtccccgttccgggaatggaaatcactgtaactgaagcaccagtgctaactaaaacagatgatagtgaaaactataccttaaaaggactacgggatggaaatgaagtcggtctggcaggattccatgattcggtaatagtaaaatctggcatttaa

SEQ ID NO: 239982 - DNA, 2235 bp, Klebsiella pneumoniae
atgagcacatataaaaccggcaacccgttgggttcggcggctgtaaaggatttatttgataacgccgagaacctcgactttgcacttaacagcctgaccgccttaatgtggaccgatcgtctgggcaaaacgcgtcgctcgttcttcggaatggagtcggcatttgtcacgcagctcaccagccaggaaaatcggttcaataccttcatccaaagttcgggctatcagattgtcggtgattacactgccggcccgttgacgctaaccgagtataaccagctcattcgctataacaacgagttgtataaactcaccgcagcgatagatatcccgtttaccacggctggtaatactgacgaaacatggaccagtaccgacgctgcgtattttgtatctgtcggtgatgcagcgcttcgccaaaacctgggttcagacgaagaagggttgggtgctgatttagtcaacacggttcttgatatttctgtcggtaagtacatccaaaatgcatcggcgaggatctcagattacaaagtcacaaaaggcgctgaagcgactctggcatttgcaaaggcatttgctaaagcagttgaaactaccggcgttgtaattgtcgatgtgagttgtgttctgacgacagcagttgtgccagagggtgtgactgtaagaatttgcgactacgtaacggtaactcacccggataacgcaccggcgtccatgtttattttatcctccggctcggtaatcaagggaaataataaaaaaggtcgcctgaggggtaactccgcgaatcagtcatcgatacggcgctgtatcagcgctgtaggcgtgacggatgccggtgttgatggcatcgatattcgcgatttcaacagctacggtgcgtattttgagaactgcgaagataccttcagcagaaggtcaaccatacgtgatattactggcggcccggtcgaaacagccgcaggccagtacattaccaactgcattggtcacgagtccgaatataacgatatccgggatactgacagcaatggcatcaaattccgggctgatgccagcgggctgacgcgcggctgtagttcgtttcacgacaaagtataccgggctgggttcattggcattgcgcacagcaagatacaggaccacacaaccagccatgcgtattgcgttgattgcgttgataacggcatggacatgaacggttgtcagaatgtcacattcattcacagcacatgcgtggggtgccaggatggtttctatctgggtgaaaacggtattaataactgccatgttatcagttgctctgcgcgaaactgtaaacgtgctggcgttggcagtcttggcgcgcttgtgatgtgctcagttgttaatacaaatattgatggctgcggatctggtatttactgctctggttttaacgtgttcaaaatacgcggcggcatgattatgaactgcgttaaaagagtctacgttgataacgaggataaaaataacccgaacaaaatgagtaccggtatcgggattgatattcagtctgacctttccgggctacctgcctgtaccacgcctgatattgaaggggtgacgttcctgaataatgcagggcatgacatcgcttttgggggtggccggctccagtcgatcgccgttactgccggggggagtggctataccactgcgccaacggtcacgatttcaggtggtggcggcactggtgctttagcgacagctaccgtatccggtggcgcagtgacaaagatatctgtgctgtataagggctttggctataccactgcgccaactattgctatctcaggtggtggcggcagtggtgctacggcgaccgggacagtgagcagcggaggcgtaataggtcagctccaacttgggcgctgctcattcaaggacagtagtggagacggcaaaatatactacggtaccgcaaccctcgcagacagccagataagtaacagcatggggtatatcgtctccagaacgcagacgtacaatctggctggcgatggtactacagttgagtttacgctttcactgccagaggaggttgctgacgtaaattaccgcattgtctcggtggctcccgactggctgacaacggtcagatatttggataatacaaagggaacctcatatttcggcattacctttggcagcgctccgccatccggaacacgtcgcctgaatgtaacttttgaacgactgcgcccggcccactga

SEQ ID NO: 239983 - DNA, 177 bp, Klebsiella pneumoniae
atgggctataccattcagtataattttaagtcccttcctttgaaactcattcccaacaaaaataaatatttttttatcaaatggtattccaagcctttgtttcaaatctctattcaactgttcaggcttaaatttactaacatctacaccgttgggtataactttaatacgttctga

SEQ ID NO: 239984 - DNA, 579 bp, Klebsiella pneumoniae
gtgctggcctatgcggaagatccgtgcggcgccgaacagggcttctccggccgcgaagtgatggccgagttccgccgcgcgacgggcctgccgaccgccaccaatatgatcgccaccgactggcggcagatggggcataccttgtccctgcagtcagtggatatcccgctggcggacccgcacttctggaccatgcaggggtcggtgcgcgtagcgcagatgtgccatgagttcggcctgacctggggttcgcactctaataatcacttcgacgtgtcgctggcgatgttcacccacgtcgcggcagcggcgccgggcaagatcaccgctatcgatacccactggatctggcaggagggcaaccagcgtctgaccaaacaaccttttgaaatcaaaggcggcatggtgcaggtaccgagtaccccgggcctgggggttgagctggatatggaccgcgtgatgcaggcaaatgagctatataagaaacatggtcttggcgcccgcgacgatgcgatggcgatgcagtatctgatcccgggctggacctttgacaacaagcgtccatgcatggtgcgctaa

SEQ ID NO: 239985 - DNA, 708 bp, Klebsiella pneumoniae
atgacgactttctcttcaacgcccgttgtcaccaccatgcaggtgatcccggttgccggccatgacagcatgctgatgaacctgagcggcgcgcacgccccgtacttcacccgcaatatcgtaattatcaaagataacgccggccataccggcgtcggtgaaatcccgggcggtgaaaaaattcgccagaccctggaggatgccattccgctggtggtgggcaaaacgctgggcgagtataaaaacgtgctgggcgcggtgcgcaatcagtttgccgaccgcgacgccgggggccgcggcctgcagacctttgacctgcgcaccaccattcacgtggtgaccggcatcgaagcggcactgctggatctgctgggccagcaccttggggtcaacgtcgcctcgctgctaggcgatggccagcagcgcagcgaagtcgaaatgctgggctatctgttctttgtcggtaatcgccatgcgacgccgctggcctatcagagccagccggatgagcagtgcgagtggtatcgcctgcgccatgaagaggcgatgacgccggatgcggtggtccgcctggcggaagcggcgtatgaaaaatatggtttcaacgactttaagctgaagggcggcgtgctggccggttttgaagaagccgaagcgcttcccgaatgctcgcgtcactctcgacccgaatggcgcctggctgcttga

SEQ ID NO: 239986 - DNA, 3666 bp, Klebsiella pneumoniae
atgaatacgtcaaatatcaaaaaatacgccccggtggcacgtaaacagttccgcgatgcggtcatgcaaaaactgactacgctgggtattgaggccgataaaaagggcaacctgcaaattgcgcaagcaaccgatcttggcgacagcgtgcgttatggtcagttctcgttggataagcaactggcgtcacgccgtgagcgtctggtcaagcgagcagataagcagggctacgacgtgctggtggaacacattgcttacacctggtttaaccgcttctgcgctattcgctatatggagctgcatggctatcttgatcacggtttccgtatgctgtctcacccgacgctggaagggggttttgaggttctggatcatgtgccggaagtggctgatgctctggggctggacaaagcgcgtctggtggagatgaagctggcgggcgatcgtgacgaagagctgtaccgtgaactgttgcttgcccagtgccatgctcttcatggcgcgatgcctttcctgttcgaagctgttaatgatgaaattgagttagtgctgccggataacctgactcgcaccgactccattctgcgtgggctggtggacattattcctgaagaagactgggagcaggtcgaagtgatcggctggctgtatcagttttacatctccgagaaaaaagacgatgtgatcggcaaggtggtaaagagcgaagatattcccgccgctactcagctgtttaccccgaactggattgtccagtacctggtgcagaactcggtgggccgccagtggctgcaaacctatccggactccagcctcaaaggcaaaatgccgtactacattgagccagcggagcaaacgccggaagtgcaggcgcagctggctgccatcactccatccagcattgaacccgaaagtatcaaggtgctggacccggcctgcggctccggccatatcctgaccgaagcctataacgtgctgaaggccatttacgaagagcgtggctaccgtacacgggatatcccgcagctgattctggaaaacaatctctttgggctggacattgatgaccgtgccgcacagctgtctggttttgcgatgctgatgctggcccgccaggacgatcgccgcattttgagtccaggccgtggcgttcgcttgaatattgtttccctgcaggaaagtaagctggatatcgctgagctgtggaccagactgaactaccaccagcaggtacagcgcggcagcatgggagatatgtttgcagaagggacggcactgaccaataccgacagcgcggaatataagctgctgatgcgtactttggcattgttcactagggcaaaaacgctgggatcactgattcaggtaccgcaggaagatgaaacggcgttaaaagtgcttctggatggactgtatcgcctggcggttgaaggtgataaccagcagaaagaggctgcggtagagctgatcccatatatccatcaggcgtggatcctggcgcagcgctatgatgcggtggtagcgaacccgccgtatatgggggggaaaggaatgaatggcgagctgaaagagttcgctaagaaacaattgcctgacagtaagtcagatttgtttgcgatgtttattgaacgtggctttggctggctcaaagatggcgcattcaattcgatggtgacaatgcaatcttggatgttcctttccagctatgaaaatatgcgtgcgaatatactggataaattcacgattgaaacgatggtacatatgggtaatggggtaatgaagattgcctttggcaccaatgcaactgtgtttagaaatgttcaaattccttcttatcagggcgcgtactcttatactgagaatgacaatattaatgatgaaggatatccaaaagagtttccagttaaaaatggtcgtttaaagactgcttctgccggtgatttcaaaaaaatacctggttccccaattgcttattgggtgggggaggatttcttaagttgcttcgagaagtttcctgccgttgaagagattgcaatgccaaaacaaggagctacaacctcagataataaccgttttcttaggttgtggtatgaggtggactttaaaaaaatgaatgtcaatgctgattctctcgaaattgcaaagaggtcacaaaaaaaatggtttccatataataaaggaggagaatatagaaagtggtatggcaattgtgattatgttataaattatgaaaatgatggaagtgaaataaaatctttccatgaaatcttgaatttgacaagtcctggtgggcgtttgaaaaatcaggattgctatttcaaaccacaagttagttggtcgaaaatatcctctggtgatttttgtgtgcgatattacccttccggctttatctttgatgttgcaggttcagcaatattcccaaaaaatgaagatgttattttttcattgtgtggcatgttaaattcaagaccagtcaagaaattccttgaagctctttcacctactttgaattatgaagcagagcatgttaaaaaactgccatgtgtatttgtggctaatgataagacctcagagctgatttcaatttcaaaagaagactggaatagccaagaaatatcgtggggttttaataaaaatagtttaattacacaactggaaataaataaaccgctaaggaatatttacattaaatatagagagtccttaaaggaagtgttgaaagattcaataaaaatagagcgggagttaaacgatgattttaaccaagcttacgctatcgaaaataaaaaacacgaattaaaattatcggaatgcactctgttattaaacccattttataggtatcaaatagaagatgaaaatgatgcttataatcgtttgcttgctgatcatattggcgaattaataagctatattattggctgccaaatgggccgctactcccttgaccgagaaggactaatttacgcccacgaaagcaacaaaggttttgcggagctagtcgccaaaggtgcgtacaaaaccttccctgccgaccaagacggcatcctgccgctgatggattcagactggtttgacgacgacgttaccgcccgcgtgaaagaattcattcgcatcgtctggggcgaagagcatctgcaggaaaaccttgatttcatcgctgaaagcctttgtttgtacgctatcaaaccgaaaaaaggcgagtcttcgctggatactattcgtcgctatctttccacccagttctggaaagatcatatgaaaatgtacaaaaaacgcccgatttactggctgttcagctctggtaaagagaaagcatttgagtgcctggtgtatctgcaccgttataatgaaggcacattgtcgcgtatgcgtaccgaatatgtagttccgctgctggcgcgctatcagggcaatatcgacctggtaaacgatcagcttaagagtgctgaatcgggaactgccaccacgcgcctgaaaaaagagctggatgggttgaccaaaaaattcaacgagctgcgcaattttgacgatcgcttgcgtcactatgctgatagacgtatcactattgatctggacgacggcgttaaggttaactacggcaaatttggcgatctgctggcggatgtgaaggccattaccggtagtgcacctgaggagatttga

SEQ ID NO: 239987 - DNA, 135 bp, Klebsiella pneumoniae
atgcactgctacactgtggaggacgcccggctcggggctacccagacactgacggaagtggcggaagcgctcgtcagtaatgttgatgctcccctgcgggcctacgctgcaaccatcccggtaaatcagaggtag

SEQ ID NO: 239988 - DNA, 606 bp, Klebsiella pneumoniae
atgtcagatgtaatgagtggttatattgaaatggctcaaggtgaattagcatatggagcaaaaaaaataaaatcaactaatgatattgactcacttaaagatgaggcggataggttaagattgcagtctggtatgtttaattcagtttttgttgttagtaatgatgctgttgttctggcgacttcgccagaatctcttgatttagttggtacccgcttgaattcaagtgccagcaaattggcgattgaggaaaagaaaccattcatatcttcaccgttcaaatcagttactgggaatttgattattttgttgtcacatcctatttatgataagaatggcaattacatagggcatgtcggtgggtctatatatctaaaaaaacatagtttatttagcgatgttttgagcaggcattttttcaagagcgacactgaaattagcattgttagtgatgatggaactgtgatctttaataacgataacagtgctgttggtcggcccatggttatgtctgatgatttgaaatcaaagttaacggagtctgatagaggtgagggggaatttttttttcggggaatagatatcttctgggttatgctcatatga

SEQ ID NO: 239989 - DNA, 522 bp, Klebsiella pneumoniae
atgagtgatttgcagaataaactcgtatttagtgaaagccctcgagttgagcttggttctaattttttcatcaacgtcccagtaatacttcagtataaagacaccccacttattagtgttgagagtgcggttgatgctagtttcactaccagcatccctatctatcacaacgatggaacatacctggccctggctaaaggaacgcagctctaccgtactgaagaaggtagaaaggcaggagtgactctccggtatgaagataaggtaactgtttgtcttcttaacgggaaagaggtattcgagctcagaagacaaagcgcagctgcactaaaagcagaggctgagctttatgttcctgatggaaagctaataagttatcgaggatcctcgccaaagttgttcagcacggaaaacaatcaactagctatacgcggtttagtgatgtccggatcaacattcagcgggtgtaaaatagggatattgctagatgaaaacagcatagcgattggtgtaaatccgtag

SEQ ID NO: 239990 - DNA, 924 bp, Klebsiella pneumoniae
atgagtccattttcccgtttcgcgcactatttcatcgccgtggcccgctgcggcagcttgcgccgggccgccgagcagctgcatatctccgcctcggcaattaaccgccagatcctgcaggccgaggaggccttcggtaccccgctgttcgagcgcctgccggagggactgcggatgaccaccgccggtgagttgctgtatgacaacctgctgcgctggcaaaaggagtttcgccagacgcggcagaaattcgatgagctgcaggggatgaagcgcggaagcgttagcgttggcatggtgcaggcgctggcggaagggggtttcgccgccgcgctggcggagatcatcgccagctggccgtggctggagctggatctgcaggtggctgacagccacaccgtcagccagaaagtgcgtcaggcggacctggacgtcggcctgatcctcgatccgcaggggcaggctggactcagcgtgctggtctttgccgaactggaggtggggattgtgatgcgtccggaccatcccctggcgggggcgaaggcgctgtctttgggcgagctcagcctggagcggcatatcgtgcccggcgcgccgctgatcgtccatgagcgggtggcgctcctctatcgccaccatgactttgcgccggagaataccatcagctgcaatgatatccggcttatcaagtcgttggtgctacgcggcagcggcgtgacgctccttagcctgctcgacgtgctggacgaggtccagcgtggacagctggcctttgtcccgctgcgcagtacgctgttgcgaccgctgaccctggcgctgtgtactgcgccctcgcgtcagctttcgcggcccgcgcaaatggccattcagacgctgagtgcggtgatcgaatccatggcgacggtcagcccagcggcccgctga

SEQ ID NO: 239991 - DNA, 306 bp, Klebsiella pneumoniae; identical to SEQ ID NO: 136289

SEQ ID NO: 239992 - DNA, 336 bp, Klebsiella pneumoniae
atgaaaggtattgttctggccggcggctccggcacgcgtttatatccgatcacccagggcgtctccaagcagctgctgccgatctatgacaaaccgatgattttctacccggtgtccgtcctgatgctggcgggcattcgcgacatcctgatcatctccaccccggacgatatgccttccttccagcgcctgctgggtgacggatcgcagttcggggtgaacttcagctacgccatccagccgtcgccggacggcctggcgcaggcctttatcattggtgagaagttcatcggcaacgatgcctgcgccctggtgctgggggataatatctactaa

SEQ ID NO: 239993 - DNA, 564 bp, Klebsiella pneumoniae
atgcatcatgaccttaaacaccgtattcaggcgatgcgggacaaactggaagggcgcgcccctgtcgctgaaattcagggtagctcgcaactttttgtcaccccctccccggaatgtcgccggctggttgagctggctgatgtccgggaaaccgatcgcatactggaacccagtgccggaacgggcgccatactgcaggcgatcagggatgcagtcccccgggcgaagtgtgacgccgtggagctgcacgccgggttagcccgtcacctgcaggcgcatttcccggaggtccggatctggtgcggagattttctcgaatatcatccggagcgccggtatacccgaattatcatgaatccgccgtttaatcgcggtgatgatatccggcatatccggcgggcattaactctgcttgagcctggtgggattctgacgggcatatgtctggacgggccgcgtcagcaaaaggcgctggagtccctggcggacgtctgggagccgttgccacggggaacattcacgtatacccaggtagcgaccgccattctcagaataaccgtctga

SEQ ID NO: 239994 - DNA, 399 bp, Klebsiella pneumoniae
atgataaatacaaatgttattctaaccagagaacaaaaatccgcgattgcagaagcattagacgtatcattagacgatttagaagaacttagaattaaagccagtaataaaaggaaaacctcctttaaggatgatttttccatgatctttaaaacaaatatcggcactctggctttaattctaagttcttctaaatcgtctaatgatacgtctcatcttttttcaatcattgattatggtaatattcttgttaatttctctcaatcaagggtagcaaaagatttaggactacaaaaatctaatgtttcaagagcattcaaagaattattcgaaaagaaaatattgattcgaaatgcagaagacgatcatgtttatttgaactctaatttatgtgtataa

SEQ ID NO: 239995 - DNA, 1035 bp, Klebsiella pneumoniae
atggcaagaaagaaaatttgggcatacgccatcgataacaaagaggaatacattaaaaataaagaaacaaataaagagcgattattctttatttgggaggttattaagatgcgaaaagaaaaccctaaagagctttctttgctaacctttatgagcacacaatctaacaaggataaacgagcagaattaacaccagttaaaaaaacaaaaaccgcctttttcagatataaatctgattcaacaacatttaccgaaagccatgattctgattcagaatacatatctcatgaaactgcaattctagttttatcggaaatgaaaaaaataaattttcaagataaagataaaaattatgagattgaattcgacaatataaaaaaagacgacttacaaatcaaattcgaagatggatcaatttattatcctgatctagtaggtttttttagcaaaccaatagaattagccaggaaatggggggggaaagtagccattgaagttaaagtaactcacaaatgcagttatgaaaaaataaaagattttcaagaccataacatacccataattgaagtttcattatcggataagatgaggctcaattcagaattaaacaatactgatatcgatgaagatgaaatggaacgatattataactttttaaagagcaaatttaataacattgtttatatgaaaatattatctgaccctataatgttaaatgagcataaatttataattaacaaaaaaaatgaaacgattattaaggctataaaagagattgaatcatttaaaggccagctggcaaaagaaactgaaaaaaaagaattatttgaatcaacaataaaagaaatgaaacaggaaatatttaagctaaaagaatcaatcgataatacaaaacatcttaataattctttgctaacgcaattagataatgaaaaaaacagagctaattcattcaatgaaaaaattaatgaattaaaactcaaggattatgaaagcatgaactttctagagcgttttaaacgacttttcaggtaa

SEQ ID NO: 239996 - DNA, 405 bp, Klebsiella pneumoniae
  misc_feature (329)..(338): n is a, c, g, or t
atgtacaataaatacttttccactgagcacaatatcagttcggctggcccccaggaaaactacgcatggactatagcgaaatttgccatacgccttgctgaatttgaggccagaactgagcgccagttacgattaacgtcgctcagtaacagtgatatgaaaatggaactggatttcttattttccggttccaacgtattgatgacaaaaggtgatgccacccagtatctttacaaagaacagggttacgatgaaacgatttcatctatacatcagatgcttgaagttattgataatgagatgaaaaaaaacaaaccaaattataacannnnnnnnnnctgtctcagaaattgttacatcaacaccctgccaaacaaacttactgaacttgaccgggctgtttag

SEQ ID NO: 239997 - DNA, 321 bp, Klebsiella pneumoniae
  misc_feature (245)..(254): n is a, c, g, or t
atgaaaggttctcgtcttaaagtgcacgccttgaacgactactgggtagaaatcccaatgagtgatgtagtgaactacaacatactactggccagtaaaattgatggtaaagcctttagcattcgtgatttcggtccttactttgtcatctacccggttgacgaaagacgagaagaactaaacagcccggtcaagttcagtaagtttgtttggcagggtgttgatgtaacaatttctgagacagnnnnnnnnnntgttataatttggtttgttttttttcatctcattatcaataacttcaagcatctgatgtatagatga

SEQ ID NO: 239998 - DNA, 123 bp, Klebsiella pneumoniae; identical to SEQ ID NO: 107022

SEQ ID NO: 239999 - DNA, 1368 bp, Klebsiella pneumoniae
atgaagaaacagactttgctgttgagtgcgttagcgttaagcattgggttatcgttgtcggtcctgcctccggcagcggcatccttaccgactcaggtgcccggccagggcgcgttaccaagcctggcgccgatgctggaaaaggttctgccggcggtggttagcgtacaggtggaaggcactgcctcgccgacgctcaatatgccggaagagctgaaaaaatattttggcgataacgccccgcaggagcaggcgcagccgtttgaagggctcggctccggcgttatcatcgacgcggcgaaaggctatgtgctgaccaataaccacgtcatcaatcaggcgcagaagatcagcgtccagctgaacgatggccgtgagttcgatgccaaactggtcgggagcgatgaacagagcgatatcgctctgctgcagctgattaagccagaccacctgacgcaaatcgccattgctgactctgataaacttcgcgtcggcgacttcgccgtcgccgtcggcaacccgttcggccttggccagaccgccacatccggcattatctctgcccttggccgcagcggcttgaaccttgaagggctggagaatttcattcagaccgacgcctcgattaaccgcggcaactccggcggcgcgctgctgaacctcaacggcgagcttatcgggatcaacaccgcgatcctcgcgccgggcggcggcagcatcggcatcggctttgccattccaagcaatatggcgaaaaccctcgccgaccagcttattcagtttggcgaaatcaagcgcggcctgttgggcattaaaggcatggaaatgagcgccgacatcgccaaagcgatgaatctcaacgttcagcgcggcgccttcgtcagtgaagtcctgccaaactccggctccgccaaagcggggattaaatccggggacgtcatcgtgagtctgaacggcaaaccgctgaacagtttcgccgaactgcgttcgcggatcgccaccaccgaaccgggtaccaaggtcaaactgggcctgctgcgcgacggaaagccggtcgatgtcgaagtgaccctggataagagcacctcctcaaccgccagcgcggaactgattatcccggcgctgcagggggcctcgttcagcgacggccagatgaaagatggcaccaaaggagtggtgatcgataatgtggataaaggcagcgccgccgcccaggtcggtctgcataaggatgacattatcattggccttaaccggcagcgtattcactcgattgccgaactgcgcaaagcgctcgaaggcaaaccgccggtcatcgccctgaacgtgatccgcggcaacgaaagcatctatctgctgctgcgctga

SEQ ID NO: 240000 - DNA, 366 bp, Klebsiella pneumoniae; identical to SEQ ID NO: 236143

SEQ ID NO: 240001 - DNA, 921 bp, Klebsiella pneumoniae
  misc_feature (890)..(899): n is a, c, g, or t
atggtaaacctggttattgtttctcatagcgcccggctgggcgaaggtgtcggagaactggcccggcagatgttaatcaacgatggctgcaaactggcgatcgccgccgggatcgacgatcccgacagcccgatcggcaccgatccgcttaaagtcatggaggcgatcgaatccgtggccgataccgatcacgtgctggtgatgatggatatcggcagcgcgttgctcagcgccgaaaccgccctcgatctgctcgatccggcgattgccgcgaaggtgcgactgtgcgccgcgccgctggtggaagggacgctggcggccaccgtcagcgctgcctccggcgccgggatcgacaaggtgatcgccgacgccatgagcgccctggaggccaagcgggttcagctgggtttaccttcgccaacttctgacgccgcgccggcgccgatgcttgccgacgacggcgacacaaaatcggtgtcagtcattattaacaatcataacggcctgcacgtgcgtccggcgtcgaagctggtcgccgcgctggcgggctttaacgccgatctgctgctggagaaaaacgggaagtgcgtcaaaccggacagcctcaaccaaatcgcgctattgcaggtccgccgcaacgataagctgcgcctgctggcccgcggtccggatgccgacgcggcgctggaggcgtttcaggcgctggccgccgataacttcggtgaatcgcctgcggcgcaaccggcagcggctccggcaacgcccgagcgcgtcgaaggcgctgccctgcgctatccgctggccctgatccagccgctccgcccggctgccgccgatgccgcccgcgagcagcagcgcctgcgccaggccattgaccagacgctggcggnnnnnnnnnnctggcggatcttatcgccctga

SEQ ID NO: 240002 - DNA, 780 bp, Klebsiella pneumoniae; identical to SEQ ID NO: 134556

SEQ ID NO: 240003 - DNA, 753 bp, Klebsiella pneumoniae
  misc_feature (704)..(713): n is a, c, g, or t
atggcgttcgattggggatactttttttcattgtttagcattggggcattctggcaggcgtgcgtgactgtcatcgtaatcagcaccttgtcctgggggatcggcctggtggtcggttttctgttagcctgcgcgaagctctcggcgccgcgctgggtcaagatccccgtcgaactctatatctggttttttcgcagcgtgccgctgatggtgctgctggtgtttgtctacaacctgccgcagctgtttccggtgacccagccgctgctcggggtgccgtttatcgccgggctggtgtcgatgaccgtcaccgaggcggcctatatggcggagatccaccgcggcgggctgctgtcggtggccaaggggcagagcgaggcaggccatgcgctgagcttcagctttatcggcatccagcggctgatcgtgatccctcaggcgtttcgcatctcgctaccgacgctgatcaatgaatacatcaccatcattaagctgagctcgattctgtcggtggtctccttacccgagctgctgctcaccggccagcgcttgtatgcgcagaatttccttgtgatggagaccctgctggcggtagcggtgtactacgtgatggtggttaccgtcttcacctggctgtaccgggcgctggaaaatcgtctcgatattcagcgtaagcgtccgcaaaccctcagcgaggcggaatnnnnnnnnnngcggaatgccaggcgctgcgccagagcctgccggcgctga

SEQ ID NO: 240004 - DNA, 1014 bp, Klebsiella pneumoniae
atgataatgacagttttacgccagcagccgcgcgccgcgggtctggtgctggggttgatcgcggcgaattttctggcctggtgctgggcgctgcaggcctttggcgacagcggcgcgctgatggccgccagcctgctggcctggggctacggcctgcgccacgcggtggacgccgaccatattgcggcgattgataacgtgacccgcaagatgatgcagcaggggcggcggcctttcgccgtcggggcgtggttttcgctgggccactcatcgattgtggtgctggcctcggcggcgattgccgcgaccgccaccgccttcagcacgcagatgagctggctgcatgataccggtagcgttatcggcaccgcggtgtcggccctgtttttactggcgatggcctttatcaacctggtgattttacgcagcgtgtggcgcagctttcgggcatggaataatcgaccagacggaaatcccgctcgacgcaccggcggcggggtgatgagctggctgtttggcaagaccttccgtctgataagccgcagctggcagatgtacctggtcggtttcctgttcggactcggttttgataccgccaccgaaatcggcgtgctgggtatctccgccgccggtgcgtcgagcgggatttccgtctggtcgattatggtctttccggcgctgttcgccagcggtatggcgctggtggataccctcgataacgtgctgatggtcggcgcctacggctgggcgttcagcaaaccgcagcgcaagctctattacaatatgaccatcaccggcacctcggtggtggtggcgctgtttatcggcggcctggaagcgctgggtttgctgatggataagtttgcgctcagcggcggaatatggcgctgggtaggggcgttaaacgacaacctcggcgacgccggatttatggtggtcgggttgtttgtcgcctgttgggcgctatcggtgcttaactatcgctggcgcggctacgacaatctggcgcgctag

SEQ ID NO: 240005 - DNA, 252 bp, Klebsiella pneumoniae
atgccgttccacaatccggccagcgcgcccgcggccagcgcggccaacagcaccaccggcaggctgtgcccggcgacggtcatcgaggcggccgtcgcgccggcaatcgccatcaccgcccctaccgacaggtcgatgccgccggtggcgatcaccagcgtcatgccaatcgccagcagcgccaccggcgcggcgcggttgagaatatcgatcgggctgccaaacaggcggccatcctggagcaccacctga

SEQ ID NO: 240006 - DNA, 351 bp, Klebsiella pneumoniae
atgaccctcactggcgataacgcgggcggcagcggcggcataatccgcgcgggtggcggaggcgattttaccctcgccggcggcgccgataaacacgccatgctccagcgccggcggcgcgctggccagatagttttcggtataccagccgttacgcagcagggcgtaagcgataccagagtcggccagcatctgctcggtttcgatatgctctgcggccagacccagcggcgaagtgtcggcatgcagcaggctggtataggcgatgaatttcaccccggcggctttggcggcgttaatgacgttgcggtgctgtacagcacgctggccgacttcgctggaggagattaa

SEQ ID NO: 240007 - DNA, 279 bp, Klebsiella pneumoniae
  misc_feature (224)..(233): n is a, c, g, or t
atgaaattcagtgaactgtggttacgcgaatgggttaacccggcgatcgacagcgaagcgctttccgatcagatcaccatggcgggcctcgaagtagatggcgttgagccggtcgccggcagcttcaacggcgtcgtagtcggggaagtggtggagtgcggtcagcacccgaacgccgacaaactgcgcgtcaccaaagtcaacgtcggcggcgaacgcctgcnnnnnnnnnnctgctggacatcgtctgcggcgcgccaaactgccgtcaggggctaa

SEQ ID NO: 240008 - DNA, 762 bp, Klebsiella pneumoniae
atgagtatttgcgctgaaaatatcacctggaaggcaggcaaaaaggtcatcgtcaataatgtctcgctgcgggtgccgcgaggcgaaacggtcggactgctggggcccaacggctgcggcaaatcctcgctgctgcgcgttctggcgggcctgcgccgcccggatgcaggtcgcgtcaccctcgacggccaggatatcgcccggatggcgaaaaagcagctcgcccgccgcgtggctttcgtcgagcaacacggcatgaccgaggccaatatgcgggtgcgcgacgtcgtgcgcctgggacgcattccccaccactctccgttctcaaactggagcgctcaggatgacgaggcgattgccgccgcgctgcagcgggtagcgatgctggagaaaagcgaacagggatggttaagcctctccggcggcgagcggcagcgggtgcatatcgcccgcgcgctggcgcagagcccgagcgaaatcctgctggatgagccgaccaaccatctggatatacaccatcagatgcagttaatgcagttgatcagcgagctgccggtaaccagcattgtggccattcacgatcttaaccatgccgcgatgttctgcgattcgctgatcgtgatgcagcaggggcagatcctcgccagcgggacgccggaggagattttgtccgaagcgctgctgtgtgacgttttccgggtgaaaaccaaaatcgagatctccccttaccacggcaaaaagcacattcatttcatcgtttag

SEQ ID NO: 240009 - DNA, 339 bp, Klebsiella pneumoniae
gtgctgccgctgttgaataccgcagcgcgggtacccgtctgcgggctggtgagcggctataacgccaccgggctgccggacgggccagatcgtctgccgctgctgatggcgaccatcctcaaaaagcgcatccggatgcagggctttattatcggccaggattacgggcatcggatcgccgaattccagcagcagatggggcgctgggtgcaggaggggaaaattaaatatcgcgaacagctgatcgacggtctggaccaggcgccgcaggcgctgatcggcctgttaaaaggtgagaacttcggtaaggtagtgatccgcgtcgcggcggacgactag

SEQ ID NO: 240010 - DNA, 435 bp, Klebsiella pneumoniae
atgacagatcaaccgcaacgccatcgccgctgggtgctggcttcccgtccccatggtgaaccgacggcagagaatttccgcctggaagagagcgaagtgccgacgccaggcccgggtcaagtgctgctgcgtaccgtttatttatcgctcgacccgtatatgcgcgggcgcatgagcgacgcgccgtcctattcgccgccggtggccattggcgcggtgatggtgggagggaccgtgagtcgcgtggtcagctcaaatcatgccgattatcaacccggcgactgggtgctgggctacagcggctggcaggattatgaactctccgacggcagcggactggtgaagccgggcatccccagaactcccagcgaccaggacgggtgttgcggattgtcacccagcttcaccagtccgctgccgtcggagagttcataa

SEQ ID NO: 240011 - DNA, 222 bp, Klebsiella pneumoniae
ttgcaaaacatcctcagcgaaacgccggggatccgtctgcgagcgctgagctgggatgccgcgggcaatcgtctgcagctggatatcgccgcggtctcttcccgggcgctggagcagtttacccagcgggcgcagccgcggtttcgcgtccggccgggcgacatgatcacgaaaccggatggcattgagggacaactgacgctggaggaaaacgatggctaa

SEQ ID NO: 240012 - DNA, 1740 bp, Klebsiella pneumoniae
  misc_feature (1688)..(1697): n is a, c, g, or t
atgctgcctacgctgctgatattaaccccgctgctattttctccggccgccgcggaggaattttccgccagttttaaaggcaccgatatccaggaatttatcaataccgtcagcaaaaacctgaataaaacggtgattatcgatcccagcgtacgcggtactatcaccgtgcgcagttacgatatgctcaatgaagaacaatattatcaattcttcctcagcgtgctggatgtatatggcttcgccgtgatcaatatgaataacggcgtgctaaaagtggtccgcgccaaagacgccaagacctcggccgtgccggtcgccagcgcggccgcgccgggcgaaggcgatgaagtggtcacccgggtggtgcccctgaccaacgtcgccgcccgcgatctcgccccgctgctccgccagctgaacgataacgctggcgccggcagcgtggtccattatgagccctccaacgtactgctgatgaccggccgcgcggcggttatcaaacgcctgctgaccattgtcgagcgcgtcgacaacgccggggatcgcagcgtggtgaccgtgcccctttcctgggcctccgccgcggaagtagtcaaactggttaccgagcttaataaagataccagcaagtcggcgctgccgggctcgatggtggcgaacgtggtggccgatgagcgcaccaacgcggtactggtgagcggcgaaccaaactcgcgccagcgcatcatcgccatgatcaaacagctcgaccgccagcaggcggtacagggtaacaccaaagtgatctacctgaagtacgccaaagccgccgatctggtggaggttctgaccgggatcagcagctcgctgcagagcgacaagcaaagcgccaggccagtggccgcgatcgacaaaaatattattatcaaagcccacggccagaccaacgccctgatcgtcaccgcggcgccggacgtgatgaacgatcttgagcgggtgatcgcccagctcgatatccgccgcccgcaggtgctggtggaggcgattattgccgaagtgcaggatgccgatggccttaatctcggtatccagtgggcaaacaaaaacgccggcatgacgcagttcaccaacagcggtttgccgatatcgacggctatcgccggcgccaaccagtacaacaaagacggtaccatcagcagctcgctggccagcgccctcggctcgtttaacggtatcgccgccggcttctatcaggggaactgggcgatgctgctcaccgccctctccagcagtaccaagaacgatattctggccacccccagcatcgtcaccctcgataacatgcaagccacctttaacgtcggccaggaagttccggtattaaccggctcgcaaaccacctcaggcgacaacatcttcaataccgtcgagcgcaaaaccgtcggcattaaactgaaggtgaagccgcagattaacgaaggcgatgcggtgctgctggagatagagcaggaggtatcgagcgttgccgactcggcctccagcaccagcagcgatctcggggcgaccttcaatacccggacggtgaataacgccgtgctggtcggcagcggcgaaacggtggtggttggcgggctgctggataaaaccgtcaccgataccgctgacaaagtgccgctgctcggggatatcccggtgatcggcgcccnnnnnnnnnnctgttccgctccgacagcaagaaagtgtcgaaacgcaacctga

SEQ ID NO: 240013 - DNA, 705 bp, Klebsiella pneumoniae
atgcaggaacagactccgcacgcagaaaccaccttcgcgctggatcgcgtcactttccgtgtgcctggccgcacattgctccatccgctctcgctcaccttcccgaccggaaaagtcacaggcctgatcggccataatggctccggcaaatcgacgttactgaaaatgcttggccgtcatcagccgccctccgcaggcgaagtgctgctggacgggcagccgctggagagcggccgctatccatggcacggcgcgctgggtcgctttggcgcagcggaccgtgagaaagtagaagaggcgattgcgctggtggggctgaagccgctcgctcatcgtctggtggacagcctctccggcggtgaacgccagcgggcgtggatcgccatgctggtggcgcaggacagtcgctgcctgctgctcgatgaacccacctcggcgctggatattgctcatcaagtcgatgttctggcgctggtgcatcgtctcagccagcagcgcggcctgacggtgatcgccgtcctgcacgatattaatatggcggcccgctattgcgactatctggtggccctgcgcggcggagaaatgattgctcaggggacgccggcggaactgatgcgcagcgacactctggaacagatctacggcatcccgatggggatcctgccacacccggccggtgcggcgccggtaagctttgtctattga

SEQ ID NO: 240014 - DNA, 1872 bp, Klebsiella pneumoniae
  misc_feature (1302)..(1311): n is a, c, g, or t
gtgaacggtgaattgatttgggttttatccctcctggccatcgcggttgtgctgtttgctaccggcaaggtgcgcatggatgctatcgccctgatggtcattgtcgcctttgtcctcagcggaacgctgacgttaaatgaagctttttccggattcagcgatcctaacgtgatcctgattgccgccctgtttattatcggcgatggcctggtgcgcaccggagtcgccaccaaaatgggggcatggctggtgagcgtggcggggaacagcgaaaccaaaatgctgatctacctgatgctcaccgtcgccggtctgggcgcgtttatgagctccaccggggtggtcgccattttcatcccggtggtacttagcgtctcggcgcggatgaatacctcgccatcgcggctgatgatgccgctgagcttcgccgggcttatcagcgggatgatgaccctggtggcgacgccgcccaacctggtggtcaacagtgaattgctgcgcgagggactgcacggcttcagctttttcagcgtcacgccgattggcctggtggtgctgatcctgggcatcgtctatatgctggcggtgcgctttatgctgaagacggataatggcgactccgcacgcgatgggcgaaaaagaagcaccttccgcgatttgatccgcgagtatcacctcaccggccgcgctcgccggctggccatccgcccgggttcgccgatgatcggtcagcggctggatgatttaaagctgcgtgagcgctactgcgccaacgtgatcggcgttgaacgctggcggcggttccgccgggtaattgtcaacgtcaacggggtatcggaatttcgcgcccgcgacgtcctgctgatcgatatgtccgcctccgatgtcgatttacgccagttctgcggcgagcaaatgcttgagccgatggtattgcgcggcgagtattttgccgatcaggcgctggatgtggggatggcggaggtggcgctgatcccggattcagagatgattggcaaaacggtgcgtgagatagccttccgcacccggtttggtctcaatatcgtcggcatgaagcgcgatggcaaagcgatggatggttcggtggtcgatgagccgctgcagctcggcgatatcctgctggtggtcggcaactggcggcaaattgccctgctggcgaagcgcggccgggatttcgtggtactcaatatgccggttgaggtcgatgacgcttcgccggcccacagccaggctccgcatgcgattttctgcctggtgctgatggtagccctgatgctcacnnnnnnnnnnctggtgctgatggtagccccgatgctcaccgatgaaattcccaacccgattgccgcgattatcgcctgtctgctgatgggcaaattccgctgcatcaatgccgaaagcgcctacaaggcgatccactggccgagcattattttgattgttgggatgatgccgtttgccctggcgctgcaaaaaaccggcggggtggatctggtggtgaagggactgatggatgtcgccggaggcgaggggccttatctgatgctcggctgcctgttcatgatgtgcgcggcgattgggctgtttatctcaaacaccgccacggcggtgctgatggcgcctattgccttagcggcggcgaagtcaatgggcgtctctccctatccttttgccatggtggtggcgatggcggcttcggcggcgtttatgaccccggtctcctcgccggttaacaccctggtgcttggcccgggcaagtactcatttagcgattttgtcaaaataggcgtgccctttaccatactggtgatggtggtctgcgtcctgctgatcccggtactgtttccgttttaa

SEQ ID NO: 240015 - DNA, 342 bp, Klebsiella pneumoniae
  misc_feature (24)..(33): n is a, c, g, or t
atgccaccgctggcggcgtcgtgnnnnnnnnnnctgctggaatcggcccgtcgcgaggcggaagaggagttaggcatcgccggggtgccgtttgccgatcacggccagttttattacgaagacaaattctgccgcgtctggggaagtctgtttagctgcgtctcccacgggccgttcgccctgcaggaagaagaggtcagcgaggtgtgctggttaacgccggaagagatcaccgcccgctgcgatgagttcacgccggactccctgaaagcgctggcgctgtggatgacccgcaacgccggtaatgagtatgatgatgcggaagagagcgagcgcgaataa

SEQ ID NO: 240016 - DNA, 975 bp, Klebsiella pneumoniae
gtgctgatagaggtgcagcgtagcctccagcgccgcgagggtcattttatcggcacgcagggcccgcttcagcgggtggctttgcagctgggcaatcagcgcgcgtttgccgacgataatcccggcctgcgggccaccgagcagcttgtcgccggagaaactgaccaggctcaccccggcggcgatcatctcctgcggcatcggctcctttggcaggccatactgactgagatccaccagcgacccgctgcccaggtcggctaccaccggaacatccagttcgcggccaatggccgccagctccgcttcgtcgacggctttggtaaagccctcaatactgtagttgctggtgtggaccttcatcagcagcgcggtattgtcattcaccgcctggcgataatctttggcatgggtgcggttggtggtacctacttcgtgcagctggcaacccgcctggcgcatcacgtcggggatgcgaaatgccccgccgatctccaccagttcgccgcgagagaccaccacttcgcgaccgctggcggtggccgccagcatcagcagaacggccgccgcgttgttgttcacgatacaggcgtcttccgcgccggtgatctggcacagcagatcggcaatggcgcgatcgcgatggccgcgcccggcgtcgtcgagatcatattcgagcgtcaccggcgcgtgcatcgcgctggcgaccgcctccacagccgactccgcctgaatggcgcgccccagattggtatgcaataccgtaccggtgagattaaacaccggacgcagggcgctctgccggccggcggtgagccgctgcgcgcaggcgctcggccagtcatggctccagtccggcagtgtctgatactggcggatttgctcccgcgcctcatccagcatctggcgcagctgcgccaccacctgcgaatggccgtgctgcgccagcaggggagaaaaagcggggtcgcgtag

SEQ ID NO: 240017 - DNA, 414 bp, Klebsiella pneumoniae
atgcccatcggccgcgcctgggaggcgctgcgcgaggatgagatcgcctgtcgggcgatggggctcaatcacgtgctggtgaagctctcggcgtttatgctcggcgcgtcgacggccggcatcgccggggtgttcttcgccagctatcaggggtttgttaacccgacgtcgttcaccttttttgagtcggcgctgatcctggcgattgtggtgctcgggggaatgggctccaccctgggagtggtactggcggcgtttgttctgacggtcaccccggagctgctgcgcggctttgacgaatatcgggtgctgctgttcggcgtgctgatggtgatgatgatgatctggcggccgcgcggcctggtgcgcaccagccgcagcggggttgcgttgcgaaaaggagtcgcgccatga

SEQ ID NO: 240018 - DNA, 609 bp, Klebsiella pneumoniae
  misc_feature (321)..(330): n is a, c, g, or t
atgtcacaacaaattgaatcagtaaaaatggctctgcaggagctggggattaatgcaagcggcgaattcttttacaaccctgattacgatttgcttattgcacatgaaacctctcctgagctgaccggcgcggcccgcggcgtgatgaccgactctggcgctgtggctgttgataccgggatcttcaccggccgttcgccgcgcgataaatacatcgtccgcgacgaacagactcgcgacaccgtctggtgggcagactccggcctcggccgtaatgacaataagccgttatcgccagacgtgtggcgcagcctgaaaagnnnnnnnnnnagggcgcagcctgaaaagcctggtcgcgggccagctgagcggcaaaaaactgtacgtcatcgacgcctggtgcggcgccagcccggacacccgtcttggcgtacgcttcgtcaccgaggtggcgtggcaggcccactttgtcaaaaacatgttcatcgtgccaagcgccgacgagctggccagctttacgccagacttcgtggtgctcaacggcgcgggctgcaccaatgccaactggcaggcgcaggggatgaactccgagaactttgtcgcctttaa

SEQ ID NO: 240019 - DNA, 714 bp, Klebsiella pneumoniae
atgaaaaccattggcctgttaggcggcatgagctgggagtccacgatcccctattatcggttgatcaatgagggcgttaaggcgcgactgggcggcctgcactctgccagcctggtgctgcacagcgtcgattttcacgacatcgaagcctgccagtccgccggcgactgggatcgcgccggggagatccttgctgaggccgcggtcgggctgcagcaggcgggggccgaaggcattgtcctgtgcaccaacactatgcataaagtcgcagatgccatcgccgcccgctgccaggttcccttcctgcatattgccgatgccaccggacgggcgattgccgccaaaggtcagcgccgggtcgcgctgctgggcacccgctataccatggagcagaccttttaccgcggtcgtctgcaggagcagtttgccatcgagacgctgatccctgaggctgacgatcgggcgcagatcaatcagatcatcttcgacgaactttgtctcggcactttcagcgaggcgtcgcgggattattatctgcagacgatcgccgccctggcggagcagggggcggaaggggttattttcggctgtacggagattggcctgctggtgcctgccgagctcagtccgctgccggtctttgacaccgcggcgatccacgcggaagacgcggtcaactttatgctctctgcaggaccgacgccaggggcgtga

SEQ ID NO: 240020 - DNA, 939 bp, Klebsiella pneumoniae
  misc_feature (907)..(916): n is a, c, g, or t
atggctacaatgctggatgtctcaattcgcgcaggcgtctcgaaagcgacggtttcccgcgtgttgaacggcacaggtcaggtgaaagagagcacccgccaacaggtctttaaagcgatggaagagctgggctaccggcccaatttccttgcccgctcgctggccaatcagaccagcaatagtatcgggctggtcgtctccacctttgacggcttctactttggccgtctgctgcagcaggcgtcacgccagaccgaagcctggggaaagcagcttatcgtcaccgacggccatgatacgccggagcgcgaagaggaagcggtgcagatgctcgccgaccggcagtgcgatgcgatcatcctctatacccggcacatgagcgagaaggcgatcatgtcgctgattaactcgatcgccatgccgctggtggtgattaaccgcgatgtggcgcaggcccgcgaacgctgcgtgttcttcgaacagcaggaagccgccttccaggccgtggagtatctgattacccagggccaccgcgatatcgcctgcatcaccgtcccgatgcatacccctaccggccaggctcgcctgcagggctaccgcaacgcgctgataaaacatggtattgagtgggatccgagccgggtgaagtatggggactcgacgatgactcgcggctacgaactgtgccgggaactgctggacgagaaagcccgcttcagcgcgctgttttcctgtaacgatgatatggcgctgggggcgtcaaaggcgctgcatcaggcggggctgcgtattccacaggatgtgtcgctgtttggcttcgacgatgcgccaagcgcgaaatggctggagccggggctgtcgacggtttatctgccgatcgacaacatgatcactacggctatcgacnnnnnnnnnngcttgccaatcagcagccgatag

SEQ ID NO: 240021 - DNA, 480 bp, Klebsiella pneumoniae
atgacgatcctgccgctgtacgctgcgccgcagtacgccccgcaggtgaccgactggctgtggcaggcctttggcgacgagacgctgccgcggcaattcttcgccagcattgtgcagcatagccagacggcggaggcgctgccgttgacctttattgcggtggaaggcgagcagttgctcggcacgattggcctctggcgctgcgatttgatcagccgccaggatctgtttccctggctggcggcgctgttcgtcgcgcccgccgcccgcggtcaggggctggccggaaaactgcagcggcatgtgatcgattatgcccgccgcgcgggctttcgggagctctatctctactccgcctgccgggatttctatgaacgcttcggctggcgctacatcggcgagggactggattacccggccaccgccgtgcacctctatcgctatgacttatcgccttcctgcggggcgaccaccgagtga

SEQ ID NO: 240022 - DNA, 579 bp, Klebsiella pneumoniae
gtgacgctgctggataccctcgaagcgctgaccgagttccagcgcgccgggaagatccgctacatcggcgtgtcgaacgaaaccgccttcggcgtgatgcgttatctgcacctggcggataagcacgacctcccgcggatcgtgactattcagaatccttacagcctgctgaaccgcagctttgaagtcggcctcgcggaagtgagtcagttcgaaggcgtggagctgctggcctactcttgtctggctttcggcacactgaccggcaagtatctcaacggtgcgaagccggcaggggcgcgcaatacgctgttcagccgctttacgcgctacagcagcgagcagtcgcagaaagcggtagcggcctatgtggatatcgccaaacgccacggcctcgatccggcgcaaatggcgctggcctttgtgcgtcggcagccgtttgtcgccagcaccctgctgggggcgacgaccatgacgcagctgcaggccaacgtggaaagtttgcagcttgagctgagcgaagaggtattagcggagattgaggcggtgcatcaggtttatacctacccggcgccgtaa

SEQ ID NO: 240023 - DNA, 369 bp, Klebsiella pneumoniae
  misc_feature (263)..(272): n is a, c, g, or t
atgcagtatcaccgtatcccacacagttctcttgaaatcagcaccctcgggctgggaaccatgacttttggcgaacagaatagcgaggccgatgcccaccagcagctcgattacgcggttgccaacggcatcaacctgatcgatgtcgctgaaatgtacccggtcccgccgcgcccggaaacccaggggctgactgaaacctacgtcggcaactggctggcgaaacgcggcaatcgcgaaaagctggtgctcgcctcgaaagnnnnnnnnnnaaagtcagcgggcccgcgcgcaataacgacagcagcattcggcccaatcacgtcctggaccgcaaaaatatccgcgaggcgctgcacgccagcctga

SEQ ID NO: 240024 - DNA, 888 bp, Klebsiella pneumoniae
atgaaacagtatcttgatttgatgcagaaagtgctcaccgagggcacgccaaaaaatgaccgcaccggcactggcacgatctccattttcggccatcagatgcgttttaacctgcaggaaggcttcccgctggtgaccaccaagcgctgtcatttacgctccatcatccatgaactgctgtggttcctgcagggcgacaccaacatcgcctatctgcacgagaacaacgtcaccatctgggacgagtgggcggatgagaatggcgacctggggccggtctacggcaaacagtggcgttcctggcctgcgccggacggccgccatatcgaccagatcagcacggtgatgaaccagctgaaaaacgacccggactcccgccggatcatcgtctcggcatggaacgtcggcgagctggataaaatggcgctggcgccgtgccacgccttcttccagttctacgtcgccgacggcaagctctcctgccagctgtatcagcgttcctgcgatgtgttcctcggcctgccgttcaatatcgccagctatgcgctgctggtgcatatggtggcgcagcagtgcgatctgcaggtcggtgatttcgtctggaccggcggagacacccatctgtacagcaaccatcttgagcagaccaacctgcagctaagccgcgaaccgcgtccgctgccgaagctggtcatcaaacgcaagccggcgtcgatcttcgactaccgctttgaagacttcgagattgaaggttacgacgctcgatggcgccggtttttttatgcccttcgcaccacccgatgggagcgctttccgttaccaccgggagaaggttgttttcacctgccccccaggccacaggtggttgcggtgggcgaagttgggtag

SEQ ID NO: 240025 - DNA, 678 bp, Klebsiella pneumoniae
atgaaccagccattacttgctgtgaataacctgacccatctctacgccccggataaaggttttcgcaatgtctccttcgagctgtggccgggagaagtgctcggcatcgtcggcgagtccggctccggtaaaaccaccctgctaaaggcaatctccgcccgcctgacgccgcagcagggcgaggtgctgtaccagcagcgctcgctgtacgccatgagcgaagccgaacgccgccgcctgttgcgcaccgaatggggcgtggtgcatcagcacccgatggacggtctgcgtcgccaggtctctgccgggggcaacatcggcgaacggctaatggccaccggcgcccgccactacggcaacattcgcgccaccgccgaaaagtggctgcaggaggtggagatcccgccctcgcgcatcgacgacctgcccaccaccttctccggcggcatgcagcagcgtctgcagatcgcccgcaatctggtcacccagccaaagctggtgtttatggatgaacccaccggcgggctggatgtgtccgtgcaggcgcggctgctagacctgctgcgcggcctggcggtggagctgaatgtggtggagagtggcttaaccgaccgggtgctcgacgatccgcaccatccttacacccagctgctggtgtcgtcggtgttgcagaattga

SEQ ID NO: 240026 - DNA, 129 bp, Klebsiella pneumoniae
atgattttcaaaatttatcgtgatcccattctgcgaaagacattcatcctggatgcaatagttctggttggagcggtatcgctttctgcgctgggaatatggctggtcaatgaatgggtggctgcatga

SEQ ID NO: 240027 - DNA, 129 bp, Klebsiella pneumoniae
atggcgcggctccagcttctgggcggcgcgttccgcgcggatatcgcgatcgtcctgctggtacatgccgtggaaacggatcagcaggaagttatcgcctttaaaaccgccggtcagaccgtcgtttaa

SEQ ID NO: 240028 - DNA, 375 bp, Klebsiella pneumoniae
  misc_feature (353)..(362): n is a, c, g, or t
atgatggaaaattataaacatactacggtacttctggatgaagccgtcaacggcctcaatattcgtccagacggtatctatattgatggtacttttggccgcggcggtcactcgcgcctgatcctctcccggctgggtgcggaaggacgcttgctggccatcgatcgcgacccgcaggcgattgccgtcgcgcaaaccatcgatgacccccgcttttccatcgtacatggtcccttttcacaactcgctgagtacgtcggcgagcgcaatcttaccggtaagatcgacggcattctgctcgatctcggcgtctcttccccgcagcttgacgatgcggaacgcggcttttcctnnnnnnnnnncctttatgcgtga

SEQ ID NO: 240029 - DNA, 588 bp, Klebsiella pneumoniae
atgcgtgacgggccgctggatatgcgcatggatccgacgcgcggtcagtccgcagccgaatggctgcagacggctgaagaagacgatatcgcctgggtgattaaaacctttggcgaagagcgtttcggcaaacgtatcgcccgcgcgatcgtcgaacgtaatcgcattcagccgatgacccgcaccaaagagctggcggaagtcatcgccgcggcgatgccggtaaaagataagcacaaacatcccgcgacccgtaccttccaggcggtgcgcatatgggtaaacagtgaactggaggagatagagcaggcgctaaaaagctcgctcagcgtgctggccccgggcgggcggctgtcgatcattagttttcattcgctggaagatcgcattgtgaagcgctttatgcgtgagcaaagccgcggtccgcaggttccggcgggaataccgatgaccgaagcgcagctcaaaaaactgggcggccgtgagttgcgagcactaggcaagttgatgccgggcgaagaagaggtggcagagaatccacgcgcccgtagttcagtgctgcgtatcgcagagaggacgaacgcatga

SEQ ID NO: 240030 - DNA, 255 bp, Klebsiella pneumoniae
  misc_feature (197)..(206): n is a, c, g, or t
atgattcgctttacgttaagtcaacttgccgcgatcgcccatggcgaacggcagggtagcaatgtcgctatcgacgaggtgaccaccgatacccgtaaagtgacggcgggctgcctgtttgtggcgctgaaaggggagcgtttcgacgcccatgattttgccgaacaggcgaaagcggcgggcgccggcgcgctgcnnnnnnnnnngcgatctcccgcaggtgattgtgaacgatacccggcaggctttcggtga

SEQ ID NO: 240031 - DNA, 969 bp, Klebsiella pneumoniae
atggtgatggcgggcggtaccggcgggcatgtgttcccgggtttagtgccgaaaaacggcatcgaaattgattttatccgcatctccggcctgcgtggcaaaggtatcaaagcgcagctactggcgccggtgcgtatctttaacgcctggcgtcaggcgcgggcgatcatgaagcgtttccagccggacgtggtgctgggcatgggcggctatgtttccgggcctggcggtctggcggcgtggtcgctggggatcccggtggtcctccacgagcaaaacggcattgccggcctgactaacaagtggctggcgaagattgcgaagaaagtgatgcaggcgtttcccggcgcgttcccgcatgcggacgtcgttgggaacccggtgcgcaccgatgtactggcgctgccgctgccaggtcagcgtctggttggccgtcaggggccgattcgcgtgctggtggtcggtggctctcagggcgcgcgcgtcctgaaccagacgatgccgcaggtggcggcgaagctcggcgctacggtgaccatctggcatcaaagcggcaaaggcggccagcaaaccgtgcagcaggcctatgccgccgccggacagccgcagcataaagtgacggaatttattgatgacatggccgcggcgtatgcctgggcagatgttgtggtttgccgttccggcgcgctgacggttagcgaaatcgcggccgcaggtttaccagcgctgtttgtcccgttccagcacaaagatcgtcagcagtactggaatgcgctgccgctggagaaagccggcgcggcgaaaattcttgaacagcctgagttcacggtagaggcggttgcctctaccctggcgagctgggatcgggaaaccttgctggatatggcggaacgagcgcgtggcgcttcgattccggacgctaccgagcgggtagcagaagaggtcagcgccgtagctttggcgcgctaa

SEQ ID NO: 240032 - DNA, 1206 bp, Klebsiella pneumoniae
atgaacgctgcaaaccgtcaatcgacccgctggctgacactgatcggcaccatcatcacccaattcgctctcggttcggtttatacctggagcctgtttaacagttcgctgtctgacaaactgggcgagccggtcagtcaggtggctttttcctttggtctgctgagcctcgggctggcgctctcttcgtcggtcgccggcaagctgcaggagcgctttggcgtgaagcgcgtcaccatggcctccgggatcctgctcggcctgggcttcttcctgaccgcgcactccagcagcctgatgatgctgtggctgagcgcgggcgtgctggtggggctggcggacggcgccggttacctgctgaccctgtcgaactgcgtgaaatggttcccggagcgtaaagggttgatctccgccttctccattggctcctatggtctcggcagcctggggttcaaattcattgattcccacctgctggccaccgttggcctggaaaaaaccttcgttatctggggcgctatcgtgctggtgatgatcgtctttggcgcgaccctgatgaaagatgcgccaaatcacccggcagccaccgcggccaacggcgtcgtggaaaacgacttcaccctcgccgaatcgatgcgtaaaccgcagtactggatgctggcggtgatgttcctgacggcctgcatgagcggtctgtacgtaattggcgtagcgaaagatattgcccagggaatggtccacctggatgtcgccacggcggccaacgcggtaacggttatctcgattgcgaacctcagcggtcgcctggtgttaggtatcctgtctgataaaatctcccgcattcgcgtgattaccatcggtcaggtcgtgtcgctggtggggatggccgcgctgctgttcgccccgctgaatgccttgaccttcttcgccgccatcgcctgcgtcgcctttaacttcggcggcaccattaccgtcttcccgtcgctggtgagtgagttctttggtctgaacaatctggcgaaaaactatggcgtgatttatctgggcttcggtatcggcagcatctgcggctctctcatcgcttcgctgttcggcggtttctacgtgaccttctgcgtgatcttcgccctgctgatcctctcgctggcgttatccaccaccattcgtcagccgaaaagcacggtatataacgaggcgcacgcctga

SEQ ID NO: 240033 - DNA, 228 bp, Klebsiella pneumoniae
atgtgcgccctgatggcccttgccctgacccatattctgcagatggactttatgaccgcctatctggccaccagtcccggcgggctggacacggtggcgattatcgccgccggcacccgggcggacatgtcgtttattatggcgctacagacgctgcggctgtttaccattttgctgaccggcccggcgatggcgcgggctatctcccgctatgcgccgcggcaataa

SEQ ID NO: 240034 - DNA, 447 bp, Klebsiella pneumoniae
  misc_feature (381)..(390): n is a, c, g, or t
atgtcaggactcaaaattgtggtgattggcggtggctccagctacaccccggaactgattgaaggtttgctcaaccgctatcacgaaatgccggtcgcttcgctatggctggtggacattgaagagggcaaagagaaagtcgagattatcgccggactggcgcggcgaatgatcgccaaagccgggctgactattgaagtggtggccacccttgaccgggaaagcgcgctgcgcgatgccgatttcgtctgctcgcagtttcgcgccggctgccttgacgcccggatcagcgatgaacgtatctccctcaagtatggcttgatcggccaggagaccaatggccttggcggcttcgccaacgcctgtcgcaccattcccatnnnnnnnnnntcgccctggagatcgctgccgatatggagcgactgtgtcccgacgcctggctgctga

SEQ ID NO: 240035 - DNA, 801 bp, Klebsiella pneumoniae
atgacgggcaaactgcagcagataatcggccattgcttcgtcgcacagcaccgccgcgccgctgacgccgaaggccttgccgaaggtaaccaccagcagctcagggcgcaccgcctgcgcggcgcagctcccgcgtccttcgtcgccgaccacgccaacaccgtgggcgtcatccaccagcaacactgcccctgcggcctgcgtcgcggcgtgaatggccgccagcggcgcgctgtcgccgtccatgctgaaaatgccttcagtgaccgccaactgttcgcccgccagcggcttagccagcagttgcgcgagctgctgcggatcgttgtgggtaaagcgccgcagctgcgccgggctgaggctcgcggcctccagcagagaggcgtggctcagacggtcggcgacaatccgatcgtctttctccaccagggcggcgatcagcgcctgattcgcggcaaagccggagataaacagcaatgcgcgcggatagcccagccagtcggcgagcgcctcttccagcgcgcggtgggcttcgctatagccgctcacgtggcccgagccgccggcaccgacgccatagcgcgtggccccctgttgccaggcggcgataatcgccggatgctgactcaggcccagatagtcattgctggagaagttaagccagcgctccccttcccgctccagccagcgcccggcgccgtgcgtcaccggcaggcggcggcgaaaagcttccgccgcccgccgctcgtccagcgcccgatcgattcgctgctgccagctcatagcgccgccgcgttgtaa

SEQ ID NO: 240036 - DNA, 1272 bp, Klebsiella pneumoniae
  misc_feature (765)..(774): n is a, c, g, or t
atgttaaagcgtgaaatgaacattgccgattatgatgccgaactgtggcaggctatggagcaggaaaaagtacgtcaggaagagcacatcgaactgatcgcctccgaaaactacaccagtccgcgcgttatgcaggcgcagggctctcagctgaccaacaaatatgctgaagggtatccgggcaagcgttactacggcggctgtgaatacgtcgacgtggttgaacagctggcaatcgaccgcgcgaaagaactgttcggcgctgactatgctaacgtccagccgcactccggctcccaggctaactttgccgtctacaccgcgctgctgcagccgggcgacaccgtgctcggtatgaacctggcgcagggcggccacctgactcacggctctccggttaacttctccggcaaactgtacaacatcatcccttacggtatcgatgagtccggtaaaattgactatgacgacatggcgaagcaggctcaggaacacaaaccgaagatgatcatcggtggtttctccgcttactccggtatcgttgactgggcgaaaatgcgtgaaatcgctgacagcatcggcgcttacctgttcgtcgatatggcgcacgtggcaggcctgattgccgctggcgtgtacccgaacccggttccgcatgctcacgttgtgaccaccaccacccacaaaaccctggcgggtccgcgcggcggcctgattctggcgaaaggcggtagcgaagagctgtacaaaaaactgaactctgcnnnnnnnnnnaactctgccgtgttcccaagcgcgcagggcggcccgctgatgcacgttatcgcggcgaaagcggtggcgctgaaagaagcgatggagccagagtttaaagtttaccagcagcaggttgcgaaaaacgctaaagcgatggtggaagtgttcctgaaccgcggctacaaagtggtgtctggcggtactgagaaccacctgttcctgctggacctggtggataaaaacctgaccggtaaagaagctgacgctgccctgggccgcgccaacatcaccgtcaacaaaaacagcgtgccgaacgatccgaagagcccgttcgtaacctccggtatccgtatcggttctccggcagtgactcgccgcggctttaaagaagcggaagtcaaagagctggctggctggatgtgtgacgtgctggacaatatcaatgacgacgcggtcattgagcgcgtgaaaggtaaagtgctggatatctgcgcccgcttcccggtatatgcgtaa

SEQ ID NO: 240037 - DNA, 285 bp, Klebsiella pneumoniae
  misc_feature (250)..(259): n is a, c, g, or t
atgacggcgaatattccggtaatcaccattgatgggcctggcggtgcgggtaaaggtacgttgtgcaaggcaatggcggaagcgctgggctggcatctgttagattcaggcgcgatctaccgcgttctggcgctggcggcgctgcatcatcatgtcgacgtggagtccgaagaggcgctggtgcccctggctgcccatcttgacgtgcgttttatttctactgacggcaacctggaagtggtgctggaannnnnnnnnngtgctggaaggggaagatgtcagtag

SEQ ID NO: 240038 - DNA, 1239 bp, Klebsiella pneumoniae
atgagtcattatctgcagattaacggccaacggcttatcgattccctgtatgcacttggcgaacatggtgcgctgccaggcggcggtgtatgccgcctggcagcgactgccgaagataaagccggcagggactttgttgtagcccgcatgaaggcgctgggcctgagcgtgtcaattgatgctatcggcaatgtcaccggcgtttatcacggcgaggagacgttgccgatggtgatgatggggtcacatatcgataccgtcgccaccggtgggttatacgatggcaactacggcgttatggccggccttgaggtgattgccaccctccaggatgccgggatccgcacccgacgaccgttggcggtaaccttctttactaacgaggagggggtgcgatttcagcccgatatgatgggcagcgtggtgtttgccggcgagtatccgttggcgcaggcgctcgcggcaaaagatctcgacggtatcacgctcgatgaagcgctgcgtaacattggttataaaggcgaacgtcagccgggagatatggcggtagatagctacgttgagctgcatatcgaacagggaccaattcttgataaagagcagattgatattggcgtggttaccggcgtacagggtatttcgtggcaggaatttaccctgagaggcgtatcgaatcatgcgggtactaccccaatgtccatgagacgtgatgccgggctggcggctgcgaaaatcgctgtttttgcccgtgagctggcgctaagccttggtggtaatcaggtagctaccgttggacatttcagcgtgaagcctaatctgatcaacgtcattcccaaccatgtcgtcatgtcagtggatctccgcaataccgataatgcgatcttatgtctggcggagcagcaattggccgaatttgtcgcgaaaacgtcgcaggaagagggcgtggagataaccagccgctcactggtgcgctttaatccggtcatttttgccgatgagatcgtcaatgcggtggaagccgaggcggagcgtcaggcgctcagttaccgacgtttgccaagcggcgccggacacgatgcacaatttatggcgtcggtatgtcccgccgggatgatttttgtcccctgcgtcgatggcattagccataacgtcaaagaacatagcgcagccaaagatctgattgctggcgccaatgtgctgctgcaggtggttttacagcgcgcccagcgtatggactaa

SEQ ID NO: 240039 - DNA, 420 bp, Klebsiella pneumoniae
atgcaggagtacgatgacaaatggcatcaggacggtctggtgatggataagtggtttatcctgcagtccaccagcccggcagccaacgtggtggaaaccgtgcgcggtctgctgaaccaccgttcgttcagcatgagcaacccgaaccgtgtgcgctcgttaatcggcgctttcgccagcagcaacccggcggcgttccatgctgaagatggcagcggctatcagttcctggtggagatgctgaccgagcttaaccagcgtaacccgcaggtggcgtcgcgcctgattgagccgttgattcgtctgaagcgttatgatgagaagcgacaggcgctgatgcgcgccgcgctggagcagctgaaggggctggaaaatctctctggcgacctgttcgagaaaatcagtaaggcgctggcgtaa

SEQ ID NO: 240040 - DNA, 699 bp, Klebsiella pneumoniae
atgaacgcactccggggccagcgccagcatcagcgccgtttcgctatgcccggcgtgcatcgccatccgctgttcatgcgggctgagaaactgtttttcgcagttgggcacgttgaacacgtcgtgggggatggcgatgaaatccccgtggcgcaggcgcatttcccggcaggcgatctgcaggatctgcggctggccgccgtggccgttgatcatcaacagcttgcgaaaaccggcccgatagagagattcggcgatctccagcagggtatgcagcagcgtatcgccgctaagggtcagggtgccgggaaaatgcagatgctcctcggacttaccgtagacgatcggcggaatggcgtaggccgggatcgtcgccggcagcctggcgagggcatggcccgccacgccggaagatatcacgctgtccaccgagcagggcaaatgcgggccgtgctgttcgatcgccccggtggggaggacgataaccgtattgcttttatccggcagggcggccacgtccgtccagctcagaaaaggaagaaagcgcgcggcaggaatgtaaccgttaatcatcgcggtgcctcggagttaaatgacgggggtaaccagacggtcgcttcgacttcaatcagtaccgtggcgtcgggcagcatttcgctgacctgcaccacggtggaaacgggcggctggtcggggtaa

SEQ ID NO: 240041 - DNA, 480 bp, Klebsiella pneumoniae; identical to SEQ ID NO: 135237

SEQ ID NO: 240042 - DNA, 969 bp, Klebsiella pneumoniae
atgcacagccacgatcttatttcggtctcggtcggggaaatacgccccaacggacagggaaatctatccataattttgcaggcggcggccggtgaaatattaccggcctactccgccggggcgcatatcgatattattattcccggcgtcggcccgcggcagtattccctgtgcggcacgcctgaccgcagtaatacttatgaaatttgcgtcagactgactgacacctccaccggcggctcacgctatttgcaccagcagctcaaagccggcgatcggctcgccatttcgccgccgcgcaaccattttcccctgccgcaggccgggcgctacctgctgtttgccggcggtatcggcatcacgcctttgctggcgatggctgaagcgattgccgccagaaagggggcgctggagctgcattattatgtcgccagttcgcgccagaccgccttctccccgcgcctgaaccagctgactgcgaacagcacggtggccattcactgcagcgaggaaggcgcgtcgtttcgccagcgggtccccgaatgcttaactgtgccccaccctgataccgcagtaatagcctgcggcccggagggttttattcagagactgcggtcggtcatggaggaatatcgctggtcgccgtcgcagttcgtattcgagcgttttactcccgcggcggaaaataatactgcggcgaaaaatgcgttttatattgagctggcctccagcgggcagcgcctgcaggtggccgcggatcaaaccattgctcaggtattacagcacgccggggtggaggtaatgctctcctgcgaacagggaatgtgcggctcctgtattaccggggtcctcgacgggatccccgagcaccgggacagcgtgctgacggcggaagagaaagccggcaacgaccagatcacgctctgctgttcgcgggcgaaatcgccgggtctggttttggatctgtga

SEQ ID NO: 240043 - DNA, 1419 bp, Klebsiella pneumoniae
atgtcattaattattaaaaatgcccatgccatcctcagcggtctgcccggagaggcggcgcggctggccgggccggatattcgcatccgcgacggcaagattgccgccatcggcagcctgacgccgctgccggaagagcgacagatcgatgcccgcgactgcgtgatctatccggcgtgggtgaacacgcaccaccatctttttcagtcgctgctgaagggcgagccgcaggggctgaaccagagcctgacggcctggctgagcgccacgccgtaccgctttcgcgcggctttcgatgaacatacctttcgtctggcggtgcgcattggcctggtggagcttctgcgctcgggctgcgccagcgtggcggatcacaactacctgtactggccggatatgcctttcgatacctcggagattgtcttcagcgaaggggaagcgctggggatgcgcatcgtcctgtgccgaggtggggcgacccagggccgggcggtggaacaggatctgccggtggcgctgcgtccggaaaccttcgacagctatatggcggatgtcgaacggctggtcagccgctatcacgacccccggcccgagtctctgcgccgggtggtgatggcgcccactaccgtcctgcactccgcgccgggcgcccagctgcgggagatggcgaagctggcccgccagctgaggatccggctgcacagccatttatcggaaaccgtcgattatctcgatgccgcgcggcagaaattctccatgacgccggttcagtactgtgcggaacacgactggctgggaaatgacgtgtggtatgcccatctggtgaagctgctgccggaggagattgccctgctgggccgtaccggaaccggcatcgcccactgcccgcaaagcaacggccggctgggcagcggcatcgccgatctgctggcgttagagcaggccggggtcccggtctcgctgggggtggacggcgccgcctcgaatgaagcggcggatatgcaaagcgaagcccatgccgcatggctgctgcagcgcgcgcgcaaggggatgctggcgcagccgcgctacgccgggggcaccttcgagggcggggccgatgcggccacggtggaggatgtggtgcgctggggctgcgccggcggggcgcagatcctcggcttagcgcagagcggcaccctgcaggtcggcatgcaggcggacctcgccatttaccggctggacgatccgcgctacttcggcctgcacgatatggccattgggccggtggcctgcggtgggcgcgccgcgctgaaggcgctgctgctcaatggccgccccatcgtggaagacgacgccattcccggtctcgaccttgacgcgatgcgtcacgacgcgctggcggccgtccgtaccctccaacagcgcgccgctgtttaa

SEQ ID NO: 240044 - DNA, 318 bp, Klebsiella pneumoniae
gtgcaggtcggcaaacgactcaccgctgtcgcgcgccgggaagatatcgttggccgtcttggcggcgatgagtttttgatcgtcggtagcgcccagcagcctgccgcacagcaggcgtatgtcacgtctctgcgtcaggctctgtgcggcgtctacttcctcggcgaacagcgtatcgactatgagggcgctagcttcggggtggtcacctgcgatccgcagagtatcgatgttgaagcggccttacgcgctgccgatgaggcgatgtaccaggataagaagtcccgccgccaggagaatttcattcatattgactaa

SEQ ID NO: 240045 - DNA, 243 bp, Klebsiella pneumoniae
atgggtatcgacactgtggcgctggaaggcaagggcttcaaacgtctggttgaagagggcacggacgtgaaggcgggtgagccgattctggaaatggatctggacttcctcaacgccaacgcgcgctcaatgatcagtccggtcgtctgcagcaacagcgatgactacagcgcgctggtgatactggcgagcggtaaggtcgttgctggccagacgccgctgtatgagattaaaggcaagtaa

SEQ ID NO: 240046 - DNA, 597 bp, Klebsiella pneumoniae
  misc_feature (317)..(326): n is a, c, g, or t
gtgattaacgttctgattatcgaagacgaacacgctatccgacgctttctgcgcaccgcgctggaagccgacggcatgcgcgtatttgaagcggaaaccctgcagcgtgggctgattgaagccgccacccgtaagcccgacctcgcgatcctcgatctcggcctgccggatggtgacggcattgattttattcgcgacctgcgtcagtggagccagatgccgattatcgtcctgtcagcgcgtagcgaagagcatgacaaaattgccgccctggatgccggcgccgatgactacttaagtaaaccctttggcatcgnnnnnnnnnncaatatccccgcccgccgcatcctgcgcggcagcgaagagatccacctgacgcctatcgagtttcgcctgctggcggcgctgttgaataatcccggcaaagtgcttacccagcgtcagctgctgaatcaggtgtgggggcctaacgccgtggagcacagccactatctgcggatctatatgggtcatctgcgacaaaagctggaggccgatccggcacggccgcagcatttgctgaccgaaaccgggattggctatcgctttatgccctga

SEQ ID NO: 240047 - DNA, 507 bp, Klebsiella pneumoniae
atgtcattgattcgtccggcacttgtgctatttattctgttaacgctgctcaccggcggcgtctatcctctgcttaccaccagcctgggacaatggtggtttaactcacaggccaacggctcgctgatccgcctgaacggtgaagtgcgcggctcggcgctgattggccagaacttcaccgccgcaggctatttccagggccgcccgtcggccaataaagcggtgagcgagcgcgtgcaggccctgcgcgccgccaacccggacgccgacccgcgggtgccggtcgaactggtcaccacctcggcgagcggtctcgataacaacctgactccggccgccgcgctgtggcaggtgccccgggtggctcaagcgcgccagctgagcgttgagcaggtaacccagttggtgaatcaggccacacaaaccccgctgctgagcttccttggccagccggtggtcaatatactgcaactcaatatggcgctggatgccctgaaggataagtaa

SEQ ID NO: 240048 - DNA, 2049 bp, Klebsiella pneumoniae
atgagtcgcaaacaattagccctgctggagccgacgctggtgcgccaggcgctgctggatgccgtgaaaaaactcagcccgatggtgcaatggcgcaatccggtgatgtttatcgtctgggtgggcagtctgttaaccaccctgctggcgatcgccatggctggcggcgccctgaccggtagcgccacctttaccgccgccgtcagtatctggctgtggtttaccgtgctgttcgccaactttgccgaagcgatggcggaaggccgcagcaaagcccaggccaacagcctgaaaggggtgaaaaaaacggccttcgcccgcaaactgcgcgccccgcagcataacgcgccggtcgaccacgtgccggcggaagacctgcgcaaaggcgacgtggtgctggtggaagccggggatattatcccctgcgatggcgaagtcatcgaaggcggcgcctcggtggacgaaagcgccattaccggcgagtctgccccggtgatccgtgaatccggtggcgattttgcctcggtgaccggcgggacacgcattctctccgactggctggtgatccgctgcagcgtgaacccgggagaaaccttcctcgaccggatgatcgccatggtggaaggcgcccagcgccgtaaaacgccgaacgagatcgccctgacgatcctgctgatcgccctgacgctggtgttcctgctggccaccgccaccatctggcccttctcggcgtggagcggcaatgcggtcagcgttaccgtactggtcgccctgctggtgtgcctgatcccgaccaccatcggcgggctgctgtcggccatcggcgtcgccgggatgagccgtatgctcggcgccaacgtgatcgccaccagcggccgcgcggtggaagccgctggcgacgtcgatgtcctgctgctggataaaaccgggaccattaccctcggcaaccgccaggcttccgccttcctgccggctcgcggcgtggaagagcgaaccctcgccgacgccgcccagctctcctcgctggcggatgaaacccctgaggggcgcagcatcgtggtgctggcgaaacagcgctttaatctgcgcgaacgcgatctgcagtcgctgcacgccacctttgtcccctttaccgcgcaaacgcggatgagcggcatcaatatcgatcagcgcatgatccgcaaagggtcggtggacgccattcgccgccacgtggaggccaacggcggccacttccctgccgatgtcgataaacaggtggaagaggtcgcccgccagggggccacgccgctggtggtcgccgaaggcgaaaaggtgctggggattattgcgctcaaagatatcgtcaaaggcggcatcaaagaacgtttcgcccagctgcgcaaaatgggcattaaaacggtgatgatcaccggcgataaccgcctgaccgccgcggcgatcgccgccgaggccggcgtcgatgatttcctcgccgaagcgacgccggaagccaagctggcgctgatccgccagtaccagtcggaaggtcggctggtggcgatgaccggcgacggcaccaacgacgcgcccgcgctggctcaggccgacgtggcggtagccatgaactccggcacccaggcggcgaaggaagcgggcaacatggtcgacctggattccaaccccaccaagctgattgaggtggtccatatcggcaaacagatgttaatgacgcgcggctcgctgaccaccttcagtattgccaacgacgtggcgaaatatttcgccattattccggcggcgtttgccgcggtctatcctcagctggccatgctgaacgttatgggcctgcattcgccctcatcggcgatcctcagcgccgttatcttcaacgcgctgatcatcgtcttcctgatcccgctggccctgaaaggcgtcagctatcgcccactctccgcctcggcgatgctgcgccgcaacctgtggatctacggcctcggcggtctgctggtgccctttatcggtattaaagccatcgacctgctgctgaccctgagcggtctggtgtga

SEQ ID NO: 240049 - DNA, 501 bp, Klebsiella pneumoniae
atggctgcccagggatttttattattagccagctatctgctggtattgctggtgctggcgcgcccgctggggatgtgtctggcgagaatggtgaacgatatcccgcttcccggcctggccggcgtcgagcgcgtcctgtggcgcgtggccgggatccgcgccgaggagatgggctggctgcagtatttgctggcgatcctgctgtttaacgccctcggcggcctggcgctgtttgccctgctgatgctccagggcgtgctgccgtttaacccgcagcacctgccggggctgtcatgggatctggcgctcaataccgcgatcagctttgtcagcaataccaactggcaggcttacgccggcgaaagcaccatgagttatctcagccagatggtcggcctgacggtgcagaatttcctctccgccgccaccggcatcgccgtggtcttcgccctgacccgcgccttcgcccggcagaaaatgtcgaccctcggcaatgcctag

SEQ ID NO: 240050 - DNA, 375 bp, Klebsiella pneumoniae
  misc_feature (334)..(343): n is a, c, g, or t
atgaaaattgatttaaatgccgacctcggcgaaggctgcgccagcgatagcgcgctgctgcagctggtctcttccgccaatatcgcctgcggctttcacgccggcgatgcggttctcatgcagcaatgcgtgcgcgaggcgctgaaaaacggcgtcgctattggcgcacacccgagcttcccggaccgggaaaatttcggtcgaaccgcgatgcagttaccgccagagatggtctacgcccaggtgctgtaccaaattggcgcgctggcggcaatcgtacacgcccaggggggcgagctgcggcacgtcaaaccgcatggcatgttgtacaacnnnnnnnnnnactcgagtttcattttcctgtctccgcattag

SEQ ID NO: 240051 - DNA, 465 bp, Klebsiella pneumoniae
ttgttaaccatcggcattgtgctgctgggcgggatgggcctgctggtgagccgaacggcgcgtctgcagcgcgacttcctggcgacgcttcacacgacggccgacgcgcagctgctcgcctcgcttaagcagcgcgagcaggcgatgcgtgaggcgtggcagcagcatcaacggcagcgccagcagtaccagcgcagatcggcgatcgccgcctggcaacccaggctgcaggcgctggcggcagatctgcccgcgcaggcgtggctgacgcggctggagtaccagggcgtactcctcacgctggacggcctggcccttaacctgcaggcgctaaccagcgtggaggctgcgctgactcgcgtcgcgggattcgcgccggcaaaagccggcgggacccagcgcgacgccgaggggcgttggcagttcagttttaccctgacgggagcgcgcgctgatgcggattaa

SEQ ID NO: 240052 - DNA, 504 bp, Klebsiella pneumoniae
  misc_feature (452)..(461): n is a, c, g, or t
atgaagtatcgcataaccacctggcttgccgctgcgctgatgctgtcgagtcttcacgccactgcggcgagtttatccgatatccaggtctctaacggagaccagcaggcccgtattaccctaagctttgtcggtgagccggagtactcctttaccccacagggtaaacgtctggtggcgctggatatcaagcagaccggcgtattgcagggactaccgctgcagtttagcggcagcaacctggtgaagagtattcgcgccggcacgccgcaggatacgcagacgctgcgtctgctggtggatctgacggaagatggcaaaacccgggcggtgaagcaacagaacggggcgaattacacggtggtctttaccatcaacgccgacgcgccgccgccgccgcctccgccgcccgtggtggtgaaacgggccgacccgccgccggtgatgccttnnnnnnnnnncgtaacccgttcagctcgtcgggtcatgaacggcagacggtga

SEQ ID NO: 240053 - DNA, 435 bp, Klebsiella pneumoniae
atgccctctctggcggggggcagcgcatggatcaacagcccggcgttaactcaggagcgtctgaagggcaaagtggtgctggtggatttctggacccgggagtgtatcaactgtcagcataccctgccttacgtgcgcgactgggcgaacaaataccgcgcggcgggcctggtggtgattggcgttcataccccggaatatccctgggagcgttcgttgcccctgctgcgccaggcggtgaaggactggcgggtaacctacccggtggtggcggataatgagtacgccatctggaacgccttcggcaatcagtactggccggcgcattacattttcgacgctcgcggacagctgcgttataccgcattcggcgaaggggattatgcccgccaggagcaggtgatccagcagctgctgcaggagagcaaagcttga

SEQ ID NO: 240054 - DNA, 630 bp, Klebsiella pneumoniae
gtgctgcgcgctggtctgcgccttatcggcctgcagccgggatgtaaaacgctctcttcgctgtttctgatgctgccgcagtatgccggacagccgctggggtttgccgactgcagcgtggtgccgcagccgaccgcggcgcagctggcggatatcgcgattgccagcgccgacacctggcaagcgatcgctggcgaagcgccgcgggtggcaatgctgtccttctcgacacacggcagcgcccggcatccctgtgtggctaacgtccagcaggccacggagatcgtgcgtcagcgggcgccgcagctgatggtcgatggcgagctgcagtttgacgccgcctttgtaccggacgtcgctgcgcacaaggcgcccggcagcccgctgcagggccgggccaatgtgctggtcttcccgtcgctggaggcgggcaacatcggctacaaaatcgcccagcggctgggcggatatcgcgccatcgggccgctgatccagggcctggccgccccgcttcacgacctctcgcgaggctgtagcgtagaggaaattatcgaactggcgctggtggcgtcggtaccgcgccagacggacgcaagccggatccccgactcgtccacgctggttgaatga

SEQ ID NO: 240055 - DNA, 846 bp, Klebsiella pneumoniae
ttgatcctccgtggcgatcagcagcgacggccgggcgtcttccagcatcatccgcaggcggtcgtccgggtagccggtgtccagcggcagccaggcggcccccgcttcgacaatgccgtgcagcgccagggtcaggaacaccgagcgcggcagggccaccgccacgctgtccccaggcttcacgccgcgctgacgcagcagctgcgcgagcgccaccacctgctgacgcatctcgcgatagctgaactgccagcgggcgtccgccagcgccggcgcatccggggtcttccgcgcctggtcggccaccagcgcgctgagggtggtggcaggcagcggcacagcggtatcgttgaccgccgccagccgggccagctcgtcggcggagagcatctctgcttcgccgcagcgcagcgtcggatcggcggcgaactgcgccagcagcgcggtcagtcgcgccatgtggcgacggagctcggcttcgtcgtaccgggccttgttggcgaggatctccagcgacagcccgccggtctcatccgggaacagcgccagctcgagatcgttgaccgggccggtggcgagggtgtgggtcactgcctgcacaccatcgatatccagctggtaatcaaagactttgacgttcagcaccgggccgaacagcggttcgtcccctgccgctttgccgctgtcgcggacgatctgctcggcgtcatagcgctgatggcggcgcatctttttcagctgagcggcgaggcgcatcgccaggtccgccagcgtctcccgggcgtcaatatgcaccgccagaggcaggacattgagcaccggccccgtcgaggtcagcgcggctga

SEQ ID NO: 240056 - DNA, 285 bp, Klebsiella pneumoniae
gtgcggagcgataacttcagccactacggcttctggcacgatctcggcaactggctcgacgacagcggactcaacgcgcactttctgtgccagctggcgcggtttacgacgcggcagagtttgtacacgctcttcctgctccgtctcctgcacaaccggctcttcgcgagtctgcgctttggcttcctgctgcgcctgacgtttgtcgtcactgcggcggcgggtgcgttcgcggcgcggctgctgctcgtcacgggatttcgctttctccgcgtcgtcgcctga

SEQ ID NO: 240057 - DNA, 1437 bp, Klebsiella pneumoniae
gtgcggcgtttgcatttcgtcgtttggcacgataataacgcgcacatcgccctgacgggattcgatagcgctcactgcggcacgtttttcgttcagcagataggaggcgatcggtaccggaacaatggcgtggacttctttggtattctctttcagcgcttcttcttcgatcagacgcagaatagagagcgacagcgattcgttatcacgcacggtgccggtgccggagcagcgcgggcagacgtggtggctggactcgcccagcgacgggctcaggcgctgacgggacatctccagcaggccgaagcgcgaaatatggctgatctgaatgcgcgcacggtcctgacggacggcttcgcgcagacgattctccacggcgcgctggtggcgaaccggggtcatatcgatgaagtcgataacgatcaggccgccgaggtcgcgcagacgcagctggcgggcaatttcgtcagccgcttcgaggttggtattgaaggctgtctcttcgatatcgccgccgcgggtggcgcgggcggagttgatatcgatcgcggtcagcgcttcggtgctatcgataacgatagacccgccggaaggcaggcgcacttcgcgctggaaggcggactcaatttgcgattcgatctgataatggctgaacagcgggatttcaccggtgtacagttttattttgctgctgaaatccggacgacccagcgcggcgatatgctggcgcgccagctcaagcactttcgggttatcgatcaggatttcgccgatgtcctggcgcaggtagtcacggaaggcgcggacaatgacgttgctttcctggtggatcaggaacggcgccggacggctttccgcggctttctgaatcgcttcccagtgcttcaggcggaagctcaggtcccactgcagggcttcggcggatttgccgacgccagcggtgcgaacgatcaggcccatgccgtccggaagctccaggctcgccagcgcttctttcagttcggtacggtcgtcgccctcgatacggcgggaaattcccccggcgcgcgggttgttcggcatcagtaccagatagctgcccgcgaggctgataaaggtggtgagcgcagcgcctttgttgccgcgttcttctttatcaatctgcacgataacttcctgaccttcccgcagtacgtctttgatattaggacgaccatgcgcattgtagttggcggggaagtattcgcgggcgatttctttgagggggaggaaaccatgacgctcggcgccgtaatcaacaaacgcggcttcaaggctgggttcaatgcgggtgattttgcctttgtagatgttcgcttttttctgttcgtgcccggggctttcgatatccaggtcgtacaggcgctgcccatcaacaagggcgacgcgcaactcttcctgctgagttgcgttgattaa

SEQ ID NO: 240058 - DNA, 528 bp, Klebsiella pneumoniae
  misc_feature (483)..(492): n is a, c, g, or t
atgagtggcgctaatgcgtccggctatttagaatcgcgcaccatgaaaactgagaccccaaccgtaaaaatggttgccattgctgctgatgaagcggggcaacgtatcgacaactttttgcgtacgcaattgaaaggcgtaccgaagagcatgatttatcgcatcctgcgtaaaggcgaggtgcgggtaaacaaaaagcgcgtgaagccggagtataagctggaagcgggcgatgaagtccgtatcccgccggtacgcgtggcggagcgtgaagaagaggcggtatcgccgcacctgcagaaagtggccgcgctctctgaggtgatcctctatgaagacgatcatattctggtgctcaataagccttctggtactgcggtacacggcggcagcggcctgagcttcggcgtgattgaagggctgcgcgccctgcgcccggaggcgcgcttccttgagctggtgcatcgtctcgaccgggatacnnnnnnnnnnagcgctgcgttcgctgcacgagcaactgcgcgataa

SEQ ID NO: 240059 - DNA, 441 bp, Klebsiella pneumoniae
atgcagaaagattatctggcgctggtgcgcggccagtggcagtcgcataccaaagtggtccaggccccgctgttgaagaatattctgcagagcggggagcgcatcgttcgcgtgagtcaggaaggcaagccgtcggagacgcgctttaaagtggaagagcgttacgaattcgccacgctggtgcgctgcagcccggtcaccggccgcacgcatcagatccgcgttcatacgcagtatgccggccatcctatcgcatttgacgaccgctatggcgaccgcgagttcgacaagcagctgtccgctaccggcttaaaccgcctgttcctgcacgcggcggcgctgaagtttacccacccggggagcggggaggtgatgcgcgttgaggcgccgctggacaaccagctgaagcactgtttacaggtgctacggaagagcaaataa

SEQ ID NO: 240060 - DNA, 1809 bp, Klebsiella pneumoniae
atgagcgtgaatgtaaaagccgccaccctaaccaaccttgttaaatataaaacagacagggcgtcattgcgtagagtacgtgatgatatgaaaaaattacagaaggatttcagcaaaacagagggaactatagccaaagcaaagatgcaggctcaaaaacaggcgtacactgcacaaatgcagcagcagaaacaggttcaacaacagcagaaacaagctgcaaaacaacaagccgcagacgctaaatcaaaagccaacgaacagaaaaaactggcagcagcgcaagctcgtgctttaaaaattcaacaacagcagcaagccaaaaccgccaaaatcagcgagaatgcacgattggcagagcgcaaggcattatttgatatcggcagattgcaggggttaaatggtactgaacgttttcaggccatcaaacatgctcaggggttaattgattcctataaaaatcagactattaccttgagagacctcaatcaacaactctcacagtacttgactacgcaacgtagtattgccagaaataatgccaaacaggccaaacaatcaggtaaggcgaaaaaatctggatcatctggctggctgagtcgccaggcgagcgctttcattcctggggagatactcgggccagtagctggcgcttatgctgcccaacaggcctatcagattatggcgggaacactggctggggccattgagagaaaccagggcaggaaaatgatccagagttttggtggaaatgaccttgagtatatgagtttgcgccgtgcctctctcgctactacaggttttgacatctcccgtgaaaaatatgctgatatcagcaaggattggttagataaacaaggtgatttatcttttggtaacacggataaaaatggtaattttaccggaggtggagaactatcagacctcgttaacgtaatgcgtcaacgtcttggatataccaatcaaggggcagtcgccaaattaaactcatttaaaacaccagttgagtttgctgtatttatgcgtggtctcagagatgcaggtaaagtgactcaacaggaattcgttaactttggtgaacgaattaacgatatgagctatgtattgaactctgtttcaagtggtggtgaaaatcttctcaagattcaaaatgaattggttgattctcatttagcactaacgactgctcaacagaaatctattaataatctgactgagatgtcagcactatttaaccaagctaaagaatctttaggcgatcaatttgcggcatcttttagtaaaagtttagaggatttaggaattaatacacaaaatctttcctctgaaatgggaacattagttccgttggtaaaagatttggggacggggacggctcagactgtgaaaggttttaaagaccttctggatgtgttgtctattatcacagaatggaataataaattcctcggaactgataaaccagaggaacagaatattttccagcaaggtgcaacatttgttggtgagtctttattgccgccgggtgtccttgatatggcaagccggattaaaaatatagttagccctggctctgattcttctgttgcatcacaggtacagagtggaacgttaatgaatcagatgatgccagcaaccccagctatgcaatatcaaccagtcatcccggatttaaaagctgattttaaccttaccgtaaatccatctcctgaatttggaatgatggtagaggcggtcgctgatcaaagaattgagtgggcatttgatgatcagaacttccaaattaatcaaagtattttaggggaataa

SEQ ID NO: 240061 - DNA, 1020 bp, Klebsiella pneumoniae
atgccttttgatactcgcaacaacgcattcgaatatgcatcaccatttgaatattccaacgaacctaacctgattattaccaatcttggattgttcgaggaagagaatcatactaaaaactcaattcttctggataaaatctttgttcaatcgaacgagacagcacctgaaaaaatgccttatgctcaaagtgactggaacagcgcccagcgctctgactataccagtattctctatgatatggtttacacaaatagtctgaatactgtttcaagtcgtgatatcgaattgcttcgtgctccaggtactgaccatgaagaaaacattgcaatggtgctggctgaatactcacaacgtcagtattcacagatttctaatacagttgaacaatatctgattgatgccctgtttggtcttaaagtcgaatcacagtacacaggtcagggaaatattgacttcctggcaggcaatgctaaaacttcctatgtgatgagtgttgcaacctcagcaaacgtttttgaacagttagacgaggtaaaccgcatcattaacgttaagttaggttctggcctcgccaaaaagcgtaagggaacggtcattcttgctgctggtaatgctgctaaagctttgaaatatcaccagtctatcaaagattacatggtatataccttaagccttaacgattctgataactttgctactaaaatcgttagtcagaacccagcgtttagttcctggaaactggattcagtaaacgttatcgatgtaaccggatatactgagatcacagattatattggtgaaaatggttttgctgttgtacctatggttgacggcggatttaaacttcatacggggattggcgttcgccatagtcgtttaggtcgtgagcctggccttgtgcatcaatatatgaccgatgtagaccgtatgggctggcctgctatccataccgaaagcgcattcctgccacaggttaacattcctgattcaattgtatttggttctatctccagctaa

SEQ ID NO: 240062 - DNA, 411 bp, Klebsiella pneumoniae
atgcattacatcatccgcgattttgaccgtaagcacttcgaggcgcgcaagcgcaagatgatggagatcgccaaaaaggtcggcaagggactgcacccggactgttatattgagctggtgatcgaggacagttattacaacatgcatgagcaggtgatcgcccatccgcacgtggtcgatatagcccgccaggcgatggtggactgcgatattgaaccgcagatgaagccgatccgcggcggcaccgacggcgcgcagctctcatttatgggactgccgtgcccaaacctgtttaccggtggctacaactatcacggcaaacatgagtttgtcaccctggaaggaatggagaaagcggtgcaggtgatcgtgcgtatcgccgagctgacggcggcacgcaaagggcattaa

SEQ ID NO: 240063 - DNA, 816 bp, Klebsiella pneumoniae
atgagtctgttaattgcattgctacaggcgctggtgctgtttgccgtcgcgccgctgttgtccgggatcgttcgcgtcgcccgcgcgcggctgcataaccgccgtggaccgggggtactgcaggagtatcgcgatatcctgaaactgctgggccgccagagcgtcggtcctgacgcctcgggctgggtgtttcgcctgacgccgtacgtcatggtgggcgtgatgctgaccatcgccaccgcgctgccggtggtgacggtagactccccgctgccggtgctgggggatctcatcaccctgatctacctgttcgccatcgcccgtttcttctttgccatttccggtctggacaccggcagcccgtttaccgcgctgggcagcagtcgcgaagcgatgctcggcgtgctggtggagccgatcctgctgttgggcctgtgggtggcggcgcaggtcgccggctcgacccatatcagcgccatcaccgataccctttaccactggccggcggcgcgcagcattccactgattctggcgttatgcgcctgcgccttcgccacctttatcgagatgggccagctggtggtgctgcagatgtttgtcggggtcttctttccgtggggccagatgaccagcttcagcgtcggcggcctgctgctggcgctggtagtcgccatcgttaagctggtggttggggtgctaattatcgcgctgtttgaaaacagcatggcgcgtctgcgtttttgtgccacctcccgcgtcacctgggccgggtttggtttcgcctttttagctttcgtctccttgctggtggcgtga

SEQ ID NO: 240064 - DNA, 1323 bp, Klebsiella pneumoniae
atgagctctctgtacgctaaactgatcgacgtgatcgaacggcagatcacgcctatggccggcgcgatcggccagcaaaaatatgtcacatcgatccgcgatggctttatcactgccctgccctttatgatcgtcggctcgttcctgttggtgtttatcttcccgccgttttctccggatacgacgtgggggtttgcccgcgcctggctgcaattttcgctcgatcatcgcgatgcgctgatgctgccgttcaacttcagcatgggggtgatgaccctgtttatcgccgtcgggatcgccgccagcctcgccaaacaccatcatctggactcgctgaccgccgggatgctgtcgctgatgtcgtttctgctggtagccgcgccgctgaaagatggccagatctctactgcctacttctccggtcaggggatctttaccgccattctggtggccatctattccaccgagctgtacgccttcctcaaacggcataacatcaccattcgcctgccgccggaagtgcctgccggggtggcgcgctcgtttgaaatcctgatcccggtgctggcgatcattctgacgctgcatccgctgaacctgtttatcgaagcccagctggggatgatcattccggaagcgatcatgtcgctggtgaagccgctggtcgcggcttccgatacgctgccggcgatcctgctgtcggtgctggtctgtcaggtgctgtggttcgccgggatccacggcgcgctgatcgtcaccgggatcatgaacccgttctggatggccaacctgtcggtcaatcaggcggccatggccgctggcaccgctatcccgcacatctatgtccagggcttctgggatcactatctgctgatcggcggcgtcggctccaccctgccgctggcgctgatgctgctgcgcagcaaggccgtgcatctgcggacgatcggccggatgggggtcgtgcctggggtattcaatattaacgaaccgatcctcttcggcgcgccgatcatcatgaacccgctgtttttcctgccgttcgtgctggtgccgatggtgaacgcgaccctggcgtacttcgcgctgaagctggacctggtcagccgcgtagtgtcgatgacgccatggacaacgccggcgcctatcggcgcctcgtgggcggcgaactggagctttagcccggtgatcctgtgcctcatttgtatggccaccgccatggtgatgtacctgccatttctcaaagcttacgaaaaacagctgctggcccaggagcgtgaaaacgccgtcggccaggctgacaacgcggcgcaaaccgcttaa

SEQ ID NO: 240065 - DNA, 456 bp, Klebsiella pneumoniae
gtgtcccttgccaatcacatagcggcaggcgctttcggtggcaaaggcgaagtcatagccctggctgttgctcccggcgacgccgaagcggtcaaaggcgataacgttgcgcggcgcgtcggcggcaacggcgcccagcaccaccaccgccacgcactggcgctgcagatcgtcgattaccgccgcctgctctaccgggtcgctgacgtactggaccagcaggcttttattcagccctttcagcgcctgagagagcagcggcagcagacgtgcgccgtggctttcgtcctgcgcggaaatcaccagaccaacgtggctggatgtctgactggcgaggttttgcgcggcaaagctcgggcgatagttgagttcttcaacggcccgcagcacagcttcccggctctcttcgcgcacgccccgggtgccggtcagcacgcgggataccgtcgctcttga

SEQ ID NO: 240066 - DNA, 1302 bp, Klebsiella pneumoniae
atgaaaaagctgttcgtgcagttctatcttctgctcttcgtctgctttctggtgatgaccatgctggtcggtctggtctataaatttaccgcggagcgcgccggacggcagtcgcttgacgatttgatgaaaagctcgctgtatctgatgcgcagcgagctgcgggagataccgccgcgcgactggagcaagacccttaaagagctggacctgaatttatcgtttgatctgcacatcgagccgatcagcaaatttaagctgtcggaaagctcgatgcagcacctgcgcgccggcgatatcgtcgccctcgacgatcagtacacctttattcagcgcattccccgcagccactatgtgctgtcggtgggcccggtgccctatctctattttctgcatgagatgcgcctgctggacgtggcgctaatggcgtttattgctatctctctggcctttccggtgtttatctggatgcgcccgcactggcaggacatgctgcgcattgagacggccgcccagcgctttggcgaaggtcacctcagcgagcgcattcacttcgacagtatgtccagcttcgagcggctcggggtggcctttaaccaaatggccgataacattaatgcgcttattgccagcaaaaagcagctgattgacggcatcgcccatgaactcaggacaccgctggtacgcctgcgctaccgtctggagatgagcgagaatctcaccgaggcggaatcgcaggcgctgaaccgcgatatcggtcagctggaggcgctgattgaagagctcctgacctacgcccgcctcggtgagattctcgctcatctccagacggtgactcccgattttcccgcctggatcagcgatcacgtcgaggatatccagatggttaacccacagcgcgaggtcgccctggcgacgctgacccacggtaactacggcgcgctggatatgcgactgatggagcgggtgctggataatttggtcaataacgccctgcgctacagcagccagcgggtggcggtcagcctgacgctgcagggttcgcgcgcatcgttgctggttgaggatgacggcccgggaatcgcccccgaggagcgcgagcgggtgtttgagccctttgtccgccttgaccccagccgggaccgggcgacaggaggctgcggcctcggactggcgattgtccacagtatcgcccaggcgatgggcggcgaggtgcgctgcgaggccagccctctcggcggcgcccgcttctgctttagctggccggtctatcatcagctgcctgatttcacctctgcctga

SEQ ID NO: 240067 - DNA, 363 bp, Klebsiella pneumoniae
  misc_feature (252)..(261): n is a, c, g, or t
atggttgctgaactgaccgcgttacgcgatcaaattgatgaagtggataaagcgttgcttagcctgctggctaagcgtctggagctggtggccgcagtcggcgaggtgaagagccagtatggcctgccgatttacgtcccggagcgcgagtcggcgatgctcgcctcccgacgtgaagaggcggctgcgctcggcgtaccaccggatctgatcgaggacgttctgcgtcgcgtgatgcgggaatcctattcnnnnnnnnnnatcctattccagcgaaaacgacaaaggcttcaaaaccctgcagccgaatctgcggccggtggtcatcgtcggcggcggtgggcagatggggcgtctgtttga

SEQ ID NO: 240068 - DNA, 972 bp, Klebsiella pneumoniae
  misc_feature (951)..(960): n is a, c, g, or t
atggaaacgtcactggctgaggatgtaaagaaaccgacccggaccctgtcgccggacagcttcttctttatgtcgccgtaccgcagttttaccacttcaggctgcttccgtcgcttctcacagcccgccgttggcggcgatgcgctgaacggcgagttccagcagcagatggcggccgcctttgccgaggcccgggcggcggggatccgcaagccggtgatggtcggggctatcccgttcgacacctgtcagccttccgagctctatatccccgagcgctgggaagcgttctctcgcccggaaaagcagcgttccgcccgctatgccgcgccgctggaggcgatggaggtggtggagcgtcgggagatcccggagcaggacgcgtttttagccatggtggaacgcgccgccgcgctgaccgccaccccggaagtcgacaaagtggtgctatcaaggcttatcgatattaccacccgcgaccgcgtcgacagcggcgcgctgatggagcgactgatcgcccagaaccccgccagctttaacttccacgtgccgctctccgacggcggcgtgctgctgggcgccagcccggagctgctgctgcgtaaagaaggacagcacttcagctctctgccgctggccggctccgcccgtcgccagccggacgatgtgctggatcgggaagcaggcaacaggctgttggcctccggcaaagatcgccacgagcacgagctggtgacccaggcgatgaagagcgtgctgggcccgcgcagcagtcagctgtcgctaccggagtcgccgcagctgattaccaccccgacgctctggcatctggcgacgccgatcgcaggcaccgcgctggcggaagaaaacgccatgtcgctggcctgtctgctgcacccgacgccggcgctgagcggtttcccgcatcaggcggcgaagcgcctgattgcnnnnnnnnnncctgattgctga

SEQ ID NO: 240069 - DNA, 630 bp, Klebsiella pneumoniae
atgcagcgcatagcgtttgccctgcggccagtccggtgtttcaccgcccgcctggtgcatccccggcagccaccagcgcccggccactttgggtttacgcggatcggccagatcgatggtcaggaagatgtagtcggtaaaaccgtcgatcagcgcggacacatacgcccagcgcccgccgacgtaccagatgcggtgaataccgatgccgttaagcgacaggaaactgatttcccgcggctgcgcgggagtggaaatatcaaagatacgcagcccggcgctccagcccttgtcctgcacatcgctgaccgtgtcgcccaccgagcgggtgtagtacaccttctcatcagcaaaacgggcgtcagcaaacagatcccgggcgttgatcaccagcagcagatcgtcatgcgcctggagatgcacgttccaggtgcccggcggcgcggcaatatagttgacggtggtgggccgggtcggatcgcgaacatcgaccacggaaaaaccctgcgacaccatatggccgatataggcgaatccgcggtgcaccatcagctgcacgccgtccggacgaccgccctgatcgctatggccaatcagccgcatattgcggctgtattcgggggaaggtaa

SEQ ID NO: 240070 - DNA, 1635 bp, Klebsiella pneumoniae
  misc_feature (1570)..(1579): n is a, c, g, or t
atgcctttccgcgccctcatcgacgcttgttggaaagaaaagtacacctccgcccgcttcacgcgtgacctgatcgccgggatcaccgtcgggatcattgcgattccgctggcgatggcgctggcgattggcagcggtgtgccgccgcagtacggcctctatacctcagcggtggcagggattgtgatcgccttgaccggcgggtcacgctttagcgtttccggtccgactgccgcctttgtggtgatcctctatccggtttcccagcagtttggtctggcgggactgctggtggcaaccctgatgtcggggatctttttaatcctcttcggcctggcgcgctttggccgcctgatcgaatacatcccgctgtcagtcaccctcggcttcacctcggggatcggtatcaccatcggcaccatgcagattaaagatttcctcggcctgcagatgccccatgtgccggagcattatctgcagaaagtggcggcgctggcgatggccctaccgaccattaacgttggcgatgccgccatcggcgtcgttactcttggcattctgatcctctggccgcggctgggtatccgcctgccgggccacctcccggcgctgctgggcggctgcgcggtcatgctggtggtcaacttgctcggcggcgatgtcgcgacgatcggctcgcagttccattatcagctggcggacggcactcagggcaatggcattccgcagctgctgccgcagctggtattgccctgggatatgccgggctcaaactttaccctgagctgggcctcgctgcaggctctgctgcctgccgccttctcaatggcgatgctcggcgccattgaatctctgctgtgcgcggtggtgcttgatggcatgaccggcaccaagcacaaagccaatagcgagctgattggccaggggctgggcaacattgtcgcgccgttcttcggcgggatcactgccaccgcggcgattgcccgctcggcggcgaacgtccgcgccggcgccacatcgccggttgccgccgtgatccacgccctgctggtgatcctggcgctgctgatcctcgccccactgctctcctggctgccactgtcggcgatggccgccctgctgctgatggtggcatggaatatgagcgaggcgcataaagtcatcaatctgctgcgccacgcgccgaaggacgacatcgtggtgatgctgatgtgcatgtcgctaacggtgctgtttgacatggtgatcgctatcagcgtcgggatcgtgctggcttcgctgttgtttatgcgccgtatcgcacgcatgactcatctggcgccggtcaacgtcgaggtgccagacgatgtgctggtgctgcgggtaattgggccgctgttctttgccgccgccgaaggcttgttcaacgatctggagacccggatcgccggcaagcgcatcgtggtgctgaaatgggacgcggtgccggttctcgacgccggtggcctggatgccttccagcgctttgtgaacaagctgccggaaggctgtgaattgcgcgtatctaacctcgagtttcagccgctacgcnnnnnnnnnnaagccgctgcccggacgcctgagcttctaccccgatcgtcaggccgcgctggctga

SEQ ID NO: 240071 - DNA, 489 bp, Klebsiella pneumoniae
atgccttccacaggctgctctgctacggcttccgccaccaccggttcggcgataacctcttccgccagcggctcaaccaccgcaggctgttcaggcggttcgctgaccgcgggctccggttcaacaacaggcgtttcttcggtcagagcaggcgtttccacccactcttcttcctgcgcgctggcaggctccgcgaggtgcgctttttcgctttcgaccaccgtctcggtcacttcgacgacgtcttcggcaaacgcctccgggtctgctttcggcgcgctcggctcagcaggggtttcaaccgccggtatctcttcggcaaccgcttgctgttcttctactttttgctcagtctcggtttcctgtgcctgttctttctgtccaaagcccagccaggaaaagaagccacgttttttctcttttgccatttgcgaccacactcctcgctgtttattcatggcgcagcttcatcagaagctgaaaaaatga

SEQ ID NO: 240072 - DNA, 372 bp, Klebsiella pneumoniae
atgcgccgcattggggtaaacgccgtgatacaccgagcccgggaatggcccgaagccgattttgtagggcgcgaccttaccggtgagggccatggtcataaaggtacggccgtggaaaccgccgccgaaggtaatcagccccggacgaccggtgtaagcgcgggcgattttcaccgcgttctcgaccgcttccgcgccggtggtgaagaaagccgtttttgccggcccgtcaattggcgccagatcgttgatacgctccgccagcgaaacatagctttcgtacggcacaatctgataggcggtgtgggtgaaggcctgcagctggtcggcaaccgcggcgaccactttcggatggcggtgaccggtatttaa

SEQ ID NO: 240073 - DNA, 354 bp, Klebsiella pneumoniae; identical to SEQ ID NO: 149209

SEQ ID NO: 240074 - DNA, 1248 bp, Klebsiella pneumoniae; identical to SEQ ID NO: 149210

SEQ ID NO: 240075 - DNA, 255 bp, Klebsiella pneumoniae; identical to SEQ ID NO: 149211

SEQ ID NO: 240076 - DNA, 411 bp, Klebsiella pneumoniae; identical to SEQ ID NO: 149212

SEQ ID NO: 240077 - DNA, 420 bp, Klebsiella pneumoniae
  misc_feature (386)..(395): n is a, c, g, or t
atgaccgcccgcgaagtcaactttgacggtctgcccgggctgacccatcactacgccgggctctcctttggcaatgaggcttccacccggcatcgctatcgggtgtctaacccgcagctggcggccaagcaggggctgaaaaaaatgaaagccctcgccgacgctggctacccgcaggcggtgatcccgccgcaggagcgtcccaacgtgccgcttctgcgccagctgggctttagcggcagcgatgagcaggtggtggcccgggtggcgcagcaggagccggatctgctgtcggcggtgagttcggcctcggcgatgtgggtggcgaacgcggcgacggtgtgtccctccgccgattcgctggatggcctggtgcatctgacggnnnnnnnnnntgacggtggcgaatctgcaggataa

SEQ ID NO: 240078 - DNA, 138 bp, Klebsiella pneumoniae
atgatcgccagcaaagccgcgcgcatgcggtctatcgtggtcccggaagcggagaacagccgcgacccgcgctttgcgctggcggacgtcaagcttccgtcactgctggcactcactgctgagaacttgctcggctaa

SEQ ID NO: 240079 - DNA, 936 bp, Klebsiella pneumoniae
  misc_feature (920)..(929): n is a, c, g, or t
atgaattctctgtttgccagtacggctcgtgggctggaagagctgttaaaaactgaactggaagggcttggcgcgacggactgccaggtagtccagggcggggtccattttcagggggatacgcgcctgctgtatcaaagcctgatgtggagccggctggcttcgcgcatcatgctgccgctgggcgaatgtcgcgtatacagcgatctggatctgtacctcggcgtacaggccattccgtggacggagatgttcaaccctggcgccaccttcgcggtgcattttagcggcctcaatgacgagatccgtaacagccagtacggcgcgctgaaggttaaagacgccattgtcgacagcttcacccgtaagaatctaccgcgcccgaacgtcgatcgtgagtcgcccgatctgcggatcaacgtctggctgaacaaagagacggcgcacatctcgctggatctgagcggcgaaggcctgcacctgcgcggctatcgcgatggtaccggaatggcaccgatcaaagaaaacctcgcggcggcgatcgtcatgcgctctggctgggtaccaggtacgccgctgctcgatccgatgtgcggctccggtaccctgctgattgaagcggcgatgctggcgaccgaccgcgcgccgggcctgcaccgcggccactggggctttggcggctgggcgcagcacgatgacgccatctggaaagaggtgaaggcggaagcgcaaacccgcgctcgtcagggattggcagcgtatgagtcacgcttctacggctcagacgtcgacgcgcgcgtaatcgagcgcgcgcgccgcaacgcccgccgcgccggcattggcgagctgatcgattttgacgtgaaagacgtcgcccaactgaacaacccgctgccgaaaggcccgtacgggacggtgannnnnnnnnnacggtga

SEQ ID NO: 240080 - DNA, 186 bp, Klebsiella pneumoniae
atgcgcgtcattacgcttgcgggcagcccgcgttacccttcccgttccagcgccttgctggaatacgccagagagacgctcactgccgccggcagaactttgccccagaagacctcctgtacgctcgttttgacaacccggcgctgcagacgctcaatgaacagctggccggggctgatggcctga

SEQ ID NO: 240081 - DNA, 393 bp, Klebsiella pneumoniae
gtgcagacggatgccaaagcgcacctggcgaccatgccgggcggctttctctcgcacctgagctattttctctgccacctgggccggcggttctccccaggtaagataaagatcgacctgctcagcggccagctcctgcgccacctcagacgagccgccgaaatagagcggtggacgcggctgctgcagtggcggaaacagcagtttggcgtcgcgaacgcgctgatgcttgccgttaaaggtgacggtttctccctccatcagcttacgccagatgtgggtaaattcagccgaggcctcatagcgctcggtgtggtcgaggaagacgccgtcgcctgccagttcggcaggatcgctgccggtgaccagattgaacagcgcccggccgtttga

SEQ ID NO: 240082 - DNA, 957 bp, Klebsiella pneumoniae
atgacagatttaatcactcgcccccgccgcctgcgtcaatccgctgcgctgcgcgccctgtttgaagagacaacactgagtttgaacgacctggtgttgccgatctttgttgaagaagaaattgatgattacaaagcgatagaggccatgcccggcgtgatgcgcattccggaaaaatatctggcgcgcgagatcgaacgcatcgccaacgccgggatccgctcggtgatgacctttggtatttctcatcacaccgatgccaccggcagcgatacctggaatgaaaatggtctggtggcgcgtatgtcgcggatttgtaagtccacggtgccggagatgatcgtcatgtccgatacctgcttctgcgaatatacctcccacggccactgcggcgtgctgtgcgaccacggggtggataacctcggcaaacaggccgttgtcgccgccgccgcgggggcggatttcatcgctccttccgccgcgatggacggtcaggtgcaggcgattcgccgctcgctggacgccgccggcttcaccaatacggcgatcatgtcctactcgaccaagttcgcttcttccttctacggtccgttccgcgaagcggccggtaccgcgctgaagggcgatcggaaaacctatcagatgagcccgatgaatcgccgggaggccattcgcgagtcgctgctcgatgaagcccagggcgccgactgcctgatggtgaaaccggctggcgcctacctggatattctgcgcgatatccgcgaacgcagcgatctgccgctcggcgcctatcaggtcagcggtgagtacgcgatgatcaaatttgctgcccaggcgggcgctatcgatgaagagaaagtggttctggaaagcctcggcgctatcaaacgcgcaggcgccgacctgatcttcagctatttcgccctcgatctggccgagaaaaagatcctccgttaa

SEQ ID NO: 240083 - DNA, 666 bp, Klebsiella pneumoniae
atggcaattttgaccatcggcgttgtgccgctggcgggagtattgccgctcctgaccgaacatatcagggaagaacagatcgcccacatcagcctgctgggcgagatgacgcctgacgaggtaatggccgagtacgccgtaggtgacggcgagaaaggactcctgaccttgctcagtaataaccagttggtgatggtgtcgcgacagaaaattgaacgcgatgtccgcagcgcgatcgcgatgctggatcgacaacattatgatgtgatcctgctgctcagctccgaacagctgaccggttttaccacccaccacgcgatcctcctcgagccgcagcggatcatcccgccgctggtggcatcgatcgtcgatgggcaccaggtaggggtgatcgtgccggtggaagagatcatgcccatgcagcggcaaaagtggctctcgctggaaaagccgccatactacgcgctggccaatccgtttaccggcagcgacagcgagctattaaccgccggcaaaacgctgctggagcagggcgccgacgtgctggtcctcgactgtctcggttactatcagcatcatcgcgatgtgttacaaaaagccctcgatgttccggttttgctgtcgaatgtgctggtttcccgactggcggcagaactattggtctaa

SEQ ID NO: 240084 - DNA, 195 bp, Klebsiella pneumoniae
atgccgatgccggtcagcagccaggcgccgtaccagccggccagcgaagggcgccaggccatcatggcgcagctggcggctatcagtaaggtaccgctggtgaccaccagtcttccgccaaagcgagccagcagcctggcaacgaacggggagacagcggccatcatcagcatcgcaagcgtcaggccgagatag

SEQ ID NO: 240085 - DNA, 582 bp, Klebsiella pneumoniae
atggctgactccagcggacagcccgccgcccagcggatcggggcgctcagggtgaacgattgcagatggggcagactggcgcaaaatttcagcaggaatccgcgaccggtgccctcgtacccttgcaccgtcgtggtgagtagcgtacggggaaaacggctcaccagctgccggagaagcggagccgggatagccgcggcctcatcgactatcagccacgccgccttttctttcgacgccagcagcgcatcgggcgccataaagcgcaacgtctccccggcaaagctggccagcacctcgacagcgctacgcgttggggcggtgacgatggcctcgcccccaagctggcgcaagagcatgcccgccagcgcggacttcccccgtccacgctccgccgtcaccgccgcgataccgggcggcaggcgtatcagttgctcaaggattgccgcctgctcggcctgcgggcggccatcggcgggatgccagtctggacgcggggcggccagcgggaaacgtggccggtccgactgccgccagagcaacacctccggatcggcgataaactgccgacagcagcggtga

SEQ ID NO: 240086 - DNA, 141 bp, Klebsiella pneumoniae
atgagacgtatcacacccggcaacccgacttccggcaaacgctgcccggactgtggctctcacgacaccatcccctgggctgatggctggatgtgccgggactgcgggtgtgaatggggcaaagacaacggctatctgtag

SEQ ID NO: 240087 - DNA, 1677 bp, Klebsiella pneumoniae
gtgaaacaacagatacaactacgccgccgcgaggcggttgacggcgtcgaactccccgccgacctgccgccgctgctgcagcggctatatgccagccgcggggtgcgcagcgcgcaggagctggagcgcagcgtcaaaggcatgctcccctggacgcagctcaccggcgttgaaaaagcggtcgagatgctgcatgacgcgttccagaaagggttgcacatcgtggtggtcggtgattttgacgccgacggcgccaccagcaccgcgctcagcgtgttggccctgcgcgcgctgggttacggcaacgtctcctatctggtgccgaaccgctttgaagacggctacggtttaagcccggaagtggtcgatcaggcccatgctcgcggcgcgcagatgatcatgaccgtcgacaacgggatctcgtcccatgccggcgtcgatcatgcccatgcgctggggatcccggtgctggtgaccgatcaccatctgccgggcgagacgctgccggcggcggaagctatcgttaatcccaacctgcgcgattgcgacttcccgtcaaaatcactggccggggtgggggtggcgttttatctgatgctggcgctgcgcacttttctgcgcgataaaggctggttcgacgctcgcggcatccccgcgccgaaccttgccgagctgctggatctggtggcgcttggcaccgtcgcggacgtcgtgccgctggatgctaacaaccgtatcctcacctggcaggggttaagccgcattcgcgccggcaaatgtcggcccggtattaaggcgctgctggaaattgccaaccgcgatccgcaaaagctggcggccagcgacctcggtttcgccctcgggccgcgcctgaacgcggcgggacggcgggtgctggccaacgagctcgatgcgcttaatcagacgcgcaaagagattgagcaggggatgcaggcggaagcgctaacgctctgtcagcagctggagcgcagcgccgataccctgcccggcgggctggcgatgtaccatccgcaatggcatcaaggggtagtcggcattctcgcctcgcggattaaggagcgcttccatcgcccggttatcgcttttgcgcctaccggcgacggcacgctgaaaggctccggccgttccattcaggggttgcatatgcgcgatgcgctggagcgccttgatacgctttatcccgggctaatcctgaagttcggcggccacgcgatggcggcgggcttatcgctggaggaggcgcgttttgaagagtttcaacagcgcttcggcgagctggtgaccgaatggctggatcctgcgctgttgcagggcgaggtggtttccgatggcccgctggcggcggcggagatgagcatggaagtggcgcagatgctgcgcgacgccgggccgtgggggcagatgttcccggaaccgctatttgacggtcgttttcgcctgctgcagcagcggctggtgggcgagcgtcacctgaaggtgatggtcgaaccggttgacggcgggccgctgctggacggtatcgccttcaacgttgatacttccatctggccggataacggcgtgcgtgaagtccagttagcctacaagctcgacatcaacgagttccgcggcaaccgtagcctgcagctgatcatcgatcacctctggccaaattga

SEQ ID NO: 240088 - DNA, 498 bp, Klebsiella pneumoniae
atgatgcgtgcgctgttggcccgggaactgcgcctggcgtggcgcagcggggcggagatcctcaatccgctctggttctttctgatcgtcatcaccctgtttccgttcggcgtaggcgccgcgccccagctgctggcgcagattgcgccgggcgtggtgtgggtcgccgcgctgctggcggcgctgctggtgatggatcggttgtttcgcgacgactggcaggacgggaccttgctgctcggcaccccgacgctcagttttctcggcgcggtgggggttggcctgacggtcggcctgaagcgcggcggcgtcctgctgagcctgctggtgctgccgctggcggtgccgctgctgattttcgccaccgcggcctgccaggcggccgccgccgagctcccggtcagcggctatctggcgatgctggcggcgttcttaaccgccagcgccaccctgtgtccgttcgccaccgccgctgcgctgcggctgaccgtgcgataa

SEQ ID NO: 240089 - DNA, 453 bp, Klebsiella pneumoniae
atggctgcactcgcggaacagctcctgaggatgggtttcctgaaaatagccgctgccgatttcgctggatgggatgtgggcggcgatggccagcaccgggacatggttgcgatgacagtcaaacaaaccgttaatcagatgcaggttgcccggtccgcaggagccggcgcagaccgccagctcgccggtcagctgcgcttccgcgccagcggcgaaagcggcgacctcttcgtgccgggtgggcatccagtcgatggtgcccatgcggttaaggctatcgctcaatccattgagggaatctccggtgacgccccagatacgtttcacgccggcctgttccagcgtttcggcaatgtatgccgccacggtctgtttcatgatctccatctcctttttttgataacgccttcaagcttagatgaaactgaccgcaatgtaaccgattacccctga

SEQ ID NO: 240090 - DNA, 1767 bp, Klebsiella pneumoniae
atgaataaaacccgtcaacaagagttaacccgctggttaaaacagcaaagcattatctcccgtcgctggttgatgatttcccgcctgcttggcgtggcgagcggtctgctgatcgtggcgcaggcctggttcctggcgcggatcctgcaccggatggtgatggagaatattccagcgaccgccctgctgctgccgctcacgctgctggtgctgatctttgtactacgcgcctgggtggtctggctgcgtgagcgggtcggctttcaggccgggcagcatattcgctatgaaattcgccgccaggttcttgaccgcctccagcaggcaggcccggcgtggatccagggcaaaccggccggcagctgggcaacgcttattcttgagcaaatcgacgacatgcacgactattatgcccgctacctgccccagatgacgctggcggcctgcgtaccgctgctgatcgttattactatttttccgattaactgggccgccgcgctgatccttctcggcaccgccccgctgatcccgcttttcatggcgctggtcgggatgggcgccgccgacgccaaccggcgtaacttccaggcgctggcccgcctcagcggccacttcctcgaccgcctgcgcggcatggaaaccctgcgtatttttcatcgcggtcaggcagaaaccgataatattcgcgacgcctcgcaggattttcgccaacgcaccatggaagtcctgcgtctggccttcctctcctccggggttctggagtttttcacctccctctccattgcgctggtagcggtgtattttggcttttcttaccttggcgagctgaacttcggccactatggcgcgggcgtcacgctgatggcgggattcctgacgctgatcctcgccccggaatttttccagccgttacgtgacctgggtaccttctaccatgccaaagctcaggccgtgggcgccgcagacagcctgaaaacgtttatggaaacgccgctgacccaggtagagcgtggcgagaaaacgttaaatgacaacgatctgattagcgtggaagcgcgcgacctggtgatcaaatctccggaaggtaaagttctggcggggccgcttaattttgcgctgcccgccggcactcgcgtggtgctggtcggccagagcggatccgggaaaagctctttgctgaatacactgctcggctttctgccctatgaggggtcgctgatggtcaacggcgtagagctgcgcgagctggacgctgagcgctggcgccgcctgctgagctgggtaggacagaatccgcagttgcctgccgccacgctgcgggaaaacgtgctgctggcgtggcccgaagctagcgaagcacagcttaggctggcgctggacaaggcctgggtcagcgagtttatcgccctgctgccgcaggggatccataccgccgtaggcgatcaggcggggcgtctgtcggtaggccaggcgcagcgtatcgcggtcgcccgcgcgctgttggtgccgtgccgcctgctgctgctggatgaacctgccgccagccttgacgcccatagcgaacagcgagtcatgcaggccctgacccacgcctccagtgagcaaaccacgctgctggtcacccaccagctcgaggggctggccgactgggacgacgtctgggtgatgcaggacggacagattatcgaacaaggcgactacgccacgctggcccgtgctggtggggtcttctcggcgctgctggcccatcgtcaggaggagatttaa

SEQ ID NO: 240091 - DNA, 258 bp, Klebsiella pneumoniae
atgccgccgcccagcttttccgcaatgctgacccacgaccagccggtgaaaagcgtcagcccggccgcccagatacacaacagggcgatggtgccgccgctgctgtgcagtaggggttgcagcgtggtgctcagcaggctgccgatcaccccgccggaggcgaagtaccagatatcatcggcgttaatcgccgccagaccacaggaggtcaggatcagggctaacgcaccgatgaggcgaagggaaacggcaaaataa

SEQ ID NO: 240092 - DNA, 957 bp, Klebsiella pneumoniae
atgccccccagccgctaccgcagagactacggttgtctccactggcggtttggacgcagtggtcggcggcgtcagcggtttagtggcaatcggactttccggctcaggaattggctgataccaggaggccaacagctcgcgttcgcgcgcccgcttctcttccacttcctcgaaataatagagcggcggacgtttcacttcctcctgcacgacctcgggctctggctccggtgggggaactggcgcgctttgcggctgatacgccgctggctccggctgatacggctgcggcgcgggctggccggcatgcgggtcgtaagccggctgctggtaggtctgcggcgcgggctgaccggcatgcggatcgtaagccggctgctgataggtctgaggcgcaggctgaccggcatagggatcgtaagttggctgctgatacggcgctggctcaggctgataggcctgcggcgcaggttgaccggcatagggatcgtaagccggctgctgatacggcgctggctcaggctgataggcctgcggtgcaggttgaccggcatgcggatcgtaagccggctgctgatacggcgctggctcaggctgataggcctgcggcgcaggttgaccggcatacggatcgtaagccggctgctgatacggcgctggctcaggctgataggcctgcggcgcaggttgaccggcatacggatcgtaagccggctgctgatacggcgctggctcaggctgataggcctgcggcgcaggttgaccggcacgcggatcgtaaaccggctgttgatacggcgctggctcaggctgatacgcctgcggtgcggtttgccccgctggcggctgataagcagcctgctggaacggagcgggttcaggctgatacgcctgctgcggcggatagctggcttccggctgataagctggcgcagcgccgtgatggcccaccggtga

SEQ ID NO: 240093 - DNA, 213 bp, Klebsiella pneumoniae
atgcagcagcagcgtattggcgccaatgtccgagagaataatcgcatcccactcctgcagcgcttccagcgtcagcggaaagtcggtcgccgccgcgtgggcgggcatataggtaatggcatagggactgtcggcgagcgcggccagaaagtccgttgcaccggtgtgccaggtggcggtggcaaactggtcgaagcctttaacgtgcgttga

SEQ ID NO: 240094 - DNA, 936 bp, Klebsiella pneumoniae
atggtagagattcaccgccggcgcggtcctggcgttaacgccatagttggtctggttttcccgggtaaactccacgccggcgctgacgtcatggcctatcgagccagtatcgaaggtcgaggtgatattggtctggttggtcagaatgcggttgctgacatctttggtattaaccagacgcgaccagctccaggtgttgacgtcattgatatcgggggcggtgatattgttcgcgccgcccatcaccgcggtcaaaagatactcctgtttcactcgcgaccagcgggtggtattgcgcacggtggtattctccgtcagatcgtgttcgaagcgcagggtaccgctgtcggtagtagatttatcgtaatcggagtcggtgccatagaaattgctggtatcgaccttcccggcggagttgagtgcggcatacttcggcgaaggcgccgaatagcccggcaggccgacggtagggatcccgccatccggggtgttgttctgccggacgtgcagatagttcagatacagacgagttggggtatcaaggccgaaggccagcgacggtgcgatgccatagcgttcgttttcaatgcggtcccgaccagagtcatgggttttttcccccatcaggttcagacggaacgcagcgttgtcgctaaacgcctggttcaggtcgagagtgccccggcgcgaccaggcgctgccgatgctggccgagccgtcgatcccggagtcaaggcgcggctgcttgctgatcatattgatcgagccggagggcgcgctgcggccatagtccgtgccggcgggccctttgatgacttccacctgctgggtattgaaggtatcgcgcgtcacgctgccgatgtcgcgaatgccgtccacatagatgctgttagaggtatccacgccgcgcataaagatggcatccccggtggttga

SEQ ID NO: 240095 - DNA, 687 bp, Klebsiella pneumoniae
gtggcgaaacacggcaaccgcagcgtctccagcaaatcaggctcttctgacctgctggcggccttcggcattaatctcgatatgaacgccgataaatcccgcgccgcgcttgatgagctgggcgtctgcttcctgttcgcgccgaagtaccacaccggtttccgccacgcgatgccggtccgtcagcagctgaagacccgcaccctgttcaacgtgctgggcccgctgatcaacccggcgcatccgccgctggcgctgattggcgtctacagcccggaactggtgctgccgatcgccgagaccctgcgcgtgctgggttatcagcgcgcggcggtggtgcacagcggtgggatggatgaagtttcactgcatgcgcctacggtggtggccgaactgcataacggggaaattaaaagctatcagctgaccgccgacgacttcggcctgacgccttaccatcaggcgcagctggcgggcggcaccccggaagaaaaccgtgacattctgacgcgcttgctacaaggtaaaggtgaagccgctcacgaagccgccgtcgccgccaacgtcgccatgttgatgcgtttacacgggcatgaagatctgaaagctaacgctcagcaggtactggatgtgctgcacagcggcgcggcctatgacagagtgaccgccttagcggcaagagggtaa

SEQ ID NO: 240096 - DNA, 1008 bp, Klebsiella pneumoniae
  misc_feature (736)..(780): n is a, c, g, or t
atggctgacattctgctgctcgataatatcgattcctttacctataacctggcagaccagctgcgcgccaacggccataacgtagtgatttatcgcaactccgttccggcgcaggcgctgattgagcgtctgggcaccatggacaacccggtgctgatgctctccccgggcccgggtacgccaagcgaagccggctgcatgccggagctactgacccgtatgcgcggcaagctgccgatcatcggcatctgcctcggccaccaggccattgtcgaagcctacggcggctatgtcggccaggcgggggagatcctccatggcaaagcctccagcattgagcacgacggccaggcgatgtttgccggtctggctaacccgctgccggtggcgcgctaccactcgctggtcggcagcaatattcccgccgggctgacgattaacgccaatttcaacggtatggtgatggcggtgcgtcacgatgcggaccgggtgtgcggcttccagttccatccggaatcgatccttaccacccagggcgcacggctgctggagcagaccctggcctgggcgctgcagaagctggagcataccaacaccctccagccgatcctcgagaagctgtaccaggcggaaaccctgagccagcaggagagccaccagctgttctccgccgtcgtgcgcggcgaagtgaagcctgagcaactggccgccgcgctggtcagcatgaaagtgcgcnnnnnnnnnnnnnnnnnnnnnnnnnnnnnnnnnnnnnnnnnnnnngcgcggcgagcagccgcaggaaattgccggcgccgctaccgcgctgctggaaaacgccgcgccgttcccgcgcccggactacctgtttgccgacatcgtcggcaccggtggcgacggcagcaacagcatcaatatctccaccgccagcgcctttgtcgctgcggcctgcgggttgaaagtggcgaaacacggcaaccgcagcgtctccagcaaatcaggctcttctga

SEQ ID NO: 240097 - DNA, 441 bp, Klebsiella pneumoniae
atgggtcacctgcagcggcagggcgtcaccgcccggcgtggtggtgctggcgtcgacttcccagtactcttccgggacgaacgctttaatttcacgttcacgctccaccaccaggcggaccgcgacggactgcacgcgcccggcagaaagaccacgggcgatttttttccacagcagcggcgaaaccatatagcccaccacgcggtccataaaacgacgcgcctgctgggcgttaacccgatcgatattcagttcgcccggcttttcaaaggcctgacgaatagcgtttttggtgatctcattgaacaccacgcggctgtaacgctgttcatcgccgccgatgacttcccgcaggtgccaggcaatggcttccccttcgcggtcaaggtcggttgcgagatagatgtggtcagctttttccgccaactgtttgagttctga

SEQ ID NO: 240098 - DNA, 1260 bp, Klebsiella pneumoniae
atgaacatcgccatcatcggcagcggcatcgccgggctgacctgcgcctggcgactggccggacaccatcaggtaacgctgttcgaagcgggcgccacgccgggcggccacaccgccaccgtggatgtcgccacgccgcagggcacctgggccatcgataccggatttatcgtctacaacgatcgcacctatccgcgctttatgggcctgctcagcgagctggggatcggcgggcaaaaaacgcagatgagcttctcggtccacaacccggccagcggcctggaatacaacggccacagcctgacctcgctcttcgcccagcggcgcaatctgctgaagccggccttctggggactgctgagcgagatcgtccgcttcaaccgcctggcgaaactggcgctgaccgaggcgctggatccaggcgcgacgctggagagcttcctcgcccgccaccgcttcagccccttcttcgcccgccactatattctgccgatgggggcggccatctggtcgtcgtcgctgcaggagatgcgccgcttcccgctgccgctgtttttgcgcttctttgaaaaccacggtctgctggatattcgcgatcgcccgcaatggtacgtggtgcccggcggttcccgggaatacgtccgcgccctgctcgccaggctcggcgatcgcctggatctacgcctcaacgcgccggtgcagcaggtggagcgccacccggcgggagttatcctgcggctggcgtccggggaggcgcattttgaccaggtgatcttcgcctgccactccgcgcaggccctggcgatgctggcggcgcccaccgattccgaacgagaagtccttggggacatcggctggcagcgtaacgaggtggtgttgcacagcgatccgcgctggctgccggagcgccagcgcgcctgggccagctggaactatcgcctgagcgacggggatcgggcccgggcctgcgtcacctacaacatgaatattctccaggggcttcccgcgggcgcgccgctgttctgcgtcaccctgaacccggacgcgccggtggacgatcgctacgtctggcagcgcttcgtctatgagcatccgctgtttaacccgcaaagctggtcggcccagctgcggcgcgaagagattaacggccagcagcggagctggtactgcggcgcctactggtacaacggctttcatgaggatggggtgcgcagcgcgctcgacgtggtgcagggcatcgccgcggcggagggcaactga

SEQ ID NO: 240099 - DNA, 270 bp, Klebsiella pneumoniae
atgtgccggacggctgtcaacgccggccatccgctccagaccctggccggtcggcaaaatacgaaatccaaatttggtggcaatctgcaccttatcgcgaaaacctttaatcgcttttccgaccagaacttcattatcgaaaggaccatatacttcggcggtatccaggaaggtcacgcccatgtccatggcggtatggatcgtatttatcgcctgcgacgtttcagcgccgccataggcaaaactcatccccatacatccgagacctaa

SEQ ID NO: 240100 - DNA, 1206 bp, Klebsiella pneumoniae
atgcgcgacgcctttatttgtgacgggatccgtacgccgattggccgctacggcggcgcgctggccagtgtgcgcgccgacgacctggcggcaatcccgctgcgtgagctcctgagtcgtaatcccgggctcgacccggcagcaattgatgatgtgattttcggctgtgcgaatcaggccggggaagataaccgcaacgtggcgcacatggcgacgttgttggccggttacccgcataccgtgccgggcaccacgattaaccgcctgtgcggatcgggtctggatgccatcggctttgccgccagggcgatcaaagccggcgatgccgatctgctgattgccggcggcgtggaatcgatgtcgcgtgcgcctttcgtgatgggaaaagccagcgcgccgtaccagcgtcaggcggaactctttgataccacgattggctggcgttttgtgaacccgctcatggcgcaacacttcggaactgacagcatgccggaaacggccgagaatgtagctgaattgttaaatatcagccgagccgatcaggacgctttcgcctggcgcagccagcagcgcacggcgcaggcccagcgcgacggcattctggcgcaggagattgtgccggtgcagattgtcggccggaaaggggcggttagcgacgtgcgcgaggacgagcatccgcgcccggaaaccacgcttgagcagctggcgaaactgaaagcgccgttccgccagggcggcgtcattactgcgggcaatgcttcaggcgtcaacgatggcgccgcggcgctgatcatcgccagcgaacagcaggccgctatccaggggctcacgccgcgggcgcgtatcgtggcgatggcgacggcgggtgtcgaaccgcgcctgatgggactggggccggtaccggcggtgcgtaaagtgctggagcgggcgggactcaatattaacgatatggatctgattgagctgaatgaggccttcgccgcccaggcgctgggggtgctcagacagctcggcgtgccggacgatgcggcgcacgtgaatcccaacggcggcgccatcgcgttaggccatccgctgggcatgagcggcgcgcggttagcgctgagcgccagccttgagctgcaacgccggggcgggcgctatgcgctgtgtacgatgtgtattggcgtgggtcagggcattgccatgatcctcgagcgagtgtga

SEQ ID NO: 240101 - DNA, 261 bp, Klebsiella pneumoniae
atggcgttaagtcagattgaacccgaaaagacagaatcgccgtttgccagtttgtctgaacgcgaattgcagattatgctgatgatcaccaaaggtcagaaggtgaatgagatctcagagcagctaaatctgagtcctaaaacggttaacagctaccgctatcggatgttcagtaaattaaacattcatggcgatgtcgagctgacccacctggcaattcgccatggcctgtgtaatgcggagtcgttagcaagccagtga

SEQ ID NO: 240102 - DNA, 1107 bp, Klebsiella pneumoniae
  misc_feature (957)..(966): n is a, c, g, or t
gtgagtgatgtttttgacgcaaaagctttcctgaaaacggtgaccagccagcccggtgtgtatcggatgtatgatgctggcggaaccgtcatctatgttggcaaagccaaagatctgaaaaagcggctcagtagctacttccgcagcaaccttgcgtcgcgtaaaacggaagcgctggtagcgctgatcgcgcaaatcgacgtgaccgtcacccacaccgagacggaagcgctgctgcttgagcacaactatattaagctgtaccagccacgttacaacgtgctgttacgcgacgataaatcgtatccttttatttttctcagcggcgatactcatccgcgtctggcgatgcatcgcggcgccaaacatgcgaagggcgagtattttggtccttttcccaacggctatgccgtgcgcgagaccctggcgctgctgcagaaaatctttcccatccgtcagtgtgaaaacagcgtctaccgcaaacgctcccgcccctgtctgcagtatcagattggtcgctgcctggggccgtgcgtggccgggctggtcagcgaagaagagtatgctcagcaggtagagtatgtgcggctgtttctcgccggcaaggatgaccaggtgctgacccagctcatcgcgcggatggagaaggcgagccagaacctggagttcgaagaggccgcgcgcatccgcgaccagattcaggccgtccgccgcgtgacggagaaacagtttgtctccaacaccggtgacgacctcgacgtgatcggcgtcgccttcgatgccggcatggcctgcgtgcatgtgctgtttatccgtcagggcaaagtgctgggcagccgaagctacttcccgaaagtgccgggcggcaccgagctgggagaggtcgtggagacctttgtcggccagttctacctgcagggcagccaaatgcgcacgctgccgggggagtttttgctnnnnnnnnnnactttaaccttggggataagacgctgctggccgactcgctgtcggagctggcgggtcgtcgaatcaatgtgcagactaagccgcgcggcgacagagcgcgttatcttaagctgtcgcggaccaacgccgcgacagcgttaa

SEQ ID NO: 240103 - DNA, 696 bp, Klebsiella pneumoniae
ttgcaggcgctggccagcgtactggagctgccggccgtcaagcgaatggagtgttttgacatcagccacaccatgggcgaacagaccgtagcatcctgtgtggtgtttgacagcaatggcccactgcgcgcggagtatcggcgctacaacatcaccggcattacccctggcgatgactatgcggcgatgaatcaggtcctgcgccgtcgctatggtaaagcgattgatgacaacaagatcccggatgtgatcctgatagacggcggcaagggacagctggcccaggcgaaagccgtgtttgctgaactggacgtcccctgggataaacatcatccgctgctgctgggcgtggcgaaaggtagcgatcgaaaagcgggtctggaaacgttattctttgagccggaaggggaagggtttagcctgccgccggattcgccggccctgcatgtgatccagcatattcgcgatgaatcgcacgatcatgcgatctccgggcatcgcaaaaaacgggcgaaagtgaagagcaccagctcgcttgagactatcgagggggtggggccgaagcgtcgtcagatgctgctgaagtatatgggtgggctgcaggggctacagcaggccagcgtcgaagaaattgctaaagtaccgggcatctctcacgctctggcagaaaagatcttctactcgttgaaacattag

SEQ ID NO: 240104 - DNA, 237 bp, Klebsiella pneumoniae
atgatagtcgggatgcaggtagtaaccgctgcgtgggcggctaatcaggtagccctcgttgaccagactttcaaacaccagcgcggtggtgttacgcgagacgcgaagctggctggccagctggcgacaggagggcagcggggtgtcggcggcgaagatcccgctgagaatggcattcaccagcgtctctcgcacctgttcctgcaaaccgcggccaggctgaaaatcaacgtgtaa

SEQ ID NO: 240105 - DNA, 339 bp, Klebsiella pneumoniae
  misc_feature (319)..(328): n is a, c, g, or t
atgtcaaatttacccaaattttcccgcgcgctgttgcacccgcgttactggctgttgtggctgggaattggctttttgtggctgctggtgcaattaccgtatccggtgatctaccgtctgggaacggcgcttgggcggctggcaatgcgggtgatgaaaagccgcgcgcggattgccagacgtaatctcgaactctgctttcccgagatgagcgccgccgatcgcgaggcgctgctggtgaaaaactttgaatcgctgggcatggggctgatggagaccggcatggcctggttctggccgacgcaccgggtagcgcgcnnnnnnnnnnctataaactga

SEQ ID NO: 240106 - DNA, 438 bp, Klebsiella pneumoniae
atgcagcgcgggaaaaagctggtggtgcagatggtcgaaaccttccaggccggcgtgaaaccaaccttcgttgagacgctggatgcagttgaggtggcgaaaacctccggcatgccgctggcgccggtaatgatttatggtgatgacgtcacccacgtcctgaccgaagagggtatcgcctacctgtaccgtgcggagagccttgaagagcgccgggcgatggtcgccgcggtggccgggatcaccgatatcggccttggtgtggacgccaaacgcgtcgccgcgctgcgtcagagcggcaaagtggtctacccggaagatctcgggattcgccgcagcgatgccacccgctccctgctggccgccggcagcgtcgccgacctggtggagtggtccgacggactgtacaacccaccggcaaaattccggagctggtaa

SEQ ID NO: 240107 - DNA, 528 bp, Klebsiella pneumoniae
gtgggccagaaacgccccggacatcgctttgccgacgatcaggccaattaccgggtggccggccaaacgggctttggcataagcgccagccgccccggccagcgcctggtgaatgccgaaagcttcttcgcggcggccataggcctggcttggcacatcgatcacggcgacgatcggccgtttgactggctggtcggcgtcggcggcaatggtttcattaaccactttcgccagcgtccagccttccagcaggccaacttcgccgccggcggcgcgcgggtagtggttgttagcatccgggaccacggcgataaaacgcacgttttcgccattaatctggccgtctgccacctggacggaagggcacaggccgctcatcagcggcgcgtcgggcgccagtttgttcagccacagcgcggcgcggtttgggaactgactcattatttatcctcccgggcaaaaagctgtttaatctgcgcggtatccgcctgctggcgggtgtcgaactggctcaagcgacgcagataa

SEQ ID NO: 240108 - DNA, 609 bp, Klebsiella pneumoniae
  misc_feature (568)..(577): n is a, c, g, or t
gtggtgctgggcgtggtatggacaggcggcgcctggttcaccggtaaacagctggaaggccggatcgccgatatggtgcagcaggcaaacgcccagctgcgcagcagcgcgccggagtcaggtctggagctgagctatcaggactaccagcgcgggctgttcagcagccatctgcagctggtggtgaagccgatcgccggtcaggctaacggctggctggccgccggtcagagcgtggtgcttgacgaagtggtcgatcatggccccttcccgctggcctcgttaaaagcctttaatctggcgccggcaatggcttccgtccacaccacgctggtgaaaaacgacgccagccaggcgctgttcgagatagccaaaggcgacaccccctttaccgtcgatacgcgcattgcctacagcggcgacagccagtcggctatcgtccttaacgccctcgactacgctaaaggcgatgagaaagtcaccttcagcggcggtcagttccagctcgacgccgaccgcgacggcaaaaacatcagcctgaagggccaggccggcagcgggcagatcnnnnnnnnnnccagaaggtacagctgcgcttcgtcaacctga

SEQ ID NO: 240109 - DNA, 312 bp, Klebsiella pneumoniae
atgatagaaaaatttgaacgctatattttcaaacatgccgtacagccactgaaattagttgctgtggtagcaatagctgcggagctatcgcgcagaggattaatgttcataggtatacccgcttttacctctttcattacaaatatgctcggtattttgataatcatgttaatgcaaaagccgataatgataagaggtgtgtacgagactaaagatcgttcaagttcctatagatggatgcattttgccataacaggacttcaatctatgtccgttgtagtcctgctactaataccgatttatgagcgataa

SEQ ID NO: 240110 - DNA, 318 bp, Klebsiella pneumoniae; identical to SEQ ID NO: 183289

SEQ ID NO: 240111 - DNA, 339 bp, Klebsiella pneumoniae
atgagtaagctaagaaccgttgcaaaaatattattgatgtactgcattttcagtagcgccagcgcctttgcggagggaaatactaagggtgatccgtgtctcgcgttcacctgtatggccggaaagttacaaggtaacgaggcaacatcagggcctgactgtgtaatgggccgccagagcttctttgagatacgaatttacaccccctactacaaccccggcgcgacagctgctgctcgtaaagtatttctaagcacctgtcctatgaccactatttcagaaaacaaaaacacactggagctgattattcagcgatacggacgttcatttcaggagtaa

SEQ ID NO: 240112 - DNA, 186 bp, Klebsiella pneumoniae; identical to SEQ ID NO: 18394

SEQ ID NO: 240113 - DNA, 873 bp, Klebsiella pneumoniae
atgaatatcctcaatatcttaatcagcagcgtgctcatctacggcatcttctcctggccggggctggggtttgtcggcgccgggcttgggctgaccattgcccgctatattggcgcgatagccacgatctgggtgctgatggtgggcctcaatccggcgctgcggctgtcgctgaagggctacttcaaaccctttaacttcgccattatctgggaggtgatggggatcggcatcccggccagtatcgaatcggtcctgttcaatggcggcaagctgctgacccagatgtttgtcgccgggatgggcaccaacgttatcgccggcaactttatcgccttttcggtggcctcgctaattaacctgccgggcaacgccctcggctcggcctcgacgatcattaccggcaagcggctgggaaaagggcagattggtcaggctgaattccaggcctggcacgtattttggctgtcgacgattattctgacgctgatcgcctggggcagcgctcccttcgccggctttatcgcctcgttctacacccatgaagaagatgtaaaagaagtggttaaacagctgctgtggctcaacgccctgtttatgccgatctggtcgctgtcgtggactttaccctgcgcttttaaaggcgcccgtgacgtacgctacaccatgtgggtgtcgatgctcggcatgtggggctgccgggtggtggcgggctataccctgggcatcgtgctggggatgggggtgattggcgtctggttagggatggtgctcgactgggcggtgcgcggcgtgctgttttatttccgcatggtgagcggccgctggctgtggaaatatccgcgcgtgaaggcttcatcggaggaaagctga

SEQ ID NO: 240114 - DNA, 273 bp, Klebsiella pneumoniae
gtggttttcgcccacgccccagccggtgaggatcacggcctggccgggaacaaagcgcggatcgcggctttctttcacctgaccggcaaaatcaatgcccggcaccatcggaaactgacggataattttgcctttgccggtgatcgccagggcgtctttataattgagactcgaccagtcgatggcgacccggacgtcgccttcggcaagagcgggcaggtcgatatctttgacggtggcgacggtgcggttgtcgatctggtccagaactaa

SEQ ID NO: 240115 - DNA, 3408 bp, Klebsiella pneumoniae
atggggttggagccgggaacgccggtcgatgaagacaatgcctggatttgttccatcgatgccggctattgcgtatctacgcccaaggccacctgggcgcctgggaactggctaggtatgccggaaggtgtggcagtaaccgacgaggagtttgcaggcatctgccagttcttccccgaccaatgcatcatcaactcgacgaccaagctggagccgcagaaccagttgttcagcgtcctgcgcactggcaccggtgacctcgatctggccagcgccggcaacctgacacagtggtcgccgtatggcgtctataccgcgggaacgcaggccgtcgatgtcggggcgccgttcaatcagccgcgcggccagttcgacggaacgctgttgggtagcaatggcgcggactacgagtcgctggcggcaggccaataccaagcctggtatccgcaatacggcggcaacctgaatgtcagtgtggggggcgacctggcgggtgatgtctgggcaagcagtctgaacaacgccatgagtctgacgcgttccagcgcgtcggtcggcaattggctatggcgccagggcaatgacgatacacccgtcgcttggtgggttaatttcggtagctatgcaatggtagcggatgccgaacttccggccctgctcggtttcactggttttggcaccctgggcggtggcgatgtcagcatgcgggtcgggggggccgctggcaaccttgtgccgcggggaaccgacagcctgccagcgataagtgagaaagccttccgtagccaggggttaattgtcgcggtggggagcaacggacgggtcgagcgcgatggcaccctgacgcttggcggcggcggtgatatggacatccgcgtcggtgggacgctcaatcccgacttgcaggctcgggtcatttccgtcggcgacaagagcggcagcagccggcttgatctgcagggtgtgctggtcaacctgcgcggcacggcgcagtttagcagcggcgctatcggtggcgtcggtcctttatatgacatgttcgccggacaacgggacccgacggacacccgcccgtacgatgcctttaccgccacgcgcagcaacgcgtccggcggtctggtagtgatccccggtgacgccaccttgcgcctggatactcgcggcgacctggtgctcggtgggagcggcgacccaggacgggtcaacctgcccaacagctctgctttctcgactcaagagggtattcagtacgctggcggtggggtcagctggtttagcctgtggagcgagcataccgccattgacctgttcgccgccggcggcaacctgacgccgagcactcaagtcgcggagtatgccgtcaatagagggttgaacacctcacccagcgatgggcgtttcatttatccagcgattctgcgtgctgccgctccgacagggagtatctacctggggccatcgagcagtgtgctgcaatcggaccatttgctgaataccgccacatcgttgctgctggcgccgtcgctcgatggcgagctggcgttgctagccggcgagtccatctatgcgggaggctactcggtgcagcgctcgggcgccgatccggccagtctcccatcgatctggtcgccggctttcgccggctatgcggacgccggtttcgtcgaccgggtagctggcaacggtagtccagacagcaacccggcgttggtagaggggctaccgttgttctacttcggcgctgacagcgcagcggctctggcgcgcaacctacagccggtacgtttctatgcgttgagtggggacatcgtcgggctcaacagtggtgcgctgattcgcttcagcgaccaggcgggcacgcgcgccggacaaatctggtacgagggcgctggtccggtgtggatgcgcgccggacgcgatatcgtcgcttccggcactccgttgggaaggacggccagccagatcgatatgacgacctctttcaccggtaacctcttcgtccacgacaaccccaacgacctctctctggtccaggccggccgcgacatcctctacagcaacttcaacgtcgccggccccggtaccctggatatcagcgccgggcgcaacatcctcatggaggaccgcgcggcgatcaccagtctcggcgcggtggtgccgggtgacagccggccgggtgccgatatcgtgctccaggccggcgcggcgggtgccgactaccaggccttcctcgagcgctacctggatccggccaacctggcgcaggccggcaccccgctggctgagcagccgggcaaggtggtcaggacctacgaaagcgagttggccaagtggttggacgagcgcttcggcttcgccggcgacgcggaacaggcccaggcgtttttcgccggcctgtccgccgagcagcagcggatcttcgcccgccaggtgtacttcgccgaactcagggccggcggccgcgagtacaacgaggtcggcggcgtgcgtcaggggagttacctgcgcgggcgcaacgtcatcgccgcgctgttcccggagagtgatccggcaggtaactcgatcagttatgagggtgacatcattatgtacggcgctgccggcgtacacactgattttggcggtgatatccagttgctcaccccaggcgggcggcaggtattcggcatcgaaggggaggcgccgccgtccaccgcaggcatcgtcacccagggccagggcgatatccagacctactcgcggggcagtatcctgctcggccaaagccgtatcatgaccactttcggcggcggcattctggcctggtctgcagaaggcgacatcaacgctggccgcggcgcccagactaccgtggtgtacactccaccgcggcgtatttacgacggctggggcaacgtgacgttgtcgccgcaggtacccagcaccggcgcgggcatcgccacgttgaatccgattcctgaggtggcgccgggcgacatcgacctgatcgccccgctcggcaccatcgatgccggcgaggcgggcattcgggtctccggcaacgtcaacgtggcggcgctgcaggtggtcaacgcggcgaacatccagacccagggccagagcagtggtatccctatgacggcggcggtgaacgtcggggcgctgacctcggccagccaggcggcgggcagtgcggtacaggcagcggagcaggtgtcgcgccgagctcagcgcaatcagccttcgacgatcagcgtggagatcctcggctacggtgacgagcggctggaagcggggggtagcgcgacggctacgccggtggccggctaccgctatgacagccaagtacaggtattgggtgccgggccgctaagtccgcaatcgcgcgagcaactgacccccgaggaacgtaatcgattatcgctgtaa

SEQ ID NO: 240116 - DNA, 336 bp, Klebsiella pneumoniae
gtgaaaccggatgaactggttcccctgcccggcgatctgccgctggagaaagtgcgcgccattcgccgtagcgccaaatcacgcgtctttgtcaccaacgccctgcgagcgttacgccaggtgagccctaccggcaacattcgcgacatcccgttcgtggtgctggtgggcggctcgtccctcgatttcgagatcccccagctggtcaccgacgcgctggcgcactaccggctggttgccgggcgcggcaacatccgcggctgtgaaggcccacgcaatgcggtcgccagcggattactcctttcctggcaaaaaggaggcacacatggagagtag

SEQ ID NO: 240117 - DNA, 1215 bp, Klebsiella pneumoniae
gtggagctgacgcctgcgcagcactttaccaagccgccggcgcgtttcagcgaggcctcgctggtgaaagagctggaaaaacgcgggattggccgtccgtcgacctacgcgtcgatcatttcgaccattcaggatcgcggctacgtgcgggtggaaaaccgtcgtttttacgccgaaaaaatgggcgagatcgttaccgaccggctggaagaaaacttccgcgatctgatgaactacgattttaccgcgcagatggaggatcgcctcgaccaggttgcgaaccaccaggccgagtggaaagaggtgctgaaccacttcttcggcgattttaccacccagctggcgacggcagagaaagatccggaagagggcggcatgcagccgaacccgatggtgctcaccagcatcgactgcccgacctgcggccgtaaaatggggatccgtaccgccagcaccggcgttttcctcggctgttcgggctatgccttgccgccgaaagagcggtgcaaaaccaccatcaacctggtgccggagaacgaagtcctcaacgtgctggaaggcgatgacgcggaaaccaacgcgctgcgcgccaaacgtcgctgccagaagtgtgggacggcgatggacagctaccttatcgatcctaagcgtaagctgcacgtctgtggtaataacccgacctgcgacggctacgagattgaagagggcgaattccgcatcaagggctatgacggcccggtggtggagtgcgagaagtgcgggtctgaaatgcacctgaaaatggggcgtttcggtaaatacatggcctgtaccaacgacgagtgtaagaacacgcgtaagatcctgcgcaatggcgaagtggctccgccgaaggaagatccggtgccgctgccggagctgccgtgtgagaagtctgacgcctactttgtgctgcgcgacggggcggcgggcgtcttcctggcggccaacaccttcccgaaatcacgggaaacgcgtgcgccgctggtggaggagctgtaccgcttccgcgatcgtctgccggaaaaactgcgttatctcgccgatgcgccgcagcaggatccggaaggcaataaaacgctggtacgctttagccgtaaaaccaagcagcagtacgtggcgtctgaaaaagagggcaaagcgaccggctggtcagctttctttatcgacggtaagtggacggaagccaaaaagtaa

SEQ ID NO: 240118 - DNA, 723 bp, Klebsiella pneumoniae
gtgatctatcccgaccgcatccgccgccgcccgccgggaaccacttcgaaggggctgggggcgcataccgattccggcgcgctggagcgctggctgcttcccgcctatcagcaggttttcgccaacgtttttaatggcaatatcgacgcctacgacccgtgggacgccgcgcaccgtaccgaagtggaagagtataccgtcgacaacaccaccaaatgctcggtgttccgcaccttccagggctggaccgcgctgtcggacatgatcccgggtcaggggctgctgcacgtggtgccgatcccggaggcgatggcttatgtgctgctgcgccccctgctcgacgatgtgccggaagatgagctgtgcggcgtcgcgccgggcagagtgctgccgatctctgagcagtggcacccgctcttgattaaagcgttaagctcgattccagcgctgaatgccggggactccgtctggtggcactgcgacatcattcactcggtggcgccggtggaaaatcagcagggctggggaaatgtgatgtacattccggccgcgccgatgtgcgagaagaacctcgcctacgcgcagaaagtgaaaatcgccctggaaaaaggcgcctcgccgggggatttcccgcgcgaggactatgaagccagctggcaggggcgcttcaccctggaggatctgaatatccacggcaaacgggcgctgggtatgccggtctaa

SEQ ID NO: 240119 - DNA, 816 bp, Klebsiella pneumoniae
atgaccgttaaagttatcgtcaccgatatggacggaacttttctcaatgacgccaagcagtacgaccgcccgcgtttcctcgcccagtttgcgcagctcaggcagcaaggtattgaattcgttgtcgccagcggcaatcagtactatcagctgatctcatttttcccggaaattcgcgagcagatttcattcgtcgcagaaaacggcgctctggtttatgaacatggcaagcagctgttccacggcgaactgacccgccacgaatcacaagtggtgattggcgaattgctcaaagatccgcagctcaactttgtcgcctgcggcctgcagagcgcctacgtcagcgataaagctccggacgcctttgttgagctgatgtcgaagcactaccatcgcctacagcgggtgagcgactatcacgccatcgacgatacgctgtttaaattctctctcaacctgccggacagcgagatcccacagctgattgataaactgcacgtgtcgctcgacggcatcatgaagccggtcaccagcggctttggctttgtcgatttgattatccctggcctgcataaagccaacggcatcagccgtttgctcaagcgctgggatctttcgccgcagcaatgcgtcgccatcggcgacagcggcaatgacgccgaaatgctgaagctggtgaaatacgctttcgccatgggtaacgctgccgacagcatcaaggccatcgccggctacgctaccgacgataataaccatgacggcgcgctgaacgttatccaggccgtcctcgataacaccccgcccttcaacgcctga

SEQ ID NO: 240120 - DNA, 1029 bp, Klebsiella pneumoniae
  misc_feature (949)..(958): n is a, c, g, or t
atggattttaccgccggactgatgccgctcgacacagccctcgcccagatgctcgatcgtattacgccgctgaacgcgacggaaactgtaccgctgttgcaggccttctcgcgtgtgaccgcccatgacatcgtctccccgctggacgtgcccggctttgataacgcggcgatggatggctatgccgtccggctgaacgaccttcgcgacggcgccgcgctgccggtcgccggtaaggccttcgccggccagccgttcaacgacgcctggccgtcgggcacctgtatccgcatcatgaccggcgcgccggtgccggaaggctgcgatgcggtggtgatgcaggaagagaccgaacagaccgacgccggcgtgcgctttatcgcgccggtaaaagccgggcagcatattcgccgccgcggagaagatattgcccaaggcgcggtggtcttcccggcggggacacccctgacggtggccgagctgccggtgctggcctcgctgggcattgccgaggtcgaggtggtgcgcaaggtacgcgtcgcggtcttctcaaccggcgatgagctgcagctgccgggtcaaccgctcggcgacggccagatttacgataccaaccgcctggcagtgcacctgatgctgcagcagttgggctacgaggtcattaacctgggcattattcctgacgacccggcgaagctgcgcgacgcctttatcgccgccgaccagcaggccgatgtggtcattagctcaggcggcgtctcggtgggtgaagccgattacaccaaaactatcctcgaagagctgggggagatcggcttctggaagctggcgattaagccggggaaacccttcgccttcggcaagctcagcagcagctggttctgcggcctgccgggtaacccggtgtctgccaccgtcaccttctgtcagctggtgcaacccctgctgnnnnnnnnnnggcgaaactctcgggaaagcacggcccgcttcaggcgccccgcctgcgggtccgcgccgccacgcgcctga

SEQ ID NO: 240121 - DNA, 429 bp, Klebsiella pneumoniae
atggcggctggcgtcaaccgcgtagcgcacgccctcgacgccgaggacgttggccagctcatgcggatcccagaacaccgcggtggtgccctgggtgaggacgatttccgcatagcgctccggtggcaggtgcgagctttcgaggtgcacgtgggtgtccatcaggccgggggacaggtagccaccggccagggaacgcacttcatgggcgtcttcgcgactgccgcgcgggtggacgctggcgatcatctcgccgacgataccgacgtcagcggggcgaatttcgcccgtggccatatcgacgatctgcgcatcgatcagcagcagatcaaacggggattcaccgcgcgcggcctgcacggcgcgacggcggacttgagcattgctggacataaccactccggcacaaggataatgcggatactctag

SEQ ID NO: 240122 - DNA, 405 bp, Klebsiella pneumoniae
  misc_feature (391)..(400): n is a, c, g, or t
ttgccgctgaccgacgcgcagaaagcgttgattcccaccgaggccagcacgctgcatcgtctgctgggcgcccagccaggcagccagcggatgcgctatcacgccggcaacccgctgcatctggacgtgctggtggtggatgaagcctcgatgatcgacctgccgatgatgtcgcggcttatcgacgcgctgccggcccacgggcgggtgattttcctcggcgatcgcgaccagctggcctccgtagaagcgggggcggtgctgggggatatctgcgcctgggcgagttcgggctataccgccgcgcgggcgcaggagctgacccggctgaccggttcgccggtgccggcgggcgagggggctatcgcgggcgcgctgagagacaggttgnnnnnnnnnngctga

SEQ ID NO: 240123 - DNA, 348 bp, Klebsiella pneumoniae
atggtggccagcgtggtgatcagcgcgttgatcttaaggcgcgcaatgacaaagccgttaaccaggccactaagcgcccccagcaacaggcctgcggcgatccccagccacaggctttcgctgagattaatcaccaccgcggtggtgaccccggcgcaggcgataaccgacgccaccgacaggtcaaaatcgccggaggccaggcaaaacagcatgccgcaggccaccatcccggacatcgagatcgccagccccagccctttcatattgacgaatgaagcaaagttgggcacaaaaatcacacagccgataaacagcaccgcaaacaccaccagcatgccaaactga

SEQ ID NO: 240124 - DNA, 438 bp, Klebsiella pneumoniae
gtgcgcgcctgcctggcttcgctgattgcctgccgcggcaatgtgctgtttgtcgcctccatcgcctctctggccgccgggccgcaggcctgtggctatgtcaccgccaaacacgcgttaattggcctgatgcgctccatcgcccgcgattacggcccacagggcgtccgcgccaatgcgatttgtcccggctgggtcaccactccgatggcggatgaagagatgatcccactgatgcaggaacacgggctgtcgcttaccgaagcctatcaacgggtgtgccgcgacgttccgctacgccgccccgccagccccgaggagatagcccaggcctgtcagtttctctgctctccgcaggccgccatcatcagcggcgcgacgctggtcgccgatggcggggccagcatcgtcgatgttccaacgctggcgtttacttaa

SEQ ID NO: 240125 - DNA, 972 bp, Klebsiella pneumoniae
  misc_feature (860)..(869): n is a, c, g, or t
atgagtgaaagccagacgctggtggtaaaactgggcaccagtgttttaacaggcgggtcccgtcgcctgaaccgcgcccatatcgtcgagcttgtgcgccagtgcgcacagttgcacgccatgggacaccgtattgtcatcgtgacctccggggccattgccgccgggcgcgagcaccttggttacccggaactgcccgccaccatcgcctccaagcaactgctggcggcggtgggacaaagccgtctgatccagctgtgggaacagctgttttctatctatggcattcacgttggccagatgctgctgacccgcgccgacatggaagacagagaacggttcctcaacgcccgcgacactctgcgcgcgctgctggataacagcatcgtcccggtcattaacgaaaacgacgccgtcgcaaccgcggaaatcaaagtgggcgataacgacaatctctccgcgctggccgcgatcctcgccggggcggataagctgctgctgttaaccgaccagccaggcctgttcaccgccgacccgcgcagcaacccgcaggcggagctgattaaagacgtttacggcatcgacgacgcgctgcgcgccatcgccggcgatagcgtctccggacttggcaccggcggcatgggcaccaagctgcaggccgcggacgtcgcctgccgggcggggattgataccatcatcgccgcaggcaaccgtccggacgtcatcggccatgcgatggcaggcctgccggtaggtacctgcttccacgcccaggagtctccgctggagaaccgtaagcgctggatcttcggcgcgccgccggcgggggaaatcaccgtcgatgcgggcgcgacccaggnnnnnnnnnncgacccaggcgatcctcgaaagaggcagctcgctgttgccaaaagggatcaaaatcgtcagcggcaatttctcccgcggcgaagtgatccgcatccgcaatag

SEQ ID NO: 240126 - DNA, 531 bp, Klebsiella pneumoniae
atgccagaggaacgaggcgtccggccgcttgaggcgaaactccacggtctgattatccagcttgcggacgctctccacgctgtcagcaaactgcagactgtcgaagtaggggaagctgctgccgttgacgttgtgccacggatggtcgcggttaaaaatacggccaaaggtaaaaatgacgtcatcggcattaaagtcccgcgtcggggtaaaccacgccgtgcgttgaaacgggacgtggcggcgcaggtgaaagcggtaggtggcgccgttatcgagaacttcccagctctccgccagctcggggaccagccggtaggtatagggatcgacgtcaagcagacgatcgtagagctgagcggccagcgtatcgacaatcaggccgctgctgactttctgcgggttaaaggtattaacctggccgctgacgcaatagacgaaaccgctatcgcggatatcggcgcggtcggggagcgcaggggcggcaaaagctggcccacacagcagggaaacggctgccaggagagatga

SEQ ID NO: 240127 - DNA, 303 bp, Klebsiella pneumoniae
atggcgcagcagggagtcattcgaacggtagcgcagcgcgagacggatctcgctcaccccgcgcgtcggggttggccacatggggggctggccgtacagctgggccagcccttcgtcgtaggtgaatcggggaatgccaaagtcccgctgcggcacgcgcttgacgccgagcagccgctcttcgcgtgcggcgctcagcagcggcaggcgggcgccggtgtggatattcaacagctggttgaccagcgcggtgataaacgccgttttaccgctccggctcaggccggtcaccgccagacgtaa

SEQ ID NO: 240128 - DNA, 195 bp, Klebsiella pneumoniae
atgagccatcaactcaccttcgccgatagtgaattcagcactaagcgccgtcagacccgaaaagagattttcctctcccgcatggagcagattctgccatggcagaatatgaccgctgtcatcgagccgttttatcccaaggcgggcaatggccgacggccctatccgctggagaccatgctgcgtattcagtaa

SEQ ID NO: 240129 - DNA, 639 bp, Klebsiella pneumoniae
atgccaaaatacctcatcatgcgtcagaatgcgctgctgcttgagcgtaaactggcaataccgccatcgaagcgggcgcatacagggaaagtggtcgttggagaaagtaaccagcggtggtgctctgacggcttcggattcagctgtgataatggcgaaaaactgcaggtcacgttcgccctggactgctgcgatcgtgaagcactgtacagggcggcaagtaccggtggatatgacagtgaaaccgtacaggacgtcatgctggttgcagtagagcgtcgcttcggtaacagcctgccgtcatcccccgttgagagtctgacggataacggtgcggcctaccggtctcaccagacgcgtcagttcgccagaatagtaggactggagcctgaacatacggcggtacgcagcccggaaatcaacgggatgacagagagcttcgtcaaaacgatgaagcgcgactacatcagtatcatgccgaaacccgatgggttaacatcggtaaagaaccttgcggaggccttcgaacattacaacgaatggcatccgcatagtacaccggggtatcgttcgccacgggaatatctgcggcggaggaccagtaatgggttaagtgataaaaagtgtatggaaatatag

SEQ ID NO: 240130 - DNA, 582 bp, Klebsiella pneumoniae
gtgtttattccgtttcccggcagccaactggtgagccgggtcattgatacttttattgcgctgccgacctttcttatcactctcgcgttcacctttatttacggctcggcggggctgctcaacggcgccctgatggcgctgtttgcttttgaactgccgccggtagacttcctctattcgattaacggcgtgattctggcggagattaccgtctttacgccgctggtgatgcgtccgctgatggcgggattgcggcagatagataagagccagctggaagcggcgagtattctcggcgctcatccgttacgggtgattacccaggttatcttcccggcggcgctcccggcgctgatggcgggcggcagcctgtgcctgctattgaccactaacgagttcgggatcgtgctgtttattggcgccaaaggggttaataccctgccgatgatggtctacagcaaggcgattctggagtcggattacagcgtggcctgcatgattgcgctgatcaatattctgctgtcgctggggctgtttatgctctatcggctggcggcggcgcgcactggcgtaaggagttaa

SEQ ID NO: 240131 - DNA, 438 bp, Klebsiella pneumoniae
gtgctcggcatcgcgcttcacctcaaagcggtcgcgccactggctgcggaacagctcaatagcggtctggtcggtggggaactcgtgcgccggcagcaggttaatggccgccacttcctccagcgtgcgctggctgtcaacgtcgaacaggcgcaggctgtcgatttcatcgtcaaagaaatcaaggcggtagggctgatcgctacccatcgggaacaggtcgagcagcgcgccgcgggtagcatattcgccgtgctccatcacctgatcgacatggcggtagccggccccctccagctgatcgcgcagcgcatcgcgcgacaggcgctggccctttttcatcaccagcgcgtggccgtgaaggaagctgtgcggacagacgcgctgcatcagggtgctgaccgggacgatcagtacgccgcgctgcatggtgggtaa

SEQ ID NO: 240132 - DNA, 261 bp, Klebsiella pneumoniae
atgccgagcacaaagccgctgaacaccagccagaacgccgaagaggcaaagccgccgaagatcacctccggcggagcgattttcgccatcattgccgctgcgaagaacagcagcgcggtgataaattccggcagcagcgacgtcgcccagagcacgatggtgacgccgacaatcaatgaaggaaggaacagcgggtgggtaagccagagcgacatgcctgtctcctgtcgtttttttcagcaagaatacgacgacaggtaa

SEQ ID NO: 240133 - DNA, 720 bp, Klebsiella pneumoniae
gtgaatggcgtcgccatcgcctttttgctgcggcaccggttcgccggtgagcatcgcttcatcaaaccaggcttcgccctggcttatcatgccgtcgaccgggacgcggtcgccggtagtcaggcgcagggtcatgccggcctgaacttccgcgagcggcagatctttctcgccctcgggcgtgacgacccgcgccgaaggcggcgtcaggtcgagcagtttttccagcgctttcgaggagcgctgacgcgctcgggcctccagcatatggccgaggttaatcaggccgataatcatcgcgctggcttcgtaatagagatggcgggcttccatcgggaaccactgcggccacaggttgacgctcatcgagtacagccaggcgacgccggtgccgagcgccaccagcgtatccatggtggcggtgccgtttttcaggcttttccacgcgctgcggtagaagtggccgccggcgaagaccatgacggcgagggtgacaaggccgataaccagccacagcgaacggttgtcgtcactgaccatcatgttatcgccgatcatgccccagaccatcaccggcacgccgaccagcagggcgacaatcgcctgccagcgaaaacgtttcatcgtcgcgagggcggtttcctgctggcgttcgcggcgttgcagatcgtcttcgatcgcctccgcgccatagccggctttctccaccgcctgcactaa

SEQ ID NO: 240134 - DNA, 159 bp, Klebsiella pneumoniae
atgctgctcgttgagcagcgcctggttaccgagcagcagacgatgaccttccgcctcgccgctgacgccaaggccgcgcagggtgcggaagccgctgacttccggcaatgggccgtcggcagctttatcaaggatcgctcgcgccagcggatggcttga

SEQ ID NO: 240135 - DNA, 387 bp, Klebsiella pneumoniae
atggcgcatcagggtgatcgccgcggtttcaatagcgacatcgctgccgccgcccatggcgatcccgacatccgcctgggccagcgccggggcgtcgttaatcccatcgccaaccatcgccactttgtgcccctggctctgcagacgcttaatggcatcggctttaccgtccggcagcacgccggcgatcacttcatcaatgccggcttctttggcgatagccttcgcggtggtggggttatccccggtaagcatcaccagccggtagccctgccgatgcaaacgcgccagggcgtcgacgctgtcttcgcgcagcgggtcgcggatggcgaacagcgcggcggcctgaccatccaccgccagcagcaccggcgtggcgccgcgtga

SEQ ID NO: 240136 - DNA, 1761 bp, Klebsiella pneumoniae
atgacacgcttactcaagacaatcttgcccatcatcctctgcgccctcttcgggttatcgttcgcttcacccacgcaggctgtcgccagtctgccgatcgttcttcccgcgctgacatgcgatgcgctaagcgctaccgacttcagcgcggccgttggcgcaaaggtcactatcaatcacactgaaatgcagacctccgcgcagggaagctggtgcaaggtgagcgccactatcgcccctgagattggcgtgcagattgccctgccgactcaacgctggagtcaacgttttttgcaggtcggctgtggcggactgtgcgggagtattaacctgagtctgtcgaatgccagcggctgcctgccggcaatgaacggcgagtttgtggtggcagcaaccgatatggggcaccatggcagtatgatggatgcgtcatgggccgaagatccgcaaaagcgcatcgattttgcctggcgcgccaaccacctgaccgccgtgctggccaaagcggtgatgcagacgctttaccgccagccgccaaagtatgcctactttatgggctgctcagacggcggtcgcgaagcattgatggaagcgcagcgctttccgcaggattttgacggtatcagcgctggcgcgccagcggcctttttccagtttcagaactccttcttccacggctggaatgtggccgccaatcagcgcccggacggtaccgctatcctgctgaaaaatcgccttcctctgattcaccaggccgtgctggctcactgcccgacgctttccggcgtgcaggatggtgtcctgcaaaatccgtatgcctgtcagttctctgagtcatggctcccccgctgtcctgccgatgctcgggaccgttctacctgcctgacgcaggaagagatcgaggtggtgaaaaagctctaccgcggcgcttacgacagccacggcgcccagttcgtcgcgggcggtctgccgctgggttccgagctacgctggccggtgcccgagacgccgaccggccactcaatgtcggaaatgatggtactaccggctctgcaatccgtgctcctgccaggagaaaaacagaagatccaatcgatgcgggatttcccgcttaaccagcagaattttgacgccgtcgcccaactggcgccgctctataacgcggcaaataccaatcttcatgcctatcaacagcgcggcggcaagcttatcctctggcacggtctggccgatgactccgtcagcccggccttttctatcgcctattatcgcggcgtagaagcagagatgggccatgccgcaacggataccttcctgcggttattcctgctgcctggggtagcccattgcggtaatggcgaaggttacgatcaaattgatctccttaccccgctgatgcgctggaccgaggaaggcatcgcgccgcaggagatcatggccggcaaacgggcaacagccgctgccgacctgccgccgatgacagaaaaaccagatgcgcaaacgcagtttcacggcgtgcagaaagtcagtcagccttacgctgacgccgctccagcggttatcgcgactcgtccggtgtatcccttcccggccattgcccgttataacgggcgcggcgacgtgaatgacggcgaaaattatcatgcagagcaaacaaccgcctttggtcatctgcagctggcaaaacccgccagcgactatattggccctgataatcaaaaaaattatcaggttcgccacggcacactcactgttcaataa

SEQ ID NO: 240137 - DNA, 474 bp, Klebsiella pneumoniae
  misc_feature (455)..(464): n is a, c, g, or t
atgacaacatctacacccgatattcaacccgccgtgcagcataccgctcaggtcgccatcgttggcgccggtccggttggtctgatgatggccaactaccttggccagatgggcatcagcgtgctggtggtggaaaagctcgccacactgatcgattacccgcgggccatcggcattgacgatgaatccctgcgggcgatgcaggcggtggggctggtgaatgacgtgctgccgcataccacgccgtggcacgccatgcgttttctcaccccaaaaggccgctgctttgccgatatccagccgatgaccgatgagtttggctggtcgcggcgcaacgccttcattcagccgcaggtcgatgcggtgatgtatcacggtctgcagcgtttcccgcaggtccgctgcctcttctcccgcgaagtggaagcctttagccagaccggtgacggtgtcannnnnnnnnngtcacgttaa

SEQ ID NO: 240138 - DNA, 348 bp, Klebsiella pneumoniae
atggtgggcatgcatcccggtggcggtctccgacttcagcaccgccttcagggcgcggaagcggtcgcgaatgtcgttcatgttcatcgccccgccggaatccaccacatagatacaggtcgcgccataagattccatcttcagcgcctgctgcgccagcgcctgcggggagatcatatggctcatcatcagaaaaccgacggtgtccatccccagctcgcgggcaaaggcaatatgctgcgcggcgacgtccgcttcgctgcagtgggtggcgacccgcaccacccgcgccccggcctgatacgccgctttcagatcgtgcagcgtgccgatgcccggcagcagtaa

SEQ ID NO: 240139 - DNA, 330 bp, Klebsiella pneumoniae
atggctgctgcggttgccgtagatcagcgtaaagcggctttgcggctcggtcgccagcgtcgcgctaatgatcgccatcatcggcgtgatcccggagccggcggcaatcgccagatattctccctgccgttcggcctgcggttgataaccgaaatacccctgcggcaccatcacctccagctccataccctgctggatatcgtgctgggcgtagcgcgagaagcgtccgccgtcgatggctttgaccgcgacgctaatttcgcctggcgtgcggctgtgacaaatggagtaacagcggcgcagttcttcgccgcccagacgggcttttag

SEQ ID NO: 240140 - DNA, 612 bp, Klebsiella pneumoniae
gtggaaatcccagttctgccagtgaatggtatcgccggtaatggtgtagtttttgccttccggttcagtaatatccagcggtttcaccgccggggcgttgcggtcgcgaccatcatacggacggggctccatttggaccgggatcaccggaccttcttcgattttgatgattttcttcgcttcaaggtcgaccaccgccaccaggttttcaatcgggtgcgcccagtagttgccgtcgccggtatccagataactgaccaccttcagcagacgcgcatcctgctgcaggccatctttgccatcaaaaaagccaacggtgagcggggtggtgaccactttgccaggatcggtaataccgtgctttttcagcacctcagcgaattcgctgctggtattgatgatgttctgcacgctgacaaaatcatcgagcagcaccatcccgtgggcgcctttgatcggcgtccaggagaggatttttttgttttgcagatcgaccacggcttcaatgacgtgtttgccatcgagcatcaccacatcggcagtgcggggagcatcgaccggcgttccctgcagggcaaaggcccataccgccgccttgtccggctcgtgtaa

SEQ ID NO: 240141 - DNA, 309 bp, Klebsiella pneumoniae
atgtgctctaaccagctgagctacgtagccatctttttttcgcgtaaccttatcggcgttgcggggcgcattatgcgtattgggcctgcgagcgtcaacctctttttcaaggaaaatcgttgtaatgtgactgtttggttaggttgcgaacagctcgctggaatattcggcaattattggttatttatcgtttttcagcggtataaatccggcaaaaagaaaacggaccccggagggtccgttttgcgtttcaccgcccgtctgggcttatttgtaagccgactggtggacaccgaccgcgcggcctga

SEQ ID NO: 240142 - DNA, 432 bp, Klebsiella pneumoniae
gtgcagcaggcgctggcgggaacccgctgcgcggtggacctggcggctgattttaccaccgtggcctggcgcaaactgttgcagaacgcggttgccggactgatggtgctgaccggacgccgcgccgggatgttcgcccgggaggacatcactgccctcggactggcttatctgcgcgaatgcctacaggtggcgcgggcggaaggggccgccctgagcgacagcgtgccggaggagattatcgccggctttcatcgggcgcctgccgacttaagcacctctattctgatcgatcgcctcaatggccgaccgctggagtgggatattcgtaacggcgtggtgcagcgtcgcgggcgtcagcacggcattccgacgccgctcagcgatatcatcgtgccgctgctggcggcggccagcgacggcccgggctga

SEQ ID NO: 240143 - DNA, 1800 bp, Klebsiella pneumoniae
atgaaaacgttggtcaatgacggcccgagcgaaccgctgtttacgcccacgccggaagtccagccgcagcagccggcccagcgctatcaacaaccggcggccgctccgcagcagggttatcaacctgcgcagcatcagccgatacaccatcagcctgtgccgccgcagccgcaatcctatccgactgcgtcgcagcccgtacagccgcaacaaccggttgccccgcaggggcatcagcctgccgcccctgcgccgcaggagagcctgatccacccgctgctgatgcgcaatggcgatagtcgaccgctgcaaaagccgaccacgccactgccgtcgctggatctgcttaccccgccgccgagtgaagtcgagccggtggatacctttgctctcgagcagatggcacgcctggtggaagcgcgactcgccgatttccgcattaaagcggatgtggtgaactactcaccggggccggtgatcacccgcttcgaactgaatctggcgcctggcgttaaggccgcacggatctctaacctgtcacgggacctggcgcgatcgctgtcaacggtcgccgtgcgcgtggtggaggtgatcccgggcaaaccgtatgtcgggcttgagctgccgaataaaaaacgccagaccgtctacctgcgtgaagtgctcgacaacgccaagttccgtgataacccatctccgctcaccgtggtgctgggcaaagacatcgctggcgatccggtagtagccgatctggcgaaaatgccgcatctgctggtggccggtaccaccggttccggtaagtctgttggcgtcaacgccatgatcctcagcatgctctacaaggcgcagccggaagatgtgcgtttcattatgatcgacccgaaaatgctcgagctgtcggtctacgaaggaattccgcacctgctgacggaagtggtcaccgacatgaaagacgccgccaatgcgctgcgctggagcgtcaatgagatggagcgccgctacaagctgatgtcggcgctgggcgtgcgtaacctcgcgggctacaacgagaagatcgccgaagccgcgcgcatgggacgtccgatcccggatccgtactggaagcctggcgacagcatggacgccgtacatccggtgctggaaaaactgccgtacatcgtggtgctggtggatgaattcgccgatctgatgatgaccgtcggcaaaaaggtggaagagctgatcgctcgcctggcgcagaaagcgcgcgcggcggggatccacctggtgctggcgacacagcgtccgtcggtagatgttattaccggcctgattaaggccaacatcccgacgcgcatcgcctttaccgtgtcgagtaaaattgactcacgtaccattctcgatcagggaggcgcggaatcgctgctgggtatgggggatatgctttactccgggccgaactctaccacgccggtgcgcgtccacggggcgtttgtgcgcgaccaggaagtccacgccgtggttcaggactggaaagcccgcggtcgcccgcaatatgtggatggcattacctccgacagcgaaagcgaaggcggcggtggcggcttcgacggcggggaagagctggatccgttgttcgatcaggcagtcaactttgtgaccgagaagcgcaaagcgtcgatttccggggttcagcgtcagttccgcatcggctataaccgtgccgcgcgtattatcgaacagatggaagcgcagggtatcgtcagcgagcagggccataacggtaaccgcgaagtgctggcgccgccgccctttgaatga

SEQ ID NO: 240144 - DNA, 612 bp, Klebsiella pneumoniae
atgggcggtcagcgccgcgccgcagccggcgccgctgccggtgaccacgttgaacaccccgtcaggaatgcccgcctgggtcgccagctccgccacccgcagcagggtcagcggggtggtttccgagggtttgatgacgatcgaacagcccgccgccagggccggcatgaccttccacatgccgatcatcagcgggaaattccacgggacgatgcccgccaccaccccgaccggctcttttttggtccacgcctggtaacgcgccccttgcgggaacgggatcgaaacgtccagcgtccggccgctgatcttggtggtcagccccgcggtgtagcgcatccagttcagggtgcagccgacctcaaaggcgcgggagatggcaatggatttcccctgctcgagggtttccagttgcgccagctcttcgccgtgctgctccaccagatcggcaaaacgcagcaggatgcgttcacggtcagccggggtgcgcccggcccagcggcgatcgacaaaagcgcgccaggcggacatcaccgcccggtcgacatccgccgggctggcgtcggcggtggtggcaatcgcctgcccggtggccggatcccagacggttaa

SEQ ID NO: 240145 - DNA, 768 bp, Klebsiella pneumoniae
atgccggataaccagatcaacggcgtcgacttcgtcctgccgttccgcttcagcgacggtcactggcagctgggcatccgccgcccggtctccctgcgcattggcgaaatcgtcaaccaggtcacagcgcgtaatctgacggcggacctgcagggcacctggccgtggagcgaggccaatccgctgcagctcagcgacgtcagcgtcgatctgttaggcgggaaactgacactgctgcagctgcgtatgccgcagcgcgacccggcgttgatccgcctgcagcatatctccagcagcgaactgaccagcgccgtcaaggtgaaacagttcgccatgtccggcgcggtgagcggcgcgctgccgctgtggctggagaataatcaatggatcatccacgacggctggctgcgcaatgacggaccgatgaccctgcggctggataaagacaccgccgatgcgctggtggcggataacgtctccgccggggcggcgattaactggctgcgctatatggaaatctcccgctcgtggacgcagattaacctcgataatctgggcgtgttgacgcttaaggccagcatcaacggcaccagccgggtggaagggaaaagcagtaccgtgcatttaaactacgctcatgaagagaatattttcgacctgtggcgcagtttgcgcttcggcgacaatttacaggcgtggctcgagcagaatgctacgctgcccgtacggcgctgtacggacggtaagacatgtaaggaacctaaatga

SEQ ID NO: 240146 - DNA, 255 bp, Klebsiella pneumoniae; identical to SEQ ID NO: 135965

SEQ ID NO: 240147 - DNA, 369 bp, Klebsiella pneumoniae
atgcagacgctggaccacctcaatcgccgccagcacgccgagcatgccgtcgtagcgcccggcgttgcgcacggtgtcgagatgagagcccagcagcaccgccggcgcgccctcctgcacgccttcatagcgaccgcagatattaccgacgctgtcctgccataccatcatgccggcggcctgcatccactggcccaccagctggttggcctgcagatgttcgggcgacagatagacccgggtcagggcatcggcggtttcgctgagggcggccagccgatcggcacgcgccatcacccggctggcggccgcctctctctccgcctgctggcggacggtgtcactcatagggtggcctcggtgcggtag

SEQ ID NO: 240148 - DNA, 1215 bp, Klebsiella pneumoniae
atgatcgccccggccagcaccagattttgtccggcctgcggcagcaggttaagcgccattcccaggccggcgagaataaaggcaaactcgccaatctgcgccaggctggcggcgatggtcagcgcggtgcgcggcgagtggccaaacatccgcacaaggaaaaaggcggctgcggatttaccaaagataataatcgccagcgtcgccagcaccgccagcggctgttggaccagcaccatcgggtcaaacagcatgccgacggagacgaagaacagcaccgcgaaggcgtcgcgcagcggcagggtgtcatgggcggcgcggtggctgagctcggattcgttaagcaccatgccggcaaagaaggcgccgagggcaaaagagacatcaaacagctccacggcgccgaaggcgatgcccagcgccagggccagcaccgacagagtgaacagctcgcgtgagccggtggcggcgctgcgcgacatgatccacggcaccagccggcggccgaccagcatcataatggcgataaaggccaccactttgccaatggtgatcccgaggtcgagggccagggacgcgaagccgacgttgcctttctccgccataccggcaatcgccggcagcaggaccagcgtcaggaccatcaccaggtcttccacaatcagccagccgatggcgatttgcccgcgctggctgtcaatcagttgtcgttcctccagcgcgcgcagcagcactacggtactggcggtggagaggcacaggccaaagacgatgccggtcatcagcgaccagccgagggcggcggagagcgccatacccagcagcgtcgccacggctatctgggcgatagccccggggatggcgatcgattttaccgccatcaggtctttaagtgagaaatgcagcccgacgccgaacatcagcagaatgacgccaagttccgccagttccggagccagtttggtgtcagcaacaaagccaggggtgaaaggtccggccagcacgcccgctaagagatatcccaccagaggagaaatacgtagcttattggcaatcatgccgagaataaaggcgagcacgaggccgccgacaatggtggtgataagcggtgttgcgtggtgcattccgtctcctttccagtggtgtatcggtccattttgctaccctgtccgggtaatagtttatgacaaaaacgttcactttgtttatgaataa

SEQ ID NO: 240149 - DNA, 477 bp, Klebsiella pneumoniae; identical to SEQ ID NO: 216071

SEQ ID NO: 240150 - DNA, 3417 bp, Klebsiella pneumoniae
atgaagaaaatccttattaaattttctggcgttttttttgtcgttattattactgttattttgtttctactatattacctgtggggaccatccctgggatggatggaaccagcagaaaaatttcgggtgctctgtactattttcgcagttcctgttttcctctctttgttgctagtcagtcggtactcacttgttgcgtttgcatcaagattgcgttttttccataagttaaatgataaacagaatacttggtcaaacaatagtgctcatttgaaacaggtagacataagtaaaaagataataaacgacgtacaacaagttctgcgacatacttacggtcatttctggcatagcaaagtccgtatcctgctgatgaccggctcagtcagtgatgtggaacaactggccccaaaactcaccagggaactctggcaggaagaccgggggactgtgctgctgtggggtggtgatcctgcgactccggccgatgcagactggctggctgtgttgcgtaaactgcgccgccgtgcggtggacggaatggtctgggtgacctcagcgctggacgttctgccggcaacggaaaacagcgcaacctcaggtctcacgccagatgcaatggatagcgtgtctcatgctttaaagcttcgctatgaggctctgggctggaagctgccactgtacgtctggtcgctgcatccgcgcgccggagaacaggccgggcgcgtcacccagccagtggggtgcctgttgcctgcgaattgttcaccgcagacgctcgccggacagcttaccgggctgataccgcagctgaccgcgcaaggcatacagcaggtctgcggtcagccacagcacaattttttactcgcgctggccgatcagttgacccgtaaaccggaaacggtgacggagccgttatcggtattgcttaatccttaccgcccgcagccgctggccggagtggtgttcagcgcgccgtcggcggaggccggccgcagcatcagccatcactggggccgggataaccgctgggatattctgccggacaggatgacggaattacccgcaggtctacgtccgcgcaaacagggagtcaactggatgcgtgggatgagcgtggcaactgccgccctgatgttattttgggccgccactctgctggtctcttttatcgccaaccgcgagctggttacgaccgcacagcagcaggtgcagcaggcctcggcgggaaaacagccgctggccgtacgccttcatgcgctctccgcgttacagaaaacgctttctcaactggaataccgctcgcagcacggcgcgccgtggtacctccgcgctggcctcagtcagaacgatgacctgctggcggcgctgttcccgcgctacggagagagggcgcagccgctgctgcgcgatgcggcggcgcatcatctggaagagcagctcaccgccttcgtgcagctgccgccggacagcccactgcgtgagaagatgacgaagaccgcttacggacaactgaaacaatatctgatgttgacccgcccggaaaaaatggacgccgcgtggttcgccactacgctaatgcaggactggccgcagcgctcaggcatcgccgacgccgtctggcagggcagcggcccttcgctgctggcattttatgccgccagtctggcgtcgcatccgcagtggcgtctgcctgtcgatgacggtctggtcagccaggtgcgcacacggttaattcgacagatgggccagcgcaacagtgagtccacgctttaccagaagatgctcgcgcaggtggcgaatcagtatgccgatatgcgcctggcggatatgactgccgacaccgatgcttcgcgtctgttcagcactgatgaggtggtgccgggcatgtttacccgtcaggcctgggagcaggccgtgcagccggccattgagaaagtggtcgcggaacgccgcgatgaaatggactgggtgctgagcgacacgaagcagcctgccgcgcagtcgacgtcgccggaagctctgcgagccaggctggcggagcgttatttcgctgattttagcggcgcctggctggatttcctcaacagtttgcgctggcagcgcgcggcgaccctctctgatgccattgaccagctgaccctgatggccgatgtgcgccagtcgccgctggtggcgctgatgaacaccctgagcgtgcaggggcgaaccggccagaccggggaagccatcgccgattcgctggtcaaatcggccaggcagctgttcaaccgtgacaacccacccgccatcgatcagcagtccggctcgcgcggtcctctggatgccaccttcgggcccgtactggcgctgctggacaatcgcgacggcgggacacccaccagccgtcttagcctgcagaccttcctgacccgcgtcacccaggtgcgtctgcgcctgcagcaggtcaccaacgccaccgatccgcaggcgatgacccggttgcttgcgcagacggtattccagggcaaggccgtggatttaaccgaaacgcgcgactacggcagcctggtggcggcggggctgggccaggagtggagtggatttgggcaaacgctgtttgttcgcccgatggaacaggcctggcagcaggtgctgaccccggcggcggaaagtctcaacgcccagtggcgcagcgcggtggtggaggactggaatagcgcttttggcggtcgctacccctttaaaaataccagcagtgaagtctctctgccgctgctggcaaaatacctcgacagcgagaccgggcgcatcgcccgctttctgcagacccggctgaacggcgtgctgcataaagaggggagccgctggatggcggacagtatcaatgctcaggggctgacgtttaacccggcctttctgcaggcgatgaataccctgagccatctctccgacgtcgcgttcgccaacggcgaagcgggattgcattttgcgctacgtcccggcaccgcggacggcgtgatgcagacggagctggtcatcgacaatcagaaacttgtctatatgaaccagatgccggtctggcggcggttcagctggcccgctgacaccgaagcgccgggcgccagtctgagctggatcagtacccgggcgggcacccgccagtatggcgatttcccgggcgcctgggggtggatccgtctgctggataaggcggtggtcagcgcttatcccggaacgagcagcagctggagcctgagctggaaagcgccggatggtctgttgctgaactacacgctgcgtaccgaggcgggggaaggaccgctggcgctgctggcgctgcgaaactttacgctaccggagacgatattcagcgtgcgcgcgtctgctgaacgtgttccgctgaccgacgatatacccggcgaagagggatactga

SEQ ID NO: 240151 - DNA, 1200 bp, Klebsiella pneumoniae
  misc_feature (1178)..(1187): n is a, c, g, or t
atgttagatatagtcgaactgtcgcgcttacagtttgccttgaccgcgatgtaccacttcctgtttgtgccgctaacgctcggtatggcgttcctgctggccatcatggaaacggtctacgtcctttccggcaaacagatttataaagatatgaccaaattctggggcaagttgtttggtatcaacttcgcgctgggtgtggcgaccggtctgaccatggagttccagttcgggactaactggtcgtattactcacactacgtgggcgatatctttggtgcgccgctggccattgaaggtctgatggccttcttcctcgaatccacctttgtaggtctgttcttcttcggttgggatcgtctgggcaaagttcagcacatggccgtcacctggctggttgcgctgggttccaacctctccgcgctgtggatccttgtcgccaacggctggatgcagaaccctatcgcatcggacttcaacttcgaaaccatgcgtatggagatggtcagcttctctgaactggtgctcaacccggtcgcccaggtgaaattcgttcacactgtggcgtcgggctatgtcaccggcgcgatgttcatcctggcgattagctcctggtacatgctgaaaggtcgcgacttcgcctttgccaagcgctcctttgccatcgcagccagcttcggtatggcggcgatcctctccgttattgtgctgggtgacgaatccggttacgaaatgggtgacgtgcagaaaaccaaactggcggctatcgaagcagagtgggaaacccagcccgcgccggcggccttcaccctgtttggtattcccgatcagaatgcgcagaccaaccactttgcgatccagatcccctacgcgctgggcatcattgctacccgctcggtggacaagccggttatcggcctcaaggatctgatggttcagcacgaagagcgtatccgtaacggcatgaaagcctacgcgctgctggaacagctgcgcgccggttcaaccgatcaggccgtgcgtgaccagttcaataacgtgaagaaggacctcggttatggcctgctgttgaagcgctataccccgaacgtcgctgacgccacggaagagcagatcgccaaagcgaccaaagactccattccaagcgtcgcaccgctgtacttcgccttccgtatcannnnnnnnnntgcggcatcctga

SEQ ID NO: 240152 - DNA, 1194 bp, Klebsiella pneumoniae
atgggtcgctgccggcagcggatcctgccaaatcagatcttctttcggcacttccggcccgaggtaacgggattttggccccatatcacggtgggtcagcttgaaccacgcccgggcgaacgcctcgttaaaggcctgcggatcgttgaggaagcggcgggagattttttcaaactccgggtcgaagcgcagggtcaggtcggtgaccagcatggtcggtttgcgctttttctccgggttaaacggatccgggataatctccggcgcgtctttggcttcgaactggatcgcgccagccgggctgcgggtctgcacccattcgtatttgaacaggttttcgaaaaagtagttgctccactgggtgggcgtctgcgtccagaccacttccagaccggaggtgatggcgtccgcgcctgcgccgctgccgtagctggagtgccagcccagaccctgcgcttccagcggcgcggcttccggctcggcgccaacgtggctggtttctgcggcgccgtgggttttgcccagcgtatggccgccggcgatcagcgcgacgatctcttcatcgtccatcgccatattgccgaaggtggcgcgaatggccgccgcggcggacagcggctcgccgctggcgttcggaccttccgggttgacataaatcagacccatttcggtggcgccgatggcctgtttcgccaggctttccggatgacggtgggccagccactctttctcatcgccccagtcgacgtcgagatccggttcccagacgtcttcgcgaccggcgccaaagccaaaggtgcggaagccggcgttttccagagcgacgttacccgccagcatgtaaaggtcggcccaggagattttctggccatatttctgtttcaccggccacagcagacggcgggccttatcgaggctgacgttgtcaggccaggagttcaggggagcaaagcgctgctgcccacgacctgcgccgccgcgaccgtcaacggtgcggtaggtgccggcgccgtgccaggccatacgaataaacaagccaatatagctaccccagtctgccggccaccactcttgcgaatcggtcagcagcgctctgagatcagccttcagcgcggagtaatcgagctttttaaactcttccctgtagttaaaattctcacccaacgggttggagcgattggagtgctggtttaa

SEQ ID NO: 240153 - DNA, 5013 bp, Klebsiella pneumoniae
  misc_feature (955)..(964): n is a, c, g, or t
atgaaaccatttcgtttagcggcgctatcactggcgctccttaccgcattttcattaaccgggtgtgatgacagcggtacaccgcaggcctcggccccggcgccagccgcggatagcaacccaggcgcgacggcaaaaccggaccgcgcccagctggcggcgctggcggaaaaaagccagggtaaagcgctgacgctcctcgacgcctcggaggtgcaactggatggcgccgcgaccctggtgctgacgttttccgtcccgctgcagccggaccaggatttctcgcgcagcgtgcatctggtcgacaagaaaagcggtaaggtggacggtgcctgggagctggcgccgaatctgaaagagctgcgtctgcgtcaccttgagccaaagcgcgagctgattgtctcagtcgacccgacgctgaccgccctgaacaaggcgacgcttgataaaccgtttgagaagacactgaccacccgcgatatcgcaccgagcgttgggtttgccagccgcggctcgctgctgccgggcaacgtggtcgccgggctgccggtgatggcgctgaacgtcgataatgtcgacgttaatttcttccgcattaagccggaatcgctctccgcctttgtcagtcagtgggaataccgtaactcgttaagcaactgggaatctgatgaactgctgaagatggcggatctggtctacagcggccgcttcgatctcaacccggcgcgtaatactcgcgaaaagctgctgctgccgctgagcgacatcaagccgctccagcagcctggcgtctacgtggcggtcatgaacccggcgggccgttatagctacagcaacgcggcgacgctgtttaccctcagcgatatcggcgtctcggcgcatcgctaccataaccggctggacgtttttacccagagtctggaaaacggcgccgcccagtcgggtattgaggtgnnnnnnnnnncagtttttacccagagtctggaaaacggcgccgcccagtcgggtattgaggtgcagttgctcaatgccaaagggcagaccctggcggaagcgaaaagcgacagccagggccacgtcaccctgcaaaccgataaagaagccgcgctgctgctggcgcgcaaagaggggcagaccacgctcctcgacctcaagctgccggcgctgcatctggcggaattctctatcgcaggcgcgcccggctttagcaaacagttctttatgtttggcccgcgcgatctctatcgtcccggcgaaacggtgatccttaatgcgctgttgcgcgatagcgacggcaagccgctggcggagcagccggtgaaactggaggtggttcagccggacggccaggtgatccgctcggtgatgagcaaaccagtgaatggcctgtaccagtttacttatccgctcgacagcggcgcggctaccggcatgtggcacattcgcgccagcgccggcgacaatcagccgcgcgaatgggatttccacgttgaagactttatgccggaacgcatggccctgaacctgacgccgcaggccgcgccagtcgcgccggatgccgacgtcacctttggcgttagcggcgcttatctctacggcgcgccggccagcggcaaccagctgcagggcaagctgttcctgcgcccgctgcgcgacgccgtcgctgcgctgccgggcttccagttcggcgatattgcggaagaaaacctctcccgtagtctggatgaagtccagctgacgctggacgaaaaaggccatggcgaagtgaccacctcaagccagtggcaggatagccattcgccgctgcaggtggtgttgcaggccagcctgctggaatccggcggtcgcccggtgacccgtacggttaagcagccgatctggcccgccgaggcgctgccggggatccgcccgcaatttacgctgaaggacgtttacgattaccgcaccgataccaccgtgaaacagccggtggtggatgaaaacagtaacgccgcgtttgatatcgtctatgccgacgtcaaaggcgagaaaaaagcgatctccggtctccaggtgcggctgatccgcgagcggcgcgactactactggaactggtccgacagcgaaggctggcagtcgcagttcgatcaaaaagatctgcaggagggcgaggagtcgctggacctgcaggccggccagatcggcaaagtgagcttcccggtggagtggggatcctatcgcctggaggtgaaaggaccggacgacgtggtcagcagcgtgcgcttctgggcgggctacagctggcaggataacagcgaaggcgccggcgcggcgcgtcctgaccgggtcaccatgaagctggataaaccgagctataaaccgggcgacaccatcaggctgcacatcgccgccccggcggcgggtaaaggctacgcaatggtggaatccagcgaagggccgctgtggtggcaggaaattgacgtcccggcggaggggatggacctgtcgatcccggtggataaaacctggaatcgccacgacctctaccttagcacgctggtggttcgtcccggcgataaatcgcgctcggcaacgccgaaacgcgcggtgggcctgctgcatctgccgctgggcgatgaaaaccgtcgcctgacgctggcgctggaggccccggacaaaaggcgccccaaccagccgctgacggtgaaagtgaaagccagcgtcaaagagggcgaggcgccgaaacaggtcaatgtcctgctctcggcggtggatagcggggtactgaatatcaccgattacgctaccccagatccgtggaacgccttctttggccagaagcgttacggcgcagatatctatgacatctacggccaggtgatcgaagggcagggacgtgtggccagcctgcgcttcggcggcgatggcgacgagttaaaacgcggcggcaaaccgccggtcaaccacgtgacgatcgtcgcccagcaggcgcagccggtggtattgaacgatcagggcgaaggcacggtgacgttacccattggcgattttaacggcgagctgcgggtgatggcccaggcgtggacggcggatgacttcggcagcagcgaagataaagtggtggtggccgccccggtcatcgccgagctgaacactccgcgcttcctcgccagcggcgatactacacggctggcgctggatctcagcaatctgaccgataaaccgcaaaccctgcaggtacatcttaccgccagcgggctggtgaccttgaccgatggccaactgccgccggtacagctggcgccgggggcgcgcagcacgctgtttataccagtgagcgcgctggcgggcttcggcgatggtcaggttaatgccaccatcagcggcctgagcctgccgggcgaaaccttcgccccgctgcaaaaacagtggaaaatcggcgtgcgtccggcgtacccggcacagaccgttaacagcggcgcagtgctgcagccaggtgaaagctggcagccgccggcggcgcaaacggcaggctttgccgcgcaaacgctgcagggccaactgctgctcagcggtaaaccaccgttgaatctcgcccgctatatccgcgagctgaaagcctatccttacggctgccttgagcagaccgccagcggcctgttcccgtccctgtacaccagcgcggcgcagctaaaggcgctgggcattagcggtgacagcgacgaaaaacgccgcgcggccatcgatgtcggtatttcacgcctgctgcagatgcagctggaaaacggcggctttgcgttatgggatagagaggggccggaagagtactggctgaccgcctacgccatggacttcctcgtgcgcgccagcgagcagggctatagcgtaccggtcaacgccattaataaaggcaacgagcgcctgctacgctatctgcaggagccaggcctgatgaccgtgcgctacagcgacgacgcccaggctagccgctttgccgctcaggcctatgccgcgctggtgctggcgcgtcagcaaaaagcgccgctcggcgccttgcgtgaaatctggagccgtcacgaccaggcgcgatccggcttgccgctgctgcagctcggcattgcgctgaaaaccatgggcgatgcgccgcgcggcgacgccgccctgaagctggcggttgccaccccgcgccaggatgagaatcgttggctgggcgattacggtagcccgctgcgcgataacgccctgaagctggcgctgctggaagagaataagctgctgccggaggtgcaaaatcagctgttgagcacgctgtcggaagaggcctatggccagcgctggctgtcgacccaggaaaccaacgccttgttccttgccggacgtacgctggcggacctgccgggcagctggcaggcgcaaacctcgctgcaggcggagccgctggccggcgacaaagcgcaaacccgcaatctcgacggcgatcggctggcggcgctgcaggtgagtaataccggcagtcagccgctgtggctgcgtctcgacagcagcggctatccgcaaagcgcgccgcagccgggcggtaacgtcctggggattgaacgcactattttcgatacccaggggcagcagaaatcgctgtcttcactgcgcagcggcgaactggtgctcgtcaagctggaggtgaccgccaaacgcaacgtgcctgacgcgctggtggttgatctgttgccagccggtctggagctggaaaaccagaatctggccaacagcagcgccagcctgcaggagaatggcgacgcggtgcaaaacctgcttaaccagatgcagcaggcggatattcagcatatcgagttccgcgatgaccgtttcgtcgctgccgtcgctgtcaatgaaggccagccggtgacgctggtctatctggcgcgggcggtgacgccgggcacttatcaggtcccgcagccgcaggtggaatcgatgtatgcgccgcagtggcgggcgacaggagcggccagcggtccgctcaccgtgacgccgtaa

SEQ ID NO: 240154 - DNA, 429 bp, Klebsiella pneumoniae
atggctgaggcactggatcggctgctggcgaaacccctgggcatcgacgagggtcaacgcctcatccacccggcgggcgatctcctcttccgccaccccgaggttacgcagactaaaagcgatatcgctgtcgatatcggtatagaatatttgctggtccggatcctgaaataccgtcgccacctgctggcgcagcgccagcagaccgcgcttgctgtaattcagcgcctctccctgccacagcaccgccccctgctgcgggcgcagcaggccgctcaggttcataaacagcgtcgactttccgcagccgttggcccccaccaggccggtcaccgcatggcgggaaaaatccagcgtcagccctttaagtaccggctcatcctgatagcgaaaccagagatcggttgtggcaagcatacttatccttag

SEQ ID NO: 240155 - DNA, 213 bp, Klebsiella pneumoniae
ttgcccgccatcctgacggcgaaagagcgggaaatcgtcggcatggtgcgcgaaggcgccagcaataagctgattgcccgccagctggatatctcgctctcgacggtaaaaacgcacctgcgcaatattttcgccaagaccgaagtggtcaatcgtaccgaactggtttcccgaacctggatgccggccgctcagcgtacgctgcatctgtaa

SEQ ID NO: 240156 - DNA, 3144 bp, Klebsiella pneumoniae
  misc_feature (403)..(412): n is a, c, g, or t
  misc_feature (3037)..(3046): n is a, c, g, or t
gtggtgctggctaccggcgtgcagcccgacagccgtctggcggcgcagtccggcgtgctgtgccagcgggggatcgtggtcgaccgtcagatggcctcctcgctgccggggatcagcgccatcggcgaatgttgcgaaattgacggccagacctgggggctggtggctccctgcctgcgtcaggccgaggtgctggcggatcgcctgtgcggcgcccccggcgagggctttgtctggcaggacgccgggacccgcctgaaggtcaccggcattgaactctttagcgctggcgagcagcaggccggcgaacaggatgacatttataccagctgggaccccatcgaccgccactatcgccgcctgctgctgcgcgatggccgcctgcgcggcgtgctgctgatgnnnnnnnnnngtgcagtcgcccatcagcagcacgccgcgctcaccgcgcgcctggaaagcgatgagcctgccaccgtggactggctttttgacccctcttcaacgcagccgcaggctgcaggaataatgacgatgacgaaacctgtattagtgctggtgggacatggcatggtcggccaccattttctcgaacaatgcgtgagccgcaatctgcatcagcaatatcgaatcgtggtgtttggcgaagagcgttaccccgcctacgaccgggtacatctctccgagtattttgccggacgcagcgccgagtcgctgtcgctggcggccggggacttctttattgaacacggtattgaactccgcctcggcgaggcggtggcgaccatcgaccgcgaagcacggctggtacgggacgccgaggggcatgaaatccactgggataaactggtgctggcgaccggctcgtatccctttgttccgccaatccccggtaacgatctcgcggggtgctttgtctaccgcactcttgacgatctcgaccgtatcgccgcccatgccgccgcggcgaagagcggggtggttatcggcggcgggctgctcgggctggaggcggccaacgccctgaaacagctggggctggagacgcaggtggtggagtttgccccgaacctgatggccgtccagctggataacggcggggcggcgatgctccgggagaagatcgtcgccctcggcgtgggggtgcataccagcaaagcgaccaccgccatcgtgcgcgaggccgacggcctgcggctgaactttgccgacggcggcgcgttgcggaccgacatggtggtcttctcggcggggatccgcccgcaggacgcgctggcccgcgactgcgcgctgcaggtgggcgaacgcgggggaattcacatcgacggccagtgccgcacctctgacccggacgtgctggcgataggcgaatgtgccctgtgggacaataaaatttacggtctggtggcgccgggctatcagatggcgcgcatcgccgcggccactctcgcaggagaggacgcctgctttagcggcgccgacatgagcaccaaactgaagctgctgggggtcgacgtggcctcgtttggcgatgcgcaggggcgcacgccgggctgtcagagctatcaatggaccgacggtccgcagcagatttacaaaaaaatcgtcgtcagtcaggacggcaaagccctgcttggcggcgtgctggtgggggacgccagcgactatgccacgctgctgcagatgatgctgaacggcatggcgctgccgccgcgtccggagagtctgatcctgcccgcgctggagggagccgcgccgaaggcgctcggcgtcgcggcgctgccggacagcgcgccgatctgctcctgccataacgtcagcaaaggcgatatctgccaggcggtgaacaatggggcgggggatatgtcggcgataaaaagctgcaccagagcggctaccggctgcggcggctgcagcgcgctggtgaaacaggtgatagagtatcagctggcggagcagggcgtcgaagtgaaaaaagacgtctgcgaacatttcccgtggtcgcgccaggagatctaccacctggtgcgggttaaccatatccataccttcgagcagttgattagccgctacggccaggggcacggctgcgatgtctgcaaaccgctggtggcctcggtgctggcctcctgctggaacgagtacctgctgaagccggcgcacctgccgctgcaggataccaacgaccgctatttcgccaatatccagaaggacgggagctattcggtggtgccgcggatggcggcaggggaagtgacgccggacggactgatcgccatcgggcagatcgccaaacgttaccagctctacagcaaagtgaccggcggccagcgcatcgacctgtttggcgcgcggctggaacagctgccggctatctggcgcgagctggccgacgccgggtttgaaaccggccacgcctacggcaagtcgctgcgcacggtgaaatcctgcgtcggctcaacctggtgtcgctacggcgtgcaggactccaccgggctcgcggtacggctcgagcatcgctataaagggctacgcgccccgcacaaaatcaagatggcggtctccggctgcacccgcgaatgcgctgaagcccaggggaaagatatcggggtgattgccaccgacaaaggctggaatctgtacgtctgcggcaacggcgggatgaaaccgcgtcacgccgacctgtttgccagcgatctcgacgaagcgacgctgatccgcagcatcgatcgtctgctgatgttctatatccgtaccgccgatcgcctgcagcgaaccagcacctggatggataacctggagggcggcgtcacctatctgcggcaggtggtgctggaggatagtcttggcattggcgaggagctggagcaggagatggcccggatcgtcgacagctaccagtgcgagtggcagaccaccctcaacgatccgcagcgtctggcgctgttccgctccttcgttaatagcgaccagcccgacgaggctgtgcagcgccgcgatctgcgcggtcagccgcagccgctgctgactgagacgnnnnnnnnnntgagacgttgcccgaaggcgaactcccatcccgaccgtggcaggcggtatgcgaccttgacgccattccggcgcaggcggggatcggcgcccgcttag

SEQ ID NO: 240157 - DNA, 624 bp, Klebsiella pneumoniae
atgaatgcgcgcggccagcgacagcgcgttgaccatcacccctttcgcggtgccggggtgcacgttattaccgacaatttttatcgtcaccgaggcggcgttgaagttttcaaactccagttcgccgaccccgccaccgtcgacggtataggcccagcgggcgtcaaaggcctcgacgtcgaaatgcttcgcccctttacccacctcttcatcaggggtgaaggccacgcggatatcgccatgaggaatatttttcgcctgcagagtcgccagcgcggtcataatttcggcaatgccggctttgtcgtccgccccgagcagcgttttcccgtcggtggtgatcagcgtctgtcccaaaagctgatgcagaaccgggaacatcaccggggagagcacctcatcgccgatacccagcgcgatatcgccgccgcgatagttttcaacaatctgcggattaacgtttttaccactgaaatccggggaggtgtcgacgtgggagataaaaccgatggccgggatatcgccctcaacgttagcgggcaaagttcccattaccgtccctttttcactcagcgttaccttgaccagtcccatttcttccagctgcgcctgcaacaggcgtaa

SEQ ID NO: 240158 - DNA, 336 bp, Klebsiella pneumoniae
atgagcgagacattacaggttctcaataacatccgtacacttcgcgctcaggcacgagagctaccattagaagtgcttgaagaagtattagaaaagttcactattgtcgtcgctgaacgcagtgaagaagaaaaggcggccgaagcggctaaccgtgagcgtttagaaaaactctctcattaccgggaaatgatgatcgctgatggtataaatccgagcgaacttatggatgcggccgtcaacattaaagtacgcaaaaaacgtgaaccacgtcctgcgaaatatgctaaagctcagctggatgcaggaaaaactctcgaagatttcctgatctaa

SEQ ID NO: 240159 - DNA, 1827 bp, Klebsiella pneumoniae
  misc_feature (1792)..(1801): n is a, c, g, or t
atgcgccttccccgatcatattccacatccgaatctagggtattgcgtgacagagaaaatcgtattgctgtgggtattgcctccgcagcctatacctataccactgataccattacttttgatgccgctacaggtgttgttcgtattgtcgtggcacagggggagatgaccagcgcagggtttgagaatacggctgccggtgcccaggcttatttctggcaaacctacggggacctgatacttagccaaaaatcgaccgtgacgcaacaacttccggaatacaccctgttttttgccgaacccggaaatatcacggtggcaacagatcagaactgcaccgctaccattcagatcactaaaaaactggtactggataccggcgcaatgctggcccgtgcagtagcggccgatcttcgttcgcagaatgcccgatatgctaccgataaatacagggacctggttacggccctcaaagactataaataccaccttggggcagtgggtaactatggttcatccgtcaacttcagtgccaatttcgccggtgacagtattttcagcctcgataaattatcgctatcagcgaatatacgccgggctgtaatgagtcttgtcgatgcagcaggtacagcttcaactgtcactcttctggaaggtgaatctataaccgggcacaccattaattcgccctatgtcgactttgttctacaacctgtcggaatctacagcctgtctgtcaatactgacacgggaagaacgatatttaaaatccctgtcactcttccgggagcgctgcccgctgattcaacccgtatcatccgtgacagaaccgactatttcggagcctataccccctccaccctgtatagcggaacgacaagggggattacctatgaagcggcaaccggcagtctgattatggctgtcatgaatgctgatgtcgtcctggcgggatatgcacttaccactgccggtgttattcagtatgtcactgagaaactcgctggatatgttttcagccaggtaagcgcaaccgttgccacccggcctttcagtaatcttttccgggccagtgccggggcggtttcactgaccaccgatacggctgtcactctgacaggaaatttctacggagcgaaaatgtcttctgatggtttgacgacttaccagcgttatgaggcggtggtaaagaacaacagtggatctgcaaccggccttcgccctgtcagggtgaaatgcaagttcaaggcaggcgaagttccaaacgacaaatgtattgtggtgacggatatcgacggacaagtctatccctgccagtgggccggggagccggactttaatccccgccgtggtcggaccctgagttactggggggatgattctcttcgtagcggtgaactgcttatcttggataatcttgccgccggacaagctaaaaagtacatcatcaaagcattcccgacagagcagacagcatcatcggtaaatcacaccgttcaggaaacgagcacgagttttctggttacagcggatgatggaacccaggtccgctttgacagcatcgtaggatggctcccttacaagctgaacagggacggcatgacgtacacggcaatttgccagcagctgctgatcaggctttcagctggcgcctggtctatcttcgccgtgaattatcaggatgcaaagtacacagtcatcagtgacgggccggtgtttacggaagtcgaaaccacgtttacgaatggtgtggccggggataatcaggaaatatcggcgggtttgctgaaannnnnnnnnnacctaccgtacgaagattttccgtaa

SEQ ID NO: 240160 - DNA, 834 bp, Klebsiella pneumoniae
ttgcagcaggtcgcggtccgggtagccgatcacttccccgttgcgcagtacggtgccgcggtcgcagagggtggctatctcattgaggtagtgggaaatatacagaatggcaatgccctggtcgcgcaggcgcaggatagcggaggagaccagactggcctcctgcgcctccaggggggcggtgggttcgtcgaacaccaccagccgcgctgcgccgtcgatcagcgcgcgggcaatctgcaccagcttgcgctcggccaggctcaggtcgcgcaccagccgttcggggtcgatcgccagctgccagttttgctggaaaaattgcgccgtggcggccttcatccgtcggcgatccagcgccccccagcgggtgcgatactcctggcccagaaacaccgattccgcgacggtaaagtgcgggatcaggttcaactcctggtggataacgcggatgccggcggcttcgatggctgccggattgccgaggggcagcgggtgaccgtcgagggtggcgctgccgctgtcggcctgatagacaccggcgaggatcttgatcagcgtcgatttaccggcgccgttctcgccaatcaggccatgaatctcccccggattgaggcgcagggtaaccgcattaagcgcggtgacgctggcaaaacgtttaccgatctgctccatgaccagaccagcggcggggcgttccccgccaggatgttgattaatcactgcagctcgccgtatcccaactgtttatacaccgctttcgcttcctgcggacctttcaccggaaccaccggaataaaggtttgcaccggtagtttctggccggcaaagtag

SEQ ID NO: 240161 - DNA, 981 bp, Klebsiella pneumoniae
atgtcgcagaaaagaaaattattgcctgccgcgctgggactgctttcccttgcctcgctgagcgtcgctgccgcagacgccctctccttacagggaaaaaccattggcgttgccgtggtcggcactcagcatttctgggatcgcgaggcctttaaaggcgcgacagaggaggtggagaagctggggggcaaagtcattggcgtcgatggcggccgcgataatcaggtgcatgccaataaccacgatattttactgtcacgcaaggtggacgcggtaattagtattctcggcgatagcgccgttgaaccaaaatttaaagcattgcgtgatgccggtatcccggtatttaccgtagatcatgtttctcaatattcggtcaacaatactacttccgataactacaccttaggctcaaccatcggccgctacatggcggatgaattaggcggcaaaggcaacgtcgccgtatttaacgccttctccagcgcgctgcgtatttgcggaattcgctacgatcagtggaaatatgtccttaaggattatccggatattcatattatccagcccgagctcgcggaacagttcgccaactcgccggaagacgcgcgcaagaaaaccctcgaattactcagccagtatccgaaaggtaaactggacgccatccatgtcgcctgctgggatcaaccggccatcggcatcgtccaggcgctggaagagaccggtcgcgataaagacgtgaaagtgacggccatcgacgccggtccggagaccctggagatcatggcggagcccggcagcccgttcgtggctaacgtcgcgcagcagccgcatctgatcggccagacctcggctgacaacgtggcccgctactttgccggccagaaactaccggtgcaaacctttattccggtggttccggtgaaaggtccgcaggaagcgaaagcggtgtataaacagttgggatacggcgagctgcagtga

SEQ ID NO: 240162 - DNA, 780 bp, Klebsiella pneumoniae
ttgacgggcgcgctggatagaccaggagatattcaccatcgtccggtggcgggccatctcccgcgccaggtcggcgatgcgctgggcgtccaggccggtaatcgccgccgcccacgccggggttttcgctacgccatcgtgctcgcccaacagataagcgcgatagggggcaaacccgacggtatggctggcaacaaacgcctggtcgtagagagactcagcgatcagcacatagctcagggccagcagcagtgcggtatcggtgcccggccgaatggccagccactcggcttcgggcaccgcgctgaggtcattgcgcaccggactgatattgataaaccgggtgccgttggcctgcatcttatccagccagtactggagcatatggtcattggcgccaccgccgttgacctgggcattgcgcagcggcagaccaccaatggcgacaaacagctgacactcccgggccagctcggaaaaatgggtatgctgccggtgcagcgggctcagcggcccgagaatatgcggcagaatacgctcgcccgcggcgctgctataggtattggtgctggcggtgtacccgccaaagcccttgagaaagcggtgcagctggctctgcgcatggtgaaagcgtccagcgctggcccagccgtaggagccgccgtagatcgcctcattgccgcagcgcgccttgaccgagcgcagctcgcgcgccagcaggtccagggccacctcccagctgacttcgacaaagggctctttacctcgcccttctcgtga

SEQ ID NO: 240163 - DNA, 1488 bp, Klebsiella pneumoniae
atgatgctgccggaaaccgataagccgctgctgcgcatcatcgccaaccccgccaatccggcctataaactgctgctgattgtcggcaaaaacgatacggcgctgcgcatggccgcctggcggttaacccgcggcaactttgcgccgcaaaccgcgacgctggatgtcgaaccgcagaccatcccggttggcaaagcatatgatgccccgcgctggatcaccaccgatcgtccggtcaagctcagcgagctgctgcgtaaggaccaaagcccgaccgtcagcggcgtctggcacgaacctttacgtatcgccttccgcgccgcgcccgatctctatctgtgggatggggagaccattccgctacaggttggctaccgcttcccgtcggaaagctggattaatgaggacaagtccttgctgagcgtcacgctcaacggcaccttcctcaacaacctgccgatgaacaagcaggggccgctggagaaagtctggcgctacctcgggggcgatgcgcgccaggagcgctttaccatcccgctggcgccttacctgatttacggcgataaccagctgtcgatgtacttcaatgtggtgccaaaggacgatgttccatgttcggtgctgctgaataacaatatcaagagccggatcactgacgactcctggatcgatttgagcaagacgcgtcacttctcgctgttgcccaatctctcctactttgtcggcgcctcgttccccttctcgcggctggcggactattcgcagacgaccctcctgctgccggcggacccgtctgaaacccaggtggcgaccctgctgaatctggcggcacgctccgggaacgcgaccggcaccgcgctggcgaataaccgcgtggtgctcgggatgcccaccggcgggggggatttgcagtcgctgcgtgaacgtgacgtgctggcggtcaccgctctcgatcagcaggcctttaaccagagcctgctggccgactcaccctatcgcccggtagataatgtgctgagcgtccgcgagccagacctgtggcaaaaagtccagcgccggctcaccggcgactggacttccgccagcctcgacgccgatcgctacttttcgtcgagcagcgcctggcgcgggttcatcagctatcgctcgccgtggaattccacccgcctggtggtggtggcgctggccagcaatgatgaccagctggcgcgactgaagaccgatctggaatcgccgcgcattaacgccgggatccgcggcgataccgcggtgatcaccagcgataacggggtgcgcagcttccaggtgagtacgccgttccccagcggtcagatgccgtggtacatgatggcggtctggtatgccagccagcactcaggtttcctggcggtgctggggctgattgccacctcgataatgggactggcgctgaccgcgatgtttaaacgtcacgcccgtaagcgtctgggttcgggggataaccaatga

SEQ ID NO: 240164 - DNA, 1488 bp, Klebsiella pneumoniae; identical to SEQ ID NO: 240163

SEQ ID NO: 240165 - DNA, 2112 bp, Klebsiella pneumoniae; identical to SEQ ID NO: 220473

SEQ ID NO: 240166 - DNA, 804 bp, Klebsiella pneumoniae; identical to SEQ ID NO: 220474

SEQ ID NO: 240167 - DNA, 1479 bp, Klebsiella pneumoniae
atggtcggctgcaacgggcttatcgccaccctggagcaactggaggagaagacctttctgcggcggatcccgctgcgggcgctggcggacggccgcctggcgctgcgggtggtgcccggcacgctctgggatcggctgcttctgtctggtgttcgcgctgagatatggatgcagccaggcgtcacccgggcccatctcgaccgctatgcggcgcgggcatacgacatcccgcctgccgcgcggcagggcaagctggcgctggtgcttggcgccggcaatgtggcctcgattgcgccactggatgtgctacacaagctgtttattgagaatcaggtctgcctgctgaagctcaatccggtgaatgattatctgcacgatctgctggcccaggccctggcgccggtgattgccatggatgcgctccgcatcgtcaccggcgacgcccgggcgggagcgtggctgactacccatcccgctgtcgatgagatccatatcactggctcccgcgagacccatgacgtcatcgtctggggcgagggtgagacggctcgccagcgtcgggccgccgggacgccgctgaacccgcgtcgggtgacctcggagctgggcggcgtcagccccaccattatcgtacccgggccgtggagcgaggcggacatcgcttttcaggcgcagcagctggcgacgcagaagatgaacaacggcgggtttaactgcgtggccagccaggtgctgatcctgcagcaaggctgggagcctgcgacggccttgctgaatcagctgtaccgactgatcgccgcgaatacccgcccggactactaccccggcgctgaaaaccggctgaccgactttcgcctgcgcgcccgtcagccgctggagatagcccgcggtgacgcgctgccgttgattgtggcgaataccgacgatgatcccgggttctgccagcaggaggtctttggcccggggctgtcggtcacccgtcttgaggccgatagtgcggaaagctttctgcgccaggcgatcggctatgcgaatcagcggctgcagggcacgctgggggccaatattgtgatccacccgcgcacccgcaaagcgattggacgtaagcgttttaatgcgctgatcgccgagctgcgctacggcacggtggcgatcaactgctggagtggggtggccttcctgttagccccttgcccgtggggggcgtttcccggccacacgctcgacgatattcagagcgggcggggcaaggtgcataacagctttatgctggagaaaacggagcgcacggtgattgaggcgccgtttcggccgtttccgcgtagtctttggcatggcaaactgacgctgatgcccctgccgccctggttcatcacccaccgggggcaggaagcggtggcgcagcggctggtggatttttaccatcggccgcgctggcgcaaattgccggcgctcctctggcgcgcgctgcggggctaa

SEQ ID NO: 240168 - DNA, 1479 bp, Klebsiella pneumoniae; identical to SEQ ID NO: 240167

SEQ ID NO: 240169 - DNA, 360 bp, Klebsiella pneumoniae
atggatttttaccgtgtgctgtgggctgtgctgatagtgggcgaccagggtctgcgcttcgagacgggcgcggtcgagggtcagcggccaggattcgccgacgcagcgcacgtagggcagggcctgtttgacgatcgcccggctgacgccctgacgatcgaacactttaaacaccagattgaggttgccatcgcccacttcctgcgcgctgaccagctcagatgggttgtcgatgccggcgaactgttgcgcgtaagccacggcatcgtgggcggtgaaggtatggtattgcgacattgcctcgatcctcgaattctgattaagccgttcagacgtctatacttctggattccatcctga

SEQ ID NO: 240170 - DNA, 1488 bp, Klebsiella pneumoniae
ttggccggcagcgggggtgagataggtatcgaaccgctcgccacgggccacctctacctgctccagcacgttgcccaggcgcaggctgccggcgcgtgccgtgaggtcggcattcacctcgacctcgggcgcgtacaggacaatctcgccgccatcgccgacctgcagggcgttgtccaccgagatccgctcttgggcggccacgcgcagcgcccccaactcgaaacccgacagccgttcgctgtcgagctggaggacaccccgctgttcgtcggccagcgcggtatccagatccaggttcaccgccagcggctcgccgccatcggccaagcgcacctgctgcagggtcggcgcaaggttgtacagcacgttgccgctggcactttcgtagcgcggggtatagctgcccacgatcagctcggcgccgcgcgccactgcgttctgcgcctgctggtagccatccgcgcccggctgcggcgcacgcacctggcgctcgccctggaataccttgccgagcaggtcgccctcgagcaccgccgaagcggtgccgaccaccaggcgaccagcatcgcggccgaccatgtagccgctctcgtaacggctctgcggggcgatcagcggattgtagaaataacgtgtctggtcccagcgctcgctgtgtgcctcgtaaccgcggtagatgccgtcgtagagcaggtcgcccggcgccgacccgagttcgtagagacgtccgtcgctgcccttgagccaggtctgccggatcaggccgccctgcacatcgagggtgccgccggacaggttgatctgcgaaccggcctgggtcaccacgtcgttgccggtgaaactgacgatgccgccctgggccatccactcgccggccgaatggttgcgcgtgccaaggtaaccgcccagttccagcaggccgccggcggtgtaccagcggtcgctggcatagccgttggtgccggccggaaccaggaccagttcgcgggcatcgacccagacatcattgctggccagtccgccgccgtcgcggttgaccggcgcgtcgcgctgctcgttgccctggacattgatctggatgttgttgctttccatcgccaccttcaccccgacggcaccggcgacgtccacctgcgcgccgtcacgcagcaggctccggcccgccgcactgaccgccacctggccgccgctggccagggtcagcgagccgccctggaaatccacgctaccgccgctgacgatctcgacccgcgactgctcgctgcgatcggcgacccggctgaggttgtcgaaacgaccgaccacgttgttggtcggcgtggtgccatccagcgcctgctgggcggcgtcgcgctggctgtcgagggcgccggcgccgctggcgtcgaccagcaccgcggtggtgctgccctcgcccaggaccacgctgcccctggcgtcgctggccgagttgagcaggtggatggtgccgcgcacgtcggttga

SEQ ID NO: 240171 - DNA, 1395 bp, Klebsiella pneumoniae
atggaggatgtcgatttcggcaagccgagctttaccacccgcagcgatacgctgaccgccaccgtaccggtcaccgatagctggggcgaagcggcgccggatctgcgcggtaaaaccttgtcgctggtgctggccgatagcggtcaggcgcaggaaagccaagtcgccgtcgccgccggcagcgccgcgccggggctggcgttaggctgggtgctgctgatggcgctggccggcgggctaattctcaacgtcatgccctgcgtgctgccggtgctggcgatgaagctcggctcgctggtgcaaaccgaaggtcgcgaacgcggcgcggtgcggcggcagttcctcgcctcggtatttgggatcgtcgtctcgttcctggcgctggcgctgatgatgaccgcgctacgcctggggaatcaggcgctcggctggggcatccagttccagaacccgtggtttatcggcgcgatggcgctggtgatggtgctgttcagcgccagtttattggggctgttcgaaatccgcctatcctccagcgccagcaccttcctcgccacccgcggcggcaacggcttaatgggccatttctggcagggcgccttcgccaccctgctggcgacgccctgcaccgcgccgttcctcggcaccgccgtgtcggtggcgctggtggcgcccctgccgctgctgtggggcattttcttcgccatggggatcggcatgagcctgccgtggctgctgatcgttgcctggccgggtctggcgcaacgactgccacgcccgggccgctggatgaatcatctgcgggtggtgctggggctaatgatgcttggttcagcgctatggctggtcagcctgctgacgatccacatcggccgtacgccggtgcttaccctgctggtgatgctggccatcgccctgctagtggccaccgcctggcgctaccgctggcggacggcgctgcgcgcgggcgccctggccatcgtggtggcgggcgccgtcgcctttgttgcccaacaggacggccagggcccgcgccgcgaccgggttaactggcagccgctcagcgagcaggctatcgccagcgccctggcggagcataaacgggtatttattgatgtcaccgccgactggtgcgtgacctgtaaagccaataaatacaacgtgctgctgcgcgacgacgtccagcaggcgctgttagcgccagatgtgatcgccttacgcggcgactggagccgcccctccgctgacattagtcagtttttaaccgcacgcggcagcgccgcggtgccgtttaaccagatttacggaccggaattgccgcagggacagattctgcctgcgctgttagaccgcaaacaccttctcgccaccctgtccgccgctaaaggaaaataa

SEQ ID NO: 240172 - DNA, 612 bp, Klebsiella pneumoniae
atgagagctatcaccgccttattactgctgtgcgtatcggccttcagcttcgccgccccggcggaagaaccacaatcgaacggtaatgaccagttagcccagctgctgtttaacgatccgaatagcccgcgcaccggcgcgaaagagccaaaactcacaatcgtctcgtttaccgattacaactgcccttactgcaaacagtttgatcccctgctggaaaaaatcgtgcacgataatccggacatccagctcatcgttaagctgctgccgtttaaagggcagagttcggtgaatgccgctaaaatcgcgctctccacctggcgtcagcagcccgataaattctgggcgctgcatcagcggctgatggcgaaaaaaggctatcacgatgacgccagtatcgccgccgcgcagaagaaaaccgctaccgatagcgtaaatatcgatgacaagaccatggattcgctgaagatgaacctgattttgtcgcaggtgctgaatatacagggcaccccggcaacgatcatcggcgatcagatggtggccggcgcgatccctgctgaagacctggaggggctggtgaaagaacagctggcgaaagcccgtggccagtaa

SEQ ID NO: 240173 - DNA, 792 bp, Klebsiella pneumoniae; identical to SEQ ID NO: 149245

SEQ ID NO: 240174 - DNA, 186 bp, Klebsiella pneumoniae
atgggcgatctccttctccatcaggcagccgaccagctcgcctttatcgacgacggggaccaggtcgaggccgcgctcgctgagctcggcaatcacctgctggcgctcatcgtcaggtttgacgcgaaacaggcagctgtccatcaggtggcggatagactggttgatatccgtttcctggagtag

SEQ ID NO: 240175 - DNA, 1530 bp, Klebsiella pneumoniae
gtgctcggcggcctgcgccggggcgcagtgatgatgggcgcttacgcgctgatttgcggggcgatggcgctggcgatgtggaagctgccgggcagcttcctgccggtggaggaccagggtgagatcatggtccagtacaccctgcccgccggggccaccgcggtgcgtaccgccgaggtgcgccgccaggtcaccgactggttcctcaccaaagagaaagccaataccgacgtcattttcaccgtcgacggcttcagctttagcggcagcgggcagaacgccgggatggccttcgtgtcgctgaaaaactggtcgcagcgcaaaggggacgacaacaccgcccaggccatcgccctgcgcgccaccaaagagctggggacgatccgcgacgccaccctcttcgccatgaccccgccgtcggtagacggtctcgggcagagcaacggcttcaccttcgagctgatggccagcggcggtaccgaccgcgacagcctgatgaagctgcgcagccagctgctggcggcggccaaccagagcagcgaactgcagtcggtgcgcgctaacgacctgccgcagatgccgcagctgcaggtggatatcgacaacaacaaagccgtctcgctggggctgtcgctgagcgacgtgaccgatacgctctccagcgcctggggcggtacctacgtgaatgactttatcgatcgcggccgggtgaaaaaggtctatatccagggcgaaagcgacgcgcgcgcggtgccgtcggaccttggcaaatggttcgttcgcggcagcgataacagcatgacgccgttctccgccttcgccaccacccactggcaatacggcccggaaagcctggtgcgctacaacggctccgccgcctttgagatccagggcgaaaacgccgccggcttcagctccggcgcggcgatggacaagatggaaaagctggccgacagcctgccggcgggctccacctgggcgtggagcggcatttcgctgcaggaaaagctggccagcggccaggcgatgagcctgtacgccatctcgattctggtggtgttcctgtgcctggcggcgctgtatgagagctggtcggtgccgttctcggtgatcatggtcatcccgctcggcctgcttggcgcggcgctggcggcgacgctgcgcggcttaagcaacgacgtctacttccaggtggcgctgctgaccaccatcggcctgtcgtcgaaaaacgccatcctgatcgtggagttcgctgaatccgccgtggatgaggggtattcgctctcccgggcggcgatccgcgccgcgcagactcgcctgcgcccgattgtcatgacctcgctggcgtttatcgccggggtgctgccgctggccatcgccaccggcgccggagccaacagccgcgtggcgatcggcaccgggattatcggcggcaccctgacggccaccctgctggcggtgttcttcgtaccgctgttcttcgtgctggtgaaacgtctcttcacccgccaacgtccttctcaggagtaa

SEQ ID NO: 240176 - DNA, 510 bp, Klebsiella pneumoniae
atgttgcgcgagtttgccgcgctgtccatggtctgctgcgccagcgccagattgctgttatccgtcgccagcgtcacccaggcggtggtcaaatcggcaatcatcgtcagccgggtattctgcgcggtgaattcgctggcaagccaggtttcgcgcgccgcgcgcgacaggctctggttcttgccgaacaagtccagttcgaagctggagaccgcgccgtcggcctgtgaagcggagctcaggccactggccaccgttttgctgcgggtgtggctcagttcggcatcaacggtgggaaacagcgatgcccgcgtttcgccatactgggcgcgcgcggcctcgatatcggccagcgccttttgcacatcgcggttgctgttcagcgcgatgctgaccacttttttcagccgcgcgtcattgaccactttctgccagtcgccgaccaccgccgtcgattcgccgtgcgccccgggcagggtggccggcaccggcgcggccgggcgatcataa

SEQ ID NO: 240177 - DNA, 993 bp, Klebsiella pneumoniae
atggaggattactggaatcagcgtcgcaggaataactcacttaacgtaggttacagcaatagctggagcggtattacatataattttaactattcccactcccgctcctcaactgactatgagggttacggtagaaactattctactgataatatcttttcgttcaatatcaatgtgccattgaatttctggatgcctaacacctgggctacttatggtttaaataccagcgatcctggttcgacaagcaacagtgttgggctttcaggtcttgcattggccgataataatttaagctggaaccttcagcaacaatacgataatcgcgattatagtagcggaaccgctggtgttgattataaaggcacctatggagagatttttggtagttataattatgatcataactggcagcgccttaattatggtataaacggtggaattgtcgctcatcgtgatggtatcaccgcagggcaatcattcagcgataccagtgctctcgttaaagcccctggtgttaatggtactcgagtagtgggtaacaccggcgtaaaaactgactatcgtggctacgctatcgtacctaatattacaatgtatcgtagaaatgatgtggtattagatactgaaacgatgcctaatgatgttgaccttgacactacggtagccactgttgtcccaacccgaggtgcgatcgtacgagcagaatattcagggaaaaaagggatacgcgcgctgctgcagctagtggatacacataataagtttataccttttggtgcaatggtaaatcttgcttccgaaaattcgacgaataataacagcgggatcgttagcgacaatggtcaagtttatctggctgggttaccgacaacgggagtactgcttgtcaaatggggaaatagtatatctaaacagtgtacggtaaattatcagttccctgggtctgaaaaggtcaatggtatcaaacagggccagtttatctgccgctaa

SEQ ID NO: 240178 - DNA, 1170 bp, Klebsiella pneumoniae
atgatgtccctgggcctccgccactctcgccagcagcagcaggcgatccggggagttatcctggcgcaaaccgccggccagctgttcagcgcgatcgttgttccccgccgacagcgccacgtcgatggccccggcgcgcgcatcctggttcggcgtatcgcgcgtcatcaggtagtcatagaccaccccggcctctttgttcattttgccgctctggtacagccgcgccatggcgaacatcagatcggtattttgcggatcgctttgcatagcgcggatcagcttgtcatacgccgcagcgtaattgccctgctcgcgcaggcggtcggcttcgttgatcacatagccattgcgaatgctcgccagctgcgtcggcgtactgctggcctgcagctgcggattgctgatcaggttctgcgcctcgccggtcagcccggcctgattcaggacggcgatctgatcggcgtaatccccggcattgccggatacgccgctgctgatattgttgcgcaccagcgagaccgcggtggtcaggtcgccgctctcggccagcagacgcgccagcttgccggcgtccgccggggcttttggcggcgtggaggccatcgcccgcagggtattgctggcggcaatggtattgccctgcgccaggtagttttcggccgtcaccaactgcaggttgtagttcacccgctggcgcaaatcgcgcatatcgctggtctggctgccgccgggaatgcgcgccagcagcgtctgcgcctgctgccaggcgccgttttcgctggcaaacagggcggcggcatacagcgcactgttgctggcgccggggcgataggccgccgacatcagcgaagaggcctcgctgccgttacccgatttttgcagcagccgggccaggtcgaggcgcagccagggatcgtccggatagcgggcgacgccttcgcgcagggtggcaatggcgccggctgggttaccgctgctgacctgcgcctgggcctgacggcgcagggcatcgcccggcataccggccaccacccgcggctgcagtttttgccgcaggctctgcgggagagtctgcagcatcgcctgcgcctcggcggatttattctgctcgcgcagcacgtaatagaggttttcccgcgccgccgcgttctgcggatcgtcatttaa

SEQ ID NO: 240179 - DNA, 711 bp, Klebsiella pneumoniae
atgcgacaccgcgacgaagccgaaggtcgcggtcaccatcgtcgccgcgccaaagccggaagcgcagtccatccgcttcggcccttccgccgtgctcttcattgcgcagacgctgccgtccgcctgcgggtagaccagcgcttccgtagagaagacgcagtctacaccgagcttacctttgctgtttttcaccaccccaaactggcttttcagccgctcgcgcagtttggccgccagcggatcctggatggtcttcgccaggtcagcgacctggatctgcgttgggtcaatctgaccacccgccccgccggtagtcaccagcggcaccttgtagcggcgacaccaggcgataagcgccgctttcggccggacgctatcgatcgcgtcgataacatagctaaagccgacgccaagatattccgccacgttttccggggtcacgaaatcatccaccaccgtcacccgacactccgggttgatgagacgaatacgctccgccatcacctccgctttcgccagcccgacgttgccgctgagggcgtggatctgacgattggtgttggtgacgcagacatcgtccatatcgataagggtgatcgccccgatgccggtccgcgccagcgcttccgccgcccaggagccgaccccgccgatcccgaccacgcagacgtgggcgtcggcaaaacattgcagcgctttttcaccatataa

SEQ ID NO: 240180 - DNA, 1098 bp, Klebsiella pneumoniae
atgaaaggacgttgggcaaaatatgtagcgacgggggcaatgctggccatgctcgccgcctgttcctcaaaaccgaccgaccgcggtcagcaatatagcgatggcaagttcacccagccgttttcactggtaaaccagccggatgccgtcggggcgccgatcaacgccggcgacttctccgagcaggttaatcaaattcgtaacgcctcgccacgcctctataatagccagagcaacgtctataacgcgctgcaggagtggctgcgcgccggcggcgacacccgtacgctgcgccagtttggcatcgacgcctggcagatgcagggcgtcgacaactatggcaacgtccagtttaccggctactacacgccggtggtgcaggcgcgccacacccgtcagggcgaattccagtaccccatttaccgtatgccgccaaagcgcggtaagctgccttcccgcgccagcatctatgccggcgcgctgagcgataactatgtgctggcgtacagcaactcgttgatggataacttcatcatggacgtgcagggcagcggctatatcgactttggcgatggttcgccgctcaacttctttagctatgccgggaaaaacggctggccctatcgcagcatcggcaaagtgctaatcgaccgcggggaagtgaagaaagaagatatgtcgatgcaggcgatccgcgagtggggtgaaaagcacagcgaagcggaagtgcgcgagctgctggagcagaacccgtcgttcgtgttctttaaaccgcagtctttcgcgccggtgaaaggggccagcgctgtgccgctgatcggccgcgcctcggtggcctccgaccggtcgattattccgccaggaaccaccttgctggccgaggtgcctctgctggataataacggcaagtttaacggccagtacgaactgcgcctgatggtcgccctcgacgtcggcggggccatcaaaggtcagcatttcgacatctatcagggcattgggcctgacgcgggccaccgtgccggctggtataaccactacggccgcgtatgggtgctgaaaaacgccccgggcgcggggaatgtttttagcggctaa

SEQ ID NO: 240181 - DNA, 264 bp, Klebsiella pneumoniae
gtggtcaatgccaccccgctggggatgaaggccagcgatccgctgccgctggacgttgaccgtctggcgccaggcgcctgggtgggggaagtcgtcatgactcaggagtacaccccgctgctgagggccgctcaggcacgacagtgccacatccagcgcgggaccgacatgctgtttgaaatgatccctgcctatctgcgcttttttgacctaccggtagccacccccgagcagctgcggaccctggcagaaattcgctactga

SEQ ID NO: 240182 - DNA, 807 bp, Klebsiella pneumoniae
gtggtcttgcggcactcgggcatacagcagcccgccctgaccgacggcgccaaccgcccgaccgttgtcgtcgaacacctccgcgcccagcgggggcgccgcgccatccggcagcgtgacatgggcaaaccagggatagccggtacgcgtgacaaatttgaccttcaccgccgcgcccgaatcgggcaccaccgtcgtgctgctggagacaatctccacatggtcgttcagaccctgcggatcgagatccagccagttagcggtaaagggatcgaggtaagggatgatcgtaaaaccctggcggttaatcggctgtccaaggcggttagccacccgggcccccaccgcgccgggcgcttccacaatggcgaaggtttcccccagttcgggggtggcggtcatgccgccttgatgcgctaccagggcgcccgatgcccccagcgagtactgctgctgatggcgaccggcgctggcgctggcgttcaggtacgcataatccgtccgcaggctaccgttggccgcaacgctggcttcatttgggttctcccgcggcatgtcgtagctggcggtcaaaccgtagctgaaggcgtttttctcgcctgcgctgccggtatagctggactgcagctggctgccgtagtttttatcgtggttaaagcgggtggtcaggctgcccgcctgcccgaacggcagcgaaaaggagacgcccaccacctgattattgcggtgatggatatcctggctctgctgggcatacagataataattgagctgaccatagcggttggcatagcccagctgatatga

SEQ ID NO: 240183 - DNA, 882 bp, Klebsiella pneumoniae
atgttcagtggactttgcgcatttcctttgacacctttgcatcagcaagattttgatgaaaaagcgtttattcgtattctcgcccgtcttaccgatgccggagtcgactctctgggcatcttaggttcaaccggtagctacgcttatctcagccgtgagcagcgcagacgagtggtgcaggtggcgaagacgcatgcggggtcgatcccgatgatggtcggcgtcggcgccattgcgactaacgaggtgctacgcctggtggaggatgctcaggaggcaggggcggatgcgttattactgccgatgatgtcctatcagccgctttccgcggaggagatctttgccttttacgaagaagtctgtcggcatgtctcggtgccggtttgcctgtatgacaatccccgcactacccacgtaatgctggcggatgaactgcaggggcgcatcgccgccttgccggccattgcctcgattaaaattcccggcctgcccgcgccacaggcgagcgaacgtgtagcggccctgcgtcagcatcttccctctcgcgttacgcttggcgtcagcggcgatgcgtgggccactgccgggttgcaggccggctgcgaagcctggtattcggtctgcggcggactctttccccgctgctcactggcgctggtaagagcgatacgtagcggcgatgtggcgcagactgcggcactgaatgagcagctggcccccctatggcgatgctttgatcgctatggtggtagcctgcgagtgatagccagcgccgcagcgatgctcggactctgcgatccagactcgcttccccgtcctttgctttcgttaggggaggaggcctgtcgtgaggtggcgtcggcgctgcgcggcctggcctga

SEQ ID NO: 240184 - DNA, 1062 bp, Klebsiella pneumoniae
atggaacatagacagccttccgcgacaactcatgactctaactgttttgatgtcattagacacgctgcggccttccttgttatgataagccatcactttgcccttaatggattaccggaaccaaaaatatttggttcgacaaaattagggacgcttgctgtaattatatttttctcaatttcagggtaccttataacaagcagttttataaattcaaaaactacgatttcttatattaaaaagcgagtcttaaggatattccccggtttgatcgcttgttcatttataatgacattattgatattccctttttttggtaaaaaccactcccccatagagtggattgcaagtgtaaactctattaaatcatttgttttctttagtctatttggttctccaggctctggtgatttagttaatggatttacaaacaactatgtattcccgaattcagcaaatggaagtttatggtctttaaaatttgaattttttgattacatagcaatttttattatcttctccatcattaaaaaaccaataattgcttctttagtatttattcttatttcatttaccgcattgactataaacagtaaatttcacctttcagattattacctataccgcacggcggcatactctatcccgttcgctatgggagctttacttttttcaacaaaacatctttgggtcaacaggaaagcagcaaaagcagctatgactgttttatctttttccgttctttttataacaggagataaatctgagcttagccttatagtattgacaatggttccagtattagtaatatgcatggggctttcatttcgtgataccttgatcaagggaaagttcgatatatcatatggcgtttatatttatgctttcccagttcagcaaattataagcaactacatgcccaatgagtttgcaatgtctcttctgtcatcctttgtaaccaccacagttctggctctaatctcatggtttgtagttgaaagaagattcttagccagaaaaaacaaaaaaataaatatacctccaggtgtaataccgtcatag

SEQ ID NO: 240185 - DNA, 321 bp, Klebsiella pneumoniae; identical to SEQ ID NO: 136524

SEQ ID NO: 240186 - DNA, 276 bp, Klebsiella pneumoniae
atggccgtaaccctccgccgcgtggggcaccacctgcgccagccgctggcgatcgtggggaaaaccgccgcaggccagcaccacggcgccagcttcgacgtgaatctccccgccgtcgctgcgcagcaccgcgccggacacgcccggcggaccctgcagcagccggaccaccggggcattgagctgaaaacgcacgccggcgtcgagggcggatcgcagcagacgggcgaccagcgcattgccattgaccagatgctgcccccgtccggcgcgtag

SEQ ID NO: 240187 - DNA, 303 bp, Klebsiella pneumoniae
atgatcgccatcatccgccgcattgtcgggcaggggcggcgcgtggtgatctccagccacgatatcgatctgatctatgaggtgagcgacgccgtttacgtgctgcgtcacggcgaagtactggccgcgggggatcccggcgaggtatttgcctgcgcggagacgatggacagggcgggattgacgcagccgtggctggtgaaacttcatagcgaactggggctgccgctgtgtaaaaccgaggcggagttttttcagcggatgcacaacaacgcgataggcgcgataaaggaggcgtcatga

SEQ ID NO: 240188 - DNA, 834 bp, Klebsiella pneumoniae
gtgcgccatgccgctctcgcgcagccagcacagatcgccgagggtatttttactgcccggaagaatgaccaggtcggcgtcggccagcgcctgcggatcgcggacatagcgcacccggacgtctggctgtgccgccagggcgttaaagtcggtaaaattggcaatatgcggcaggtgaaccacggcgatgtcgatatcgcgccggtcggtgcgatggtatttcccggcctgcagcgcgacgccgtcctcatcctcgagatccacgtcaagccatggcataacgcccagcaccggcaccccggtcaacgcctcgatttgctctatcccggagcgcaggagcgccacatcgccgcggaatttattgatgatcacccctttcacccgcgcccgctcctgaggctgcagcagcgccagcgtgccgtaaatcgcggcaaacaccccgccgcggtcgatatcggccaccaggatcaccgggcattgcgccatctcggccatgcccatattgacgatatcgcggtcgcgcaggttaatctccgccggactgccggcgccttccagcaccagcgcctcatactctccggccaggctctggtagaccgcgaggatctgctcgcgcaggcgcggcttgtactggtgatagctcatcgcatccatgctggtcgccacctgccccatcagcaccacctgcgcctgacggtcgctggtgggcttgagcaaaatcggattcatgcggacatctggcgcaatcccggccgcttcggcctggaaaatctgcgcccggcccatctctttgccatccggcgtaatgccggagttcagcgccatattctgtga

SEQ ID NO: 240189 - DNA, 696 bp, Klebsiella pneumoniae
gtgacgctggagctgggtggcaagaatccggcgattgtgctcaaagacgccgacccccagtgggttattgaggggctgatgaccggaagcttcctcaatcaggggcaggtctgcgccgccagctcgcggatctacatcgaagcgccgctgtttgacaccctggtcagcggcttcgagcaggcggtgaaatcgctgcaggtggggccgggtatgcaggagacggcgcagatcaacccggtggtctcccgggcccactgcgacaaggtggcggcctacctcgaagaggctcgccagcagaaggcagagctcatcagcggcagcgccggaccagatgcgggagggtactatattccgccaacgctggtggtaaaccccgacgccggactgcgtctcagccgtgaggaggtttttggcccggtggtgaacctggtgcgagtggccgatggcgaggaggcgctgcgcctggccaacgacagcgattttggtctgaccgccagcgtctggacccgcgatctgacccaggccctgaactacaccgaccgtctgcaggcgggaacggtatgggtcaacagccataccctgattgacgccaacctgcctttcggcggcatgaagcagtctggtaccggccgcgatttcggccctgactggctcgacggctggtgcgaaaccaaatccgtctgcgtgcgctactaa

SEQ ID NO: 240190 - DNA, 261 bp, Klebsiella pneumoniae
atggcctccgtctgggtggttttcaccgcgacaaagaccaggtcgaagggggcggctatcgccatcgggtcggtgtacaccgggccgggcaccacgatctcaccctcgtcagtgcgcagcaccagcgccgaatgggcggtacgcccgcagaccatcggtgccctccccctctcaaacagggcggcggcaatcgtggtgccgatggcgccgggaccaattagcgcaaccttaggaaatgctgtcatgccgaagacctcctga

SEQ ID NO: 240191 - DNA, 909 bp, Klebsiella pneumoniae
gtgctggggcccggcaatccgcccaccctcgccgtgctggcgtggcaatggttaagccagggcgatgagctgcagcaggccaaaggggcgctggccagcctgctgctgatggcgatcctcggcgggctggcgctggtcgcctggggcggatggcggctacagcgccagtaccagcccgatctgcacggtgttcgtcacccgcatcctcatgccctgcccggccgcctgctggcggcgctgctgccgctgagcggtctgctgggcgcgctattgctggcggggctggcgcgctcggcgccgccgcagatggatgccctcggcaacagccttgggctggcgctggcggcctgcgccctcggcgcggctgtctgcctgctgtggctggcctgcggcccggcgcgaggcgatggctgggtctggctaccgctggtcctgccggccctgccgctggccgacggccagtaccggttggcgctgtacgcctggcttgacggtgactggcggaccgtcctgtggggccatctgctgtgggtggtgccatggatgctgtttattttgcgcccggcctggcgccagcgcgatccgcgtctgacggttgtcgcccgcacgctcggctggggatccacgcgtattttctggttgctgaccctgccttcgctaactcgcccactgctgaccgccctggcggtgggcttctcagtgagcatcgcgcagtatctgccaacgctatggctgggggctggccgaattccgacgctcaccagccaggcggtggcgctcagcagcggcggcgaggcgcagacgctcgccgctcaggcgctgtggcaattactgctgccggcggtatgctttaccctgaccgctctgctggcctggctggcaggccgctatcgacgaggacttcgctag

SEQ ID NO: 240192 - DNA, 486 bp, Klebsiella pneumoniae
atgcgcctggtcgatgtcctgctggccatcccctccctgctgctgcagctcacggtgattattctgctgggtttcggcacggtaaatgcggcggtggcggttggcgtcgcggctatcgccagcttcgcgcgcctggcgcgagcagaagtggtgcgcgtgcgccacagcgattacgtcgaggcggcccggggcagcggcggcacttttttcgccgtcttctggcgccatattctgcccaactcgctcactgcggtgcttgctttcgcgacgctgcagttcggtcaggcgatgttggccctggccaccctcagcttcctcggctacggcactccgccgccggtcccggagtggggactactgatcgccgaaggtcgcaattacctgtcaaccgcctggtggctgaccaccttccccggcctcgccgtggtcgccgtggtccttgccgccaatcgtcttagccgccagtggagtggagtacgcccatga

SEQ ID NO: 240193 - DNA, 636 bp, Klebsiella pneumoniae
atgctgcgcgaacgctacaaatactattgcgaaagggtggtgaaggggttctacaaagagcacttcctgcgcttcgaccggcagattgtgctggtggactgtctgcagccgctcaacagcgggccgcaggcgtttaacgatatgcgtctggcattgacccagctgatgcaaagtttccattacgggcagcgcaccttgtttcgccggttgttctcgcccgtcatcgacaagctgctgtttgccgctaccaaagccgatcacgtcacgatcgatcagcacagcaatatggtgtcgctcctgcagcaactgattcaggacgcgtggcagaacgccgcctttgaagggatcagtatggattgcctggggctggcgtccattcaggcgacccagagcgggctgattgaggtgaatggcgagaaaattcccgccctgcgcggcaatcgcctgagcgacggccagccgttgaccatctatcccggtgaggtgccggcgcgcctgccgggccaggccttctggcagcagcagggatttcagtttgaaaactttcgtccgcaggtcatggatgtcgatcggcctttgccgcacattcgtctcgacgcggcgctggaatttttgattggagataaactgcgatga

SEQ ID NO: 240194 - DNA, 597 bp, Klebsiella pneumoniae
gtgctctatccggaatacgtcggcaccttcgctcgcgccgggacccgcttctcggtgatcactccgcaaatctccgccgcgggcgtggaacatctcgacaccctgttccaggcctacatcaacgttgagcccggccgcggcccggcacgacgcgattttgagatccaggatacgacgatcagcgattcgcgttatatcgacggcctgaacatcgtggtggaagcgccggaggcggggtcgcttggcatcggtacgccggtcctgttccgcggactggaagtcgggacggttaccggactgtcgctggggtcgatgtctgaccgggtgatggttaagctgcgcatcagtaagcgctaccagtacctggtacgtaataactcggtgttctggctggcctcgggttacagcctcgacttcggcctgattggcggggtggtgaaaaccggtaccttcaatcagtttatccgcggcgggatcgcctttgccacgccgccgggcacgccgctggcgccgaaggcccaggatggcaagcacttcctgctgcaggagagcgagccgaaagagtggcgggagtggggcaccgctctgccgcagtaa

SEQ ID NO: 240195 - DNA, 252 bp, Klebsiella pneumoniae; identical to SEQ ID NO: 31793

SEQ ID NO: 240196 - DNA, 267 bp, Klebsiella pneumoniae
gtgaccttcgaagtactggtccggcgttttgtgctggacgcggtgatccccgacagtctgggacggttgatccacttcctggacgtcggtggggtaccgaccccggaggcggcgggggtaaaaagcattcttgcagggctgcgggaaaccattacggacgatgaccaactgctggcggcagcttgctcgctgttcgacggcttactgaggtcctgtgaaatgaggtctggcaatcatgagcaaaacggtcgttcttccgcagagtga

SEQ ID NO: 240197 - DNA, 486 bp, Klebsiella pneumoniae
gtggctcaggtcgtcgctgatgttcagctgctggctttcccagctgaaatgcgacgtgggcagcaccgtcacccgcgacgtatcatgaatgtcacgctggcactgcagggtatcgccatcgttgatcttcacgctcaggttattgctggagaccatcagcgcgggcggaatatccagctgataatgggagacatcctcgccatcggcgcccagcggcagcgtgccgagcggttgaccgttgagcatcagctgcagggtggcgttgcggctcgccatctccggcgatacgcgaacggcaaggctgagctgcgaatggatcaccacctgatcggcaggcagggtaaagctgaccccaccctgtcgctggccgccgctgaggataatcccgtccggcatccccatctgcgccagattcagatcgcctccccagaccggagcgacaggaatgacctccggcgcggccgtgccgctcaccggcgggggtaa

SEQ ID NO: 240198 - DNA, 156 bp, Klebsiella pneumoniae
atgcagcgccgcatcgatatcggccacgtcggcgacgatcagtgcgttgttgccgcccatctcgagggccagcatcttctccggctggccgccgaagtagcgatggaagtggaaaccggccgccgcgctgccggtgaacggtcatttcagcggtag

SEQ ID NO: 240199 - DNA, 1785 bp, Klebsiella pneumoniae; identical to SEQ ID NO: 159345

SEQ ID NO: 240200 - DNA, 516 bp, Klebsiella pneumoniae; identical to SEQ ID NO: 95399

SEQ ID NO: 240201 - DNA, 1002 bp, Klebsiella pneumoniae
atgtcgactgtagtcgctggtagtgtcaacgctggcgtgttaacggggtcggtggaggggaatcattctcaacgctggcgggtaaacggatccgctaccggtgctcatcctcaacgctggcgggcaaacagggccgctgccggtgctcatcctcaacgctggcgggtaaacgtgaccgctgacggtagctatcctcaacgctggcgggtatgcgtggccgctgacggtggctatcctcaacgctggcgggtaaacgtggccgctgccggtgctcatcctcaacgctggcgggcaaacgggggcgctgacggtgcttatcctcaacgttggcgggtaagcggggctgctgacggtgctcatcctcaacgctggcgggtaagcggggccgctgcaggtgctcatcctcaacgctggcgggcaaacggggccgctgacggtggctatcctcaacgctggcgggtaagaggggccgctgccggtgctcatcctcaacgctggcgggtaaacgtggccgctgaaggtggctatcctcaacgctggcgggtaaacgtggccgctgacggtggctatcctcaacgctggcgggtaagcgtggccgctgacggtagctatcctcaacgctggcgggtaagcgtggccgctgacggtggctatcctcaacgctggcgggtaaacgtggccgctgccggtgctcatcctcaacgctggcgggcaaacggggccgctgacggtggctatcctcaacgctggcgggtaagaggggccgctgccggtgctcatcctcaacgctggcgggtaaacggggccgctgacggtggctatcctcaacgctggcgggtaaacgtggccgctgacggtggctatcctcaacgctggcgggtaaacgggaccgctgccggtagtcatcctcaacgctggcgggtaagcgtggccgctgtcggtggtcaccgtcaacgctggcgggtaaacaggggcgataccagtgaccatcctcaacgctga

SEQ ID NO: 240202 - DNA, 264 bp, Klebsiella pneumoniae
atgactctgacggcactgatgactctgacggctctgatgactctgacggctctgatgactctgatgactctgatgactctgatgactctgatgactctgacggctctgacggctctgacggctctgatgactctgacggctctgatgactctgacggctctgatgactctgacggctctgatggctctgatgactctgacggctctgacggctctgatgactctgacggctctgacggttctgatggctctgatggttctgtaa

SEQ ID NO: 240203 - DNA, 1596 bp, Klebsiella pneumoniae
  misc_feature (1518)..(1527): n is a, c, g, or t
atggtcgcgtctgtcggttctgggacatcctgcgccattgctgcaggagcctcaaaatgttctataacgaccggaagcgtaggcatcagtgatgggagttccgatttcggaagcagggatgtaggcgtaaccttaaactcgttcaataattacttctccccaccagtaacctctaaggtgagattaagctgggattaccgcgctccagcgatagacaataccttctggaacgtctctaaagaagctcggtcattcaagatcggagataaagatatctacgttgctccgcagacgatcgctgtagctgtctcggttcctgcccggtcagataccaatgactggtggaaacctgctgcaatgtcgctcacacttgctcctgatggtagcttctctccaatgacaaaagttactttagatgatggtacggagcttaattttaacaaaatttggtcaactccgtcccgtcgaactcttcaacctgtcgccggatatcaggaagttgcgggtaaatttgtttatttttttgatataagcgatctggccagcgcttcttacgttgcaacatattctgtgtctaatacagcgggcaatgattccagttataccgaaccggaatctaaacttatactgtctgatgaaccatctgtttccgttttcaaggacggctcagagcttgttaagcgggaccaggtgtacttcctgaatgagatcgttattgctgcattccagggcgaagagggtgttgccgacatcaagagcgttgtcattgataacgtcatggcttcatacactcccacaaacgtcaaagggatctaccggttaaagccgatgccgtcactcgaaacaaacaaagtccatactttgacggttgttgctgagaatgttaacggtatatccaaaacctattcaatcgattttacctatatgccgatgactttcactctgaagtccatcgaatcagcgtctacgatttacggttacgtccgtccttacacttcgctggttactcagcaatcagggaatacctgtaagattttctctactgaagaagacgctcaggcgtttcttagccagttcggaactgcggtttatggaacggcctgttatgttcagtggaacaacgttccatctggtctcgaattttactcgaagtctaaagttcctggcctgacgggttacttctctaaagttggcgataacgtccttgactacaacgtctatgtgattaatacaaaaggctctaaagccattgccactcataaccgtaaaaccgttaaagccgttgaaccgtttgcacctgaaatttcatacaagatgagtaaaacggtagagactcttggtaaggatacagcactggtttatatcactggtggggacgcagctaaggtgcttgcaaaatcagtaccggctaacgttgtccttacaactaaggttgaaggccaggacgctgaaactaaaacctacaagaataaatcaggtggtgatacgccggtaacttattctgagcgtataaaagtnnnnnnnnnnaccaccacatcccactgccccattgtggacgcaaacgaatgtaaacatcgaagcttcctacgaaaatga

SEQ ID NO: 240204 - DNA, 549 bp, Klebsiella pneumoniae
ttggcacctgtgaccattcccacttcaacatttgctatagtatcaaaagagtgtacgtttggatgtttaataatctcattaagaaggttaacttcatttttatctaggacggcttttgtccacttaccttttacggtatcaccattgattgtatttgtttcgttgaatatatcttcgggatttttttgtaaaaaatcgaagccactgacccctttaattccgacaccttgtgatgcacaatccagattaattttcttttcaactaatagaatgaccgcgccttgtaaggtttcactgaaccatatttcttttggatcaataattacaattttagagcaatgctcacccaagaatgtcctcaaggattgtgcatgcattacatttataatttctgatggaattaccatgccaagacgtcctccgggattgaggagcgaaacgccagacaaaataaaaggcacccatgcatttgtatgtttagtaaactttaagtcaagcaatttgaaaattgcttcagtattttcttggaaatccttttctaagaattga

SEQ ID NO: 240205 - DNA, 384 bp, Klebsiella pneumoniae
atgaaaaagaaactgatcggtgggttattttcggtgctgtacacggcgctgatgatttttagtctctttgttccaaacagtattgttccggcactggttacagccttgacctgggtagcctgcctgctgagctggggagcggtgctgctttgcatggctgggtggtatgcgggcggcactcatcggggagaggcaaagcaggcgctgacgcgctttttcagtacgccaggaaaccaggtgatcagatgggccaggtgttcactgcttgtgatttttctcacctttacgggccacgttgtcaccctggtattttatctgctgacgctggtcgcgcttaaggttctgcgtgcgcagattattgatgcggagccggtgacggtatga

SEQ ID NO: 240206 - DNA, 165 bp, Klebsiella pneumoniae; identical to SEQ ID NO: 237229

SEQ ID NO: 240207 - DNA, 249 bp, Klebsiella pneumoniae
atgtctctgttattatatcgttcaaataaggtagttgaagcaatggaaattgtaagtgtagttataaaccctgattattctgctgttcttagtaattcagaagggtttaacatcaccgtatcttcagatttcgttgtcagagagaagccacggatcggtggttattatatgaaaaatcatgatggctttgaagcctacattgataaagacgtatttgaaacagacttctcggaagatcaagaagtttga

SEQ ID NO: 240208 - DNA, 519 bp, Klebsiella pneumoniae
gtgttaagcgatgaaatgcaatatgctatagcaatatctcagatcgttagttctgcagctgtttcccttggtgtaataattgccgcaatcacaatagtttataatgtaaaaacagcaagaaaagtccacacatctgtatttcttggcgaaagtagatttgatgtggattacaaaaaaggcctatctacaatgcgaagaatacatgaatcaaataaagcatttaggtcttatatgtatccaagcaatggacaagccgatctcactgatgaagaaaaattggagaagcgggagatcatttattgccttgggttttatgaaagaatggcggtaagcgttaagcgcaagacatatgacgagactatggttaaagaggttttctatagttctgtcgttaataattacgagatctcccttccacttattaaagctataagggaaaaggaaaataacatcacgtattttaaagaatatgaatggatggcgaaaagatggaaaaagtgtccactaaagaataaataa

SEQ ID NO: 240209 - DNA, 141 bp, Klebsiella pneumoniae
atggtcattttaattatggttgtgttactgcttgtggcgcttgtggttatgaaccgtaagggagttattgaagatggaacatttgcggtagtggtagtatttatattatttggcgtcgctggatatattggaatatcatag

SEQ ID NO: 240210 - DNA, 1803 bp, Klebsiella pneumoniae
atgagttacttcggacttaacccggtaaaccagaatcaacagctggatgatgcagcttcaaatcctgctggattcaacagtgatgtgggtttcttcgataatgcagccggcgctggcctgtctggtctctattctggcctggtggctaaaccagatcagttactctgggcaggaatggacaagctggtttcacctatcgccaaattcgtaaacgaaaacacctcagtaaacgatacgtctgcggaatacattgccgagcaaagaaaactggcacagcagcaagttaagcgcctgacaccagacgcggccactacaggaacagctgggcagatcctgcatggactgttcgatatgggtgggcaggctgtagttggttcactacttgctggccctgccggcggtgcggcggcagtgacatccctgcaggggttttcagagtatgagcgccttactgcgcagggcgtagatttcaggacggcgcaggaagcaggactggtgcagggcatcactgctggtgcaggaaccctaatcccaatgagccttggcttgcgtgctggtggcgcattagcggaaggggttggcgcacagctggcgagaactggtgaaagtgcagtgcgcagtgcggcggctaccgcagcgcgagcaactcctgacattgcctatgcagctggaactaacatcgcctttggcatggctcagcgcgggttgactgcgcagacgctgcgtgatggtggctataccgagatggctaatcagtacgatgtatttgatcgccaggccatagctattgacgcagtgctcggtgtcgctttcggcggtataggccgctttattaatgccagaggtgaatcggtaaatacaccagagttcgcgccagaagatgtggacgcggccctttctgccaacgccgcacatcatgctgagatcgatgtagctccaggcgtaccggtcaacgttctttcacgtgatgctcacattcaggctttacagaaagccatgagagatgtcagtgagggccgtgcagtggatgttgccagtattgccgagcccgcctcattcagtgatataccagggcgccgcagtttgattgcgcagtccatcgatgaggttctttttcaggcggatgaaggttctgcggcgcgtgcaattgagacaaggattcttgaagagcaggccgcgcaggttttaccgcgcggggatcgtcaggtttaccagtctaagagcgccaacagtcagcgcattattgataacctgacagaacagcgtaaccaaatcctttctgaagagcctaagggaagcggaaagcaactggcgcagtcacgcgctgataagcaatccagattgcgcgaccttgatcagcgaatcaccgaggcacaaggacgcctcgaattctcccgtgaagcgctggcaccgcatgagcctggcggggcgatatttgaggcgagggcagaacttgctcgccgccagcaggccgaggcggatctgaatgcgcaggctctttcattctataaaactgcagaagtgcgcagtgctgacgaggctgccccgtttgatactgctgcatctttacgccaggcagagcagaaaccaacggcggagcaggccggtgatatggatcttcgcattgccgaggactcgttaaacgaatcgccggatatggtgatcaccgttcttgatgaagatggtaacccgcagtcgcgtagcgctcgcgaggtgcttgatgaagccagcagagaaaacgaacaggcaattcaggattccaggctgtttgatgtcgccgtagcatgtttcttgagaggatag

SEQ ID NO: 240211 - DNA, 336 bp, Klebsiella pneumoniae
atgaaaactgtaaacatgaaaacaggcaccgactcattcgttggtgaagacggaaaaccagaaaccaaagatcagtatccgtggggtctgcgcatcacgctggataacgaatctctgcaacgtctcggcctgaatgcaaaatcactgccagcggtaggtgatagcgtttcagttatggcaatggctaacgtatgttctgtttctacccgcaccacagatcacggtgaagacaactatgttgagctgcagatcaccgatattggcatggctccacagaaacgtgatgatgccaaagagctgaaagatgctttctacccaggcggggaggatgattaa

SEQ ID NO: 240212 - DNA, 285 bp, Klebsiella pneumoniae
atgtctaaatatcgcgtcaaagagcgctccttcattaacggcaagctctgcgagcctggcgatattgtggagttttccggggaggctggcaaaaacctgatccctcataacgacggtgatgtcgtggtgaaggaagatgctctgccaaccaatgaagagcttcaggaactggaccaacttcgtaccatttacgaagagatgttcggcgaagctccgcataaaaacaccagcgcaaaaactctcaaagagaagattgacgcccggcgtaaagaactgggcgtgtaa

SEQ ID NO: 240213 - DNA, 690 bp, Klebsiella pneumoniae
atgaatttatttgaacgtttgctgcatcgccgtctttgcaatgagcaacctgctgatggtggcactgcaccggcaccgtctgaaccacccgcacctgctgctgacccggcaaaaccagaaggcgataagccacagcatggtgctgaaggtgacaagcctcaggacgataagcccgctgatggtgataagccagcagacaagcctgatgacaaagagcagaagccagaaggcgcgccggagaaatacgaattcaagctagctgaaggccaggagcttgatactgcagcgctggagcaattcgagcctatcgcgcgtgagttgaacctgactaatgaacaggctcagaagatggtcgacctgtacggcacgaagatcatgccaatggtgcagaagcagcaggcagaagcctggcagaaaaccactgagcagtgggccgcagatgttaaggctgacaaggagatcggcggtgacaaactgaccgcaaacctcagcgctgcgcagcgtgcactggaacaattcggcgatccagaactgaaagaatacctggattcaaccggtctgggtaatcacccggcgcttgttaaagcgtttatcaaagtcggcaaggcaatgtcagaagacaaggttgtcaccggcggtcatgaaagcggcggcagtgaccttatctccgccttctatcccaaaaagtga

SEQ ID NO: 240214 - DNA, 297 bp, Klebsiella pneumoniae
atgacggacttcgacgaagaagaactgcgcattcagaacgagcggaagaagcacgacctggagcagcgcgagaaggatgacatcaagttcgtcatggatagcgagcagggccgccgcgtcgtgtgggggctactggagaaaggtcaggttttcggtacctgcttcaacgtagacccgcacatcacagcattcaacgaagggcagcgcaacctggctctggttctgtttcagcgcgtcatgacgcactgccccgatcagtatctgaagatggccgcagaggccagtgaacaggagtaa

SEQ ID NO: 240215 - DNA, 1671 bp, Klebsiella pneumoniae
atggcggaaaccgaaaaagagcggctgctgaagcagctcgcacagctgaaaaatgagcgcacttcgtttgagccgcactggcgcgacctgagcgactttatcaatccgcgcggttcccgcttcctgacgtctgacgttaaccgtgacgatcgccgcaacacgaagattgttgaccctaccggctcactcgcccagcgcattctggccagcggtatgatgtcaggaatcaccagcccagcccgcccgtggttcaaactggcaacacctgatcctgacatgatggattacggcccggtaaaagtctggctggaagtagttcagcgtcgcatgaacgaagtgttcaataagtcgaatctgtatcagtctcttcctgtcatgtacgccagtctgggtactttcggtaccgccgccatggctgtactggaagatgaccaggatgtgatccgcacaatgcctttcccgattggcagctactacctggcgaacagcccacgtggtagcgtcgacacctcattccgtcagttctctatgaccgtgcgccagttggtgcaggaattcggtctggacaacgtgagcacgtgcgttaagggcatgtgggataacggcacgtatgaagcgtgggtggaggttaaccactgcatcacgccaaacatcaaccgcgacagcggcaagatggacagcaagaacaaaccgttccgatctgtctatttcgagacaggcggcgactccgacaagctgctgcgagaatcagggtttgatgaattcccgatccttgcgccgcgctgggaggttaacggtgaggatgtttatgcatcctcctgccctggaatgctggcacttggccaggttaaagctctgcaactggagcagaagcgcaaaagccagctgatcgacaaggccaccaacccgccgatggtcgctccaacctcgctgaaaaatcagcgtgtttctctgttgcctggcgacgtgacgtacatcgacgtgctgagcggccaggacggtttcaagcctgcttatctggtaaacccgaataccgccgacctgctggctgacattcaggacaccaggcagaccatcaacagcgcctactttgtcgacctcttcatgatgctgcaaaacatcaacacccgctctatgccggtggaagcggtgatcgagatgaaggaagagaagctgctgatgcttgggccggtgctggagcgtctgaacgacgaggctctcaacccgcttatcgatcgcgtgttctccatcatggcgcgcaagaacatgcttccgcctcctcctgacgttatgcagggcatgccgctgcgcatcgagtacatctccgtgatggcgcaggcgcagaaatctatcggccttaccagcctgtcgcagaccgttggcttcattggccaactcgcacaggccaagccggaagcgctggacaaactcaacgtggatcaggccatcgatgcatttgcggagatgtccggcgtctcgccgacagtcatcgttccacaggaacaggttgagcaggttcgcgagcagcgcgctcagcagcagcaacagcagcaaatggtggctatgggcatggctgccgctcagggtgccaagaccctcagcgaagcgcagacggcggatcccagcgtactgacagcgctttctaacacagcaggagcgtcgcagcaatga

SEQ ID NO: 240216 - DNA, 171 bp, Klebsiella pneumoniae
atgcaatggtatttttccatcggtcttgctttgtggattttggcgcaaataacaagagccgatgaaacaactggcattaagaataacattctgtgcttgctgatcttcattgtggcgtggccaaagatcgttgcgacccttgcttacaaacttattgtgagggaggagtaa

SEQ ID NO: 240217 - DNA, 453 bp, Klebsiella pneumoniae
atggacaaaatcggagcaatatcccatgttctcagtcgtatagactcagagtttaatcgtatagcagatgattttacctccgttcttaatagcattgctgattatattgattcagtaaaatatctttcccgagctataaacatagaatttacagagcgacgtaatgagatattttttaaggattttgacatttgcgttaaattatctacgaaattaaaacttgttggaattgatacaaacccatcatattgtttggaaattgatttcttcattgagcaatcccgcgttgtacgtgaatccgtctttaaatgctacgctacatctgacggttatctggttgaggatttcacgaaagaaaatcctatttgccaaaccagcaacgaatataaaggaaagcgcatattcgaattgcttttattaaatcttgttgataaaaaaataattagcatttaa

SEQ ID NO: 240218 - DNA, 339 bp, Klebsiella pneumoniae
atgcaagttcaagagactcactgtattgaaagcggtctggtttttaacgttggtgccgtatcttaccggcgcagaataatggttccgttactgctcgcccttgccccaggaggtaagtcaaaggccaaacatgagcttttcttcaatggaaactcagttgctaaagcatacgcagaaggaacagttataccgaatggagtgagcttaggctggtcagaaactaaagggtgggaggggtacatcgaagctaaccaaacagcaaccattgaggcgcgaatgagctcctcagagggtggctccactccatcaagcacgacaatttatattggtgcggcgtaa

SEQ ID NO: 240219 - DNA, 294 bp, Klebsiella pneumoniae
atggatactaaagaattactggaacacattgacgccggggactattacgaggccagttgcttgctcgatgaaaaatgcccaggcgcagcgcgcaaatttaagcgcctgacaaaagggttagccgagttactgaaggacgttcagaaagagttccctgacgcgaatttttacaccgcctccggtggttttaatttgttgctgggtagcgcaactcactgcgatagcactgagggtaatcagttaattgctatttctgccagtggatatcttagtgttggcgacggagatttttaa

SEQ ID NO: 240220 - DNA, 2961 bp, Klebsiella pneumoniae
atggcgatataccggttacctgagcagttggatcaactctctgacgaacaatcttccgaacgacatagcgttgcaacatcggaactggatgcactcaatgaagtgatcagtttcgcggaagagcgtcggcgttccgcgagtgcttttcagcgaagaggctatgaagagctttatcgccatggcttcgggaaaacagtcgtcattgacactgaaaattcgggccgtcaggtgctgcgtacctccctggcgacctgtgattacgccagcactaagttaggatacgcgacccctgactcaccgattggccggttatgccgccaggcccaaattgggttgagatctgaaagcaatcaatgggggcggtacactattgtcgaaatccgcaatttcgctcgttttagtggtattgaagcggcacagaacatcaagaattttcaggtcatggaatcaacgtcaattgcggataaaggtaagcaaggtcttcagactgtaattaataatctgaaactctctttacagcgctggtatcgacctaaacatcagcaagccgttgtgacagatgtggcattgtcaccgctcctcgaaaacattccagctgacggtatcgagcaggagtcggaaaactggttggattttgcgactggacaagattatgagttgttccaggatgatgccgaggagcatttaaatcactacgatatttatggtcgcagcgatgatgaccgtgacgattatattgggctgagcagctatttctttctgaacccgacagaagaacaactcagcgttatggctggcgcgaccactacgggccccatgcttgttgaaggtgttgccgggtcagggaaaacctgtgtggcactggggcgtgcgaagacactatgcgacttagcccgtacccccgatgaagaacagtttaatgctgactttttagatgaaagcagtgtgggatttgtacgaacgggagagctggtaaactatctgaaggcttcctgccagtcgctgagcatcgataaactaccaatagaagagtaccgttcattggtttatcggcttaacaatgttcgccagcttgagcagcgctccacgtcgaccagcgcggaagggcagaaagtgactcgcgctaggtatacgaatgtctcagaaaatctttcctatgatttctctgctgaaacaaccatgaactggcttcatgcgtccgcgcaagcaatcggcgctctccttcagcttgaactgcaaaaacaactggcctcactcagcatccccgctgagctactcaaagcacatttcctggcggaaactaaagccggaaatgccttactggaactcgtgaaacggagccttgcatcagattatgcttctcttttcaatcagctctccgggcattctggcgacgcttttgcactggataaccttctgagccggttggtcaatgcacatgagcggatcgaacgtgatttgtttgataagaatacgctctgggtgcatccgtctgaggaagaatggctgattgtaaaagaggctaaagcggcagtaacaaccctgcgtgaaatgagcgtggtgttagtcgttgtcgaacgggtccgtgatgagaatgaccgaattcgccggaaagcgacggagatattgattgaaacatacaccgatttgctcaacatttttgcgcaaaatggcagcgtgcgaagcgaagatggtctgagcgtttatgttgctgaagatgctgagattatttgggaatgtcgcaccgatcttaaactggtgtgtgatattccaccggtggtgaatagcatcaaaattacgtgggcgaaagattttgacgcggtcaacatccatctcatcaaccaaaagctgtttggtattaaccagaaacgcattttttcgttgtctgagtccaacccttttgtacgcaaaattgaagtgggtgatgagaaaacgcaaacctccctcgcagcacggcttcgttctcagatgcaacggatttatagctcgtggcagtatgccgatctctatcgggatgcgttgctctccttcccgcaatactggcaggactactcgcatgtgagtcaggcgtcagaacgtctgaaagcgaaattactggcagatcatgacaaagatattctgttagcgcttgctcaaatcataacgcgtggtgcgcaatccagtcggcttgctccacgcttgcaggagcaacctttctatccttctgttttcattgatgaagttcaggattttacagaggtgcaggttttcctgatggctcaacaggccgatccgaaatatcacgcggtaacgctagtgggggatatgcatcagcagctagggcgtgggaatgttcgcgatcttgatgcctgtttcccttaccattcattgacaaaattcctgctaaaagaaaataaaagacaggaacgagagccgcagcttgcggcgacgtcgatgctctttcgcgcgttagttcagaacgatagtcgcgtgcaggagtcggcagggcagctcactctctggcgagaacaagcgcaaaacgggactaataaaaagttcatcaaccaacctttcgacaatattgatgctgaattggtcgatctcattagtgaacaacctcatgggcggactattgctgttatctgtccagacctggctctagcacgggaactggaggagcgtgtacgcaatgatttgattcagaagtcttcaaggactccgcgcgttgcagaacatatcgatctcgcccaaaagtatcaggttcatttttcctgcgctgagaatgtcaaaggcctggagtttgacaccatgatttatgttgggcttgagaaaatagactgggctaatccacaagagctcaacaaagtatatgtaacgatatcaaggccaaggaagcggctgattatgtttggtaatcaatatgatttacccgacactgtcgcaacatgcttacttacttattctgaatgcaggagtgcctga

SEQ ID NO: 240221 - DNA, 1017 bp, Klebsiella pneumoniae; identical to SEQ ID NO: 196846

SEQ ID NO: 240222 - DNA, 153 bp, Klebsiella pneumoniae
atgccggtatatctttggctgatgctgttaattttctggtggaaaagtacgggctggttcgtattgatcgcaggggattcgactggcaagaacagtccccatatctgcgagcagtcgatattctgcgggcgcgacaggcaactggtttattga

SEQ ID NO: 240223 - DNA, 1215 bp, Klebsiella pneumoniae; identical to SEQ ID NO: 149105

SEQ ID NO: 240224 - DNA, 627 bp, Klebsiella pneumoniae; identical to SEQ ID NO: 149106

SEQ ID NO: 240225 - DNA, 1176 bp, Klebsiella pneumoniae; identical to SEQ ID NO: 52403

SEQ ID NO: 240226 - DNA, 924 bp, Klebsiella pneumoniae; identical to SEQ ID NO: 52404

SEQ ID NO: 240227 - DNA, 1263 bp, Klebsiella pneumoniae; identical to SEQ ID NO: 149109

SEQ ID NO: 240228 - DNA, 507 bp, Klebsiella pneumoniae; identical to SEQ ID NO: 149110

SEQ ID NO: 240229 - DNA, 474 bp, Klebsiella pneumoniae
atgaccacacgcacccgcctgaatctctatttcgacccagcgctcatcccgcagatcgaggcgatggcgctgcgccgctcggcggcgctgcgccgcaatgtctcgaaatccgccatcgtggaggcggcggtcatgtcctacctgtccggcgatgccgacgaccagcttgaagccgccatgtctcgccgcttggataaactcggccgccagatcgacacgctcgacctagatctcgccgtcctcggcgagacggtcgcgcagttcatccatttctggatgaccatcacgccgccgctttcaggagccgcgcaatctgctgcccacgcgaaaggtgcggaacggtttgaaggattcatgcagaatctcggccggcgtctggcgacgggcgacaggttcttgaaggagattacgagagatgttgggcctgaagaaggtcttccggggttgaacaatcatccaacgcaggagcgctga

SEQ ID NO: 240230 - DNA, 771 bp, Klebsiella pneumoniae; identical to SEQ ID NO: 149113

SEQ ID NO: 240231 - DNA, 996 bp, Klebsiella pneumoniae; identical to SEQ ID NO: 149114

SEQ ID NO: 240232 - DNA, 333 bp, Klebsiella pneumoniae; identical to SEQ ID NO: 149115

SEQ ID NO: 240233 - DNA, 282 bp, Klebsiella pneumoniae; identical to SEQ ID NO: 149116

SEQ ID NO: 240234 - DNA, 2493 bp, Klebsiella pneumoniae; identical to SEQ ID NO: 149117

SEQ ID NO: 240235 - DNA, 777 bp, Klebsiella pneumoniae; identical to SEQ ID NO: 149118

SEQ ID NO: 240236 - DNA, 267 bp, Klebsiella pneumoniae; identical to SEQ ID NO: 149119

SEQ ID NO: 240237 - DNA, 1356 bp, Klebsiella pneumoniae; identical to SEQ ID NO: 149120

SEQ ID NO: 240238 - DNA, 690 bp, Klebsiella pneumoniae; identical to SEQ ID NO: 149121

SEQ ID NO: 240239 - DNA, 378 bp, Klebsiella pneumoniae; identical to SEQ ID NO: 149122

SEQ ID NO: 240240 - DNA, 963 bp, Klebsiella pneumoniae; identical to SEQ ID NO: 149123

SEQ ID NO: 240241 - DNA, 1137 bp, Klebsiella pneumoniae; identical to SEQ ID NO: 149124

SEQ ID NO: 240242 - DNA, 222 bp, Klebsiella pneumoniae; identical to SEQ ID NO: 149125

SEQ ID NO: 240243 - DNA, 318 bp, Klebsiella pneumoniae; identical to SEQ ID NO: 149126

SEQ ID NO: 240244 - DNA, 354 bp, Klebsiella pneumoniae; identical to SEQ ID NO: 149127

SEQ ID NO: 240245 - DNA, 399 bp, Klebsiella pneumoniae; identical to SEQ ID NO: 149128

SEQ ID NO: 240246 - DNA, 1647 bp, Klebsiella pneumoniae; identical to SEQ ID NO: 149129

SEQ ID NO: 240247 - DNA, 1539 bp, Klebsiella pneumoniae; identical to SEQ ID NO: 149142

SEQ ID NO: 240248 - DNA, 837 bp, Klebsiella pneumoniae; identical to SEQ ID NO: 163458

SEQ ID NO: 240249 - DNA, 1182 bp, Klebsiella pneumoniae; identical to SEQ ID NO: 149135

SEQ ID NO: 240250 - DNA, 1047 bp, Klebsiella pneumoniae
gtggcgacttatcgggcttactacgggcaggacagagatcgtgaatactttgaacgcatatttcagtcagcaaacatcaatttcatcattggctcaggagcatcactgcctgcaatcagcgtgttaggtgatattgaaagcgagcttgaggctctggtccgcgccggaaatgatgatgaatacttcagtaaatctgagtcttttctggacaatgtatggaaggcaaacaacgtcctcctgaagcgaagcaggcccgcagaggtaatccttcctactttaatagatgatgtcgtatcgacacaaaacaactacgcgaagctcatgcgggcattagaaatgcttctaacgaggcggcggactggattgctaccgcggcgcatcaacctttttacgactaactatgatttgttcattgaggatgcggcggttaaaaataacaacgtcattctgaatgatggattccgtcagcgcgctgatatttacaaccggacagtattcgatgccaaatgtttttatcagaccatacacgcaaccggaaacctttataattacagcgtggaactacctacggtgaatctcatcaagctgcatggttccctttcctggcatagctatgataaggaaatctattattccattaaggatatgaagccagttgcgttcaatacaccaaaggagaagcaggactgggttatgtcacatcaactggttctgccgcgaaaggataaatttcgtgaaaccttacttgaaaacgtgtattacgatctactacggacttattcaaatgagctggataaagaaggctctttgcttatagttttcggattttcttttgcggatgagcatattgaaacccttaccaaaaaagcgctacgaaacgccacgctcaaaattgttatattcgcttacaacgaggcggctaaagacctatttcttggtaaattccgagattattccaacgttgatgtggtttttactcctggagctccgttggacttcaaaaagatgaatgaaattataaccagctttcttggaggtatgaaatga

SEQ ID NO: 240251 - DNA, 1809 bp, Klebsiella pneumoniae
atgacctccgcttttgttaacgaagaagcagtattaaggatcggtgaggttcgtgaagtatcgggcagaacactcagcgtgcttgtcgataaaaataaaaatctgagtgaccttttctatcacggtaaggtgctcaaaaatgtttcagtaggtagtttcatcgaagtcaaaaaaggcttcatgagtctgattgcaaaggtagaaaccgagaagattgtcgaggaaaaatcacctgttggtagcggaagcgattcgcttcgcttccgacgctatcttacagcctcactggcaggctacattgaccggaacgggcgctttactggcggaacacgcgagttaccccttatcggcaatgaagtttttctgatgtctgaggaacaacttcatcttatccactcgatcgcgccagcgggcgagtctgggctgaatttttcgcgcaccgatctcgaagatattgatatcactctcccgataagcggccttctcaactcacacatcgccatcttcggtaatactggcagcggcaagtccaatactctggccgcgctttaccagcatggctatgaggccctgaaaaacctactaggcgaaggattcagaagtcggtcacggtttcttttatttgatttcaatggtgaatatggtgggagaagttgcattacgcgcgacaaggttgtttacaatcttagcacgcatgatgaagagggtgatcgcattccgatgcctgctgagatactgcttgagcatgagattctctctgtcctgacggatgccaccgacaaaacgcagaaacctttcctgaagcgagtacttgaattcaaaaagcgagtggagtcgaagctgaaccctcagtcatattttcgtgaaattctgaaacggcgggtcaccgaaactctgtttggttgcgaaaagaaaaaaagtgacgacctgattgatttattccgtcccgtacttaaggacgaagacctgatagcagatattgaatttttttataacaacggcggcgtatggcgaactaagacaggtgtttacttttctaatgaagaaaatactcatcagtgcaatatgtaccagagggctcagaattatgaatttcccgaagatataatggaagagttgctggactatatgtatgttcagctaattattgaatatctttcaagtcgctcaaatcctgaacatctttctcctgtcatcaaccgaatgagcggactgaaaaaagatattcgtaaaattttcaatactgcatccggcggaaccatctgggcagaaacgaactttgttgtcctgaaccttaatatggtcaatctgaccatgaaaaaaacgctaccacttttaatggccaaatgggcctattcagcaaaaaaaatggataaggtaccgtccactctccatctcatcatagacgaagcacacaatatcctttcgaacacctcgttcagggaatcagaaagctggaaggattatcggctcgaaacgtttgaagagataattaaggagggcagaaaatttggcgtctttgtgacgatatccagtcagcgaccaaatgatatctccccgactatcatttctcaggcacataactatttcattcaccggttgataaatcagaacgatctgtatgctattgaaaaatccgtttcctacatagaccgcatgactgaagaatctattccaacgcttgcaaccggcacctgcatattcagtggcgtgatctgccctatgccacttaagcttcgtataaacgagctgtctttccgcaaaaagccgcacagccatacgctgaattttgaagacctaatgctttag

SEQ ID NO: 240252 - DNA, 1008 bp, Klebsiella pneumoniae
atgagcaccggcagcggatccgtttacccgccagcgttgaggatgagcaccggcagcggccccgcttacccgccagcgttgaggatgagcaccggcagcggcccactttccccgccagcgttgaggatagccaccgtcagcggccccgtttacccgcctgcgttgaggttgagcaccggcagcggcctcgcttacccgccagcgttgaggatgactaccggcagcggccacgcttacccgccagcgttgaggatagccaccgtcagcggccccgtttgcccgccagcgttgaggatgagcaccggcaacggccacgtttacccgccagcgttgaggatagccaccgtcagcggccccgcttacccgccagcgttgaggatagctaccgtcagcggccacgcttacccgccagcgttgaggatgagcacctgcagcggccccgcttacccgccagcgttgaggataagcaccgtcagcgcccccgtttgcccgccagcgttgaggataagcaccttcagcgcccccgtttgcccgccagcgttgaggataagcaccgtcagcggtcacgtttacccgccagcgttgaggataagcaccgtcagcgcccccgtttgcccgccagcgttgaggataagcaccttcagcgcccccgtttgcccgccagcgttgaggataagcaccgtcagcggtcacgtttacccgccagcgttgaggataagcaccgtcagcggtcacgtttacccgccagcgttgaggatgagcgccgtcagtggatccgtttacccgccagcgttgaggataagcactggcagcggccctgtttacccgccagcgttgaggatgagcaccggcagcggccctttttgcccgccagcgttgaggatgagcaccggtagcggatccgtttacccgccagctttgacactaccagcgactacagtcgacattaaaatcgccgtgacctgctgcagcgtgatatacgcccggctggcatcaaaagaatcttaa

SEQ ID NO: 240253 - DNA, 348 bp, Klebsiella pneumoniae
atgatcccgctaccaacaggcaccaaaatctggctggttgccggtattaccgatatgagaaacggcttcaacgggctggctgcaaaagtgcagacggcgctgaaagacgaactgatgtccggccatgtcttcatcttccggggccgcagcggcagtcaggttaaacttctgtggtccaccggcgacgggctgtgcctgctgaccaaacggctggagcgcgggcgcttcgcctggccgtcagctcgcgatggcaaagtgttcctcacaccggcacagctggcgatgctccttgaaggtatcgactggcggcagcctaaaagactgcttacgtcactgactatgttgtag

SEQ ID NO: 240254 - DNA, 684 bp, Klebsiella pneumoniae
atgggagagcgggaactttttatcgaacacccgactgacagaagcaatgcagttaaagttaatcaggtctcatcgttttcgctcccgtgggcagatcctcagaaaatcccgtacaccattatggggccctacctgaaacctctcttcgaccgggcttttattgacgggttgcatgatccgtcgaagcgccctacagccgatgaatgggagagcgccctggtaaaaaccgtcgatctcatccagccatgccagaacaaggattgtgaccagaaatggtacgttttcaatggcaagacgaaacccgtttgtccctactgcggtacaccgtacaaaggcaaactccccatcctgaatctgtattcgtcgagaaaagctggaactttcaggccagatgatcaccggcttatggtgtggagcggtcagtcattatatgcatggcacgtcaaccgactgattgctcctaacgaacgaaccaccgatgagcagaagaaaaggggtggttatttcgtcttccataatgaccagtggtggctggttaacgaggggcttagcgggctcatatcacttcccgatcggaaaacggtcggcattggtgaaaagttgctgctggaggacaacacccagttcatcctttcttcagaggatggtgggcggctggtagtggtacaactcgtggtgaattaa

SEQ ID NO: 240255 - DNA, 1278 bp, Klebsiella pneumoniae
atgaaatcacaatttatgcatgtagaactctacagcagagaagaaccagtaaaaaagacaataaataaaagtaaaaatctaaatcatcaatctgatgttagaacaacaaccgtttccggtgtgttgtcagaaatgaaaagggaagaaggttttacatctcatttagaagccatagctgcaccggaggtgctctatggctctataagcgatttagaacgctctatagagcgttacgaggccgaatttaagactactgataaaaacggcaaggagaagaagctacgcaaagatgcatgcatcttgctagctggtgtggtttctctagatcgagctgatgaagaaatttgggatgaatataaggccaaagcaattgaatatttaaaaaataaatatggtgaaaatttaaaatgtgttgttgagcatacagacgaaacaaacccacattttcatttttatgttgtaggaaatcagcagcaagatttaaatttgctgcatgatggaaagctcgcagtatctaaattagcaaaagaagataagaaaaaattacatcaaacagcttacacagaagctatgatcaaatttcaagatgatttttatgtacaggtatcaaataaatttggattgagcaggacgggcgaggagccgcgagaacgctataaatctcgccctgattacctgagatttaaaaaaagacaagaaacagcattaaatatattgtctgatatagaagaatttgaagctgatattaaagaaaaagcaaggaaaactggatatagtaaaggtgcaaaacaatttcaaaataaaacatgggtaattaaagttggtgaagcaattaaattacttggaaaagagcataaagcagaattagatcaaaaagaaaaagagttagaaaaaataaaaaaagaaaaaacagaaattgaaactgagcttaatttgaaaaaagaagaattatctaatgcatatagtcaaagaaatgaagcatcgagaaaaaacagcgtttatattgataaagtaaacgctctaaaaaaagaaaataaatcattacttacatataaagatcaatttgatttgaaattacagcaggaaaaagagccattacaagcagaagtcaaagagttgacttctgaaaataccaatttgaaaaatgagaattcagaactgaaaaaagaaaatttagatttcaaagaatttattttgggtgttaaaaattattatgggtctaaatttgatgaatggtgtaaagaaatattcaaaacaaagacaaaatacaaatattaa

SEQ ID NO: 240256 - DNA, 504 bp, Klebsiella pneumoniae
atgtggtgcggtgatgtgacctatatctggacgggtaagcgctgggcgtacctcgccgttgttcccgacctgttcgcaagaaaaccagtgggctgggccatgtcgttctcgccggacagcaggctcaccatgaaagcactggaaatggcatgggaaacccgtggtaagccagtcggggtgatgttccacagcgctcaaggcagtcattatacgagcaggcagttccggcagttactgtggcgataccggttcaggcagagtatgagtcggcgtggaaactgctgggataacagcccaatggagcgcttcttcaggagtctgaagaacgaatgggtgccggcgacgggctatgtaagcttcagcgatgcagcccacgcaataacggactatatcgttggatattacagcgcaataagaccgcacgaatataatggtgggttaccgccaaacgaatcagaaaaccgatactggaaaaactctaacgcggtggccagtttttgttga

SEQ ID NO: 240257 - DNA, 588 bp, Klebsiella pneumoniae
atgtattcaataatcagaaaacaatcacacaaaaaaacagctatacaagctgtacataatcataatatgagaatagttatagaagaaaatgtaaattctaaaaaatcaaatttgaatgaaatattaatcggtactgaaaatactagatccgacataatgagttatattaaaaataatgatattgtcattagaaataaagacacagtaatttttaacgaattcgttttaactgcatcaccagaatttttctttaacaataaagatggttcaaagaaaactagatctgaatataatgacaatttgaaagattgggttaaaacccaaattgagtttttttataatcaaaatatgcagcaattggaaaaaacctctgtggaaaattccacacttaaaacccagaacttggaacttaagcaatcacaaagtgacctagatctggtgagaaaatttttacctatggagctgcaaagccttgtcatcagagccagagaactggcctctggcggcgattctggcggtacaaagcatactgcagaacctacaccaactgcagatctaactacctataaaagacctaaatacaaataa

SEQ ID NO: 240258 - DNA, 735 bp, Klebsiella pneumoniae; identical to SEQ ID NO: 149402

SEQ ID NO: 240259 - DNA, 219 bp, Klebsiella pneumoniae
atgtcttgcttgtttcaggtctatgcttccaccctgacccagctcattcataacgccaagatcgaactgcgcctgcgcatcgttttgcgaagctgctttttcataccacttctttgcctgttggtagtcttggcttaccccgagaccatcgttatacatctctccaagcaaaaattacgcattaacttcattttgcacagccgctttttgataccatga

SEQ ID NO: 240260 - DNA, 174 bp, Klebsiella pneumoniae
atgcgtaaccagaacccacagccgggaagccgttacaaggattctcacggggctgtagtgaccgttgagcgcgtcgagcataaccgcgtgacgttctaccgcgacggatatcagcacccgtgcgtacagcctattgagcgattcatgaaggagtttcgggaggtagcaccgtga

SEQ ID NO: 240261 - DNA, 180 bp, Klebsiella pneumoniae; identical to SEQ ID NO: 208632

SEQ ID NO: 240262 - DNA, 1683 bp, Klebsiella pneumoniae
atgcaggaaatttgcagcagagaaatagggaaaaaagggtgggtactcacattctataaaaaaagattcagacgcatttatcccgctttattattcgccgttatctttacaagtgttttaattctctactctgaaaccccttctggcgtaagtgaaggttttaaacaaaccatcagcgcactaacatttacttcaaacttctattatcagctttttacaggcgattactttgctactactgctgagtttaactggctcctgcatacgtggtcattatcagtagaatggcaatattatttattattccctctcgcgctttggatttcaacaaaggtcgggaagtataattcattactctatgcaattatcattgccacatcgatactaatttgcatttattttgggcctcagcacacaaaagcgaacttttacttacttcctacacgtgcgtgggagttgatggcgggtgctttcgtttcaactcttacagttaagaacaggatgccacgactaacagaagcgctgtcaatactggtactgatcgcgtttactgtattttcaaaagatagtggcacatggccgggtttaatgacaattattccagttgcggctactgcattgctcctgcatgcaaatgtaggtaacgagaagacactgctcagacacgttattttccaaaaagttggctctgcttcttactcaatttatttatttcactggcctgtggttgccttcatggcaaataatacaattgaattcactaccttcaattcaattgttgcccttctgatttcagtaatattaggttttgtttcatacaattacctcgagtcattttatatcaaaagggacaaagcattgctggccagcgtactaaccttttctgcattattcctcattatgaacaaagctcagatttctaaacattggatttctaaagaagccattgttctcgatgaatacaaatcatatacatcacgtgccgggtataaggaacagtttggactggatgtaggtgattgctttatttcaagcgcgaatgagaaaaaagctaagtttgatgcaagttgtgttacgtcatcagatacgaaaccaaatattttgctaattggtgatagccacgcagctcaatatgcaggctctatgcgtgaattattcccagagtataatgtgatgcaggcaacagcatcaggatgcatgccctttaatggaacaattggtgagcctcgctgtgtgaaattgatgaactatatttttaatgatctggtcgaaaatgcaaagatagattacatctttatcactgctttctggagcatatcgaaagataaagaaacaaatgaaaaacttatcaatacaattaaatctataaaaaatgcaaaggtatttgttatcggtcaaacaaaatctttttccacggctttctataaaattgcgcaaaaagccaatgaatcagatattgaaggattgatacaaaaaaaggcaattgatacaaacaattcaatggtgcaactctttaacaaagaagggttgaattatcttaatgtgttcaatgcaaattgtgatgctaatacatgctcatatttcacaaaagaccgtgtaccgatgctgtttgacgataaccatttgacacgcgaatgggctgatgcgtacgtctctaagattaagcaactttcaggtctgtaa

SEQ ID NO: 240263 - DNA, 2268 bp, Klebsiella pneumoniae
atggcagaagtaccattacctacaccgacacaggctccagttccaagtactgatattcgtaatacggtgttcgctggcgctaaacttgacgaggaagttaccagcgtgagcgataattatatagatcgcctcggtgttaaacgcctgacaaatacaggacgaaataatctttttcaaaatgcccaggattcgatggcgaatcagtttaattcagctcaggctgacagagacgaacgattcaatacatttattcaaaattctggatatgattttattggggaatacagtgctggcccgttgacgcttactgagtataaccaggtcattcgctataacaacgagttgtataaactcaccgcagcgacagataccccgtttacaacggctggcaatactgacgaaacatggacgaatagtgatgctgcgcattttgttgctgtaggtgacgcggcattgcggcaagagcttatggaaggaaaggcccttgttggggaaatggacgctcgcttgattacgggtgacgtcaccagatccggggcattcgtctcattcactttcgatgatgcgtatatcagtgcgctggatgttgccgcggcctttgagagccgcggcctaaaaacctctttcgcatttggaatgataactccgtctcgcacagcaacacggttaacgtgggctaatgttcggaacctggccgaacgcggtcacgaaatctgtaatcaggggctaactgacagcgctattttctcggactcctacaatcgcgcccttgtgaatgcagaaatcaaccaggcttacgatatgctgcgtgaagtgggggttgagtgtagtgggtatcacgcctctcgaaatagccttggagcctcgttcaccgatctgcttgaactaaaccacgcctacgcattcactgttgctaaccagactgctgagggcgtaaacgcactacagacgtacccaatcgatccataccgcatgtttcgtgtttctttgtactcgcttgggctgactaaagcaaaagcggcggttgatgcagctattgcaaacaatggttatgttgcgttctatgatcacgatccgtcacagtcgtactatgcgacaagcatgtcgctggcagatctggaaatccttttggattactgtgttgctaaaggcgttacggtgcttccgccggcgcaggtcatgacctatttatcaggcaacctcattcaagggcgcgatgcgctgactgctgtatcccagagaaaaacggatatgtatgtgaaccccaacctgctgccgcagtacgatttatctcgtctgggtagcgacggcgatggttctggcgaaacgtatgttgaaaaaactacgtctgcaggttcgataacgatcagctcgctaatatccgcggatacgattaatggcgcatctatcacactggctaacgattttactgcagatggcagtgtttatgtgcgtccgtccggtatcggtgtcatcgtcagtaacgggcccgactccagattagtagactcgcggcaggcattctgtttttcgtgtggtctgtattctggttcatcagcagtaaacacgaacttcaaaatcacgctgggcgttgacgtaattaacagctctaccaacgaaattattgaaacgctggagtcagatgctgttcagcttgatagctatgccaggttgttttcgtttccgttcgcacgaagtaactttgatgtcgcggcttatttaaaaccattcattcgaattcaggttttaacggcgggtagcgcagtcgctatcggtatccgaaatctaaaggttgaacatgggtcaaaacccactccttgggtgcatgggcgctcgcatgactcaatagaagagccttcggcagcagctttctatttagcttcacaagaactggcctctggtagtaatgttctgatgacagcatctggtggtctgggtaatacctcatactgcaagctagggtcagatgggctggtacaatttactaaaacagacacctattctgttcaaatacatggttacgtaaatctttcttctgttgtagctgatggcttccggacagaagttcgtgttgatggcacgaatggcattgcgtttgcgccgacgctaacaccaatagttggagggctgtgtatctggaaatggtctggtactgtaaaaaaggctgcggggcaaaagttgagcatctatttccgccagaacacaggccagtctgtgacaacagtggcaggaggcgaattgtcgtatgtgagaattcagccatgttaa

SEQ ID NO: 240264 - DNA, 507 bp, Klebsiella pneumoniae
gtgaaaaaaattatttttgcagcaatagctttggttgcatttagcacacacgcaaaagattggacgccttcatatcaaaacgatgaaatgcgtggtacagctcagaagtttctaacacttgactctgaaaattctgccgattttgattttccctataacggtggctctgaactgtcaattgtcctgcgctccaaaaagaccactttgaaaaagggtcagaagccggaggagttgatgccaacagaggcgctgttacttataagtaaaggccagtttttatgtaactcgtatgatggttgccatgtgtctgttaagttcgaccaagacaagataaaaacatattcaatgaatgaagctgctgatggcagcgctgacgtgattttcttctcagcaccctctggattcataaaaaacattaaatctcataagcaagtaattatcgaggctgaattttaccaggaagggaaaaaacagtttaagttcaatttagataattaccctggatag

SEQ ID NO: 240265 - DNA, 123 bp, Klebsiella pneumoniae
atgacccgcgaccagatagcccgataccaggccgaaagcgtcatgcgcgccaagatgccgccagtagcaaagcacagccagaaccagaccaaaaccaaacagccattaggagaagcagcatga

SEQ ID NO: 240266 - DNA, 180 bp, Klebsiella pneumoniae
atgagcacccacaacaccctcgcattactcaactggtaccgctcaaagcatgttgccgcggtaaagacacctgcaggcattgtctttatggggatgcgtaacgttaccgccgatcagcgaagaacgcttccggcaatcccgcaagctgacctcgaagcagcgttgaggattcagcaatga

SEQ ID NO: 240267 - DNA, 1056 bp, Klebsiella pneumoniae
atgagcgtcacgcatgtagtcagcttttctggcggcagaacgtcggcctaccttgtccacctgatggagcagcgccgcagggccggtgaggatgttcgctatgtattcatggataccggcgctgagcacccagggacatacaaatttattcgagaggtggtgagcaactggggtatcgacctgatatgcctgcgtgtagatgttaaccctgagcttgggaaaggtaacggctacaaaattatcagcattgatgacatcggtcctgacctgcagccatggatagacatcaccaaaaagtacggcactccatattttggcggcgcgttctgcaccagaacaatgaaaatagaagtctgcaatcacttctgcaaagacaacttcgacaatcaccagtcatggctgggtatgcgccttgatgaaccagctcgcatctggggagaaaagcttttccacctgatgagccgaatgaatttcgatacttacaccatgggtagcctttatcgggaacttgcagccattgatacctgcgagcaaatggtagagatgctggagcctagatttctgttggacaccgcaaccgcaggaaggatagctcagcgagtaatcgacatcaggaaatcaaagcagagctttatggcggaaattaccgagttcgagaaagaggacgtactgaactggtggaagcagcagccgtttgacctgcagattcctgagcatcttggtaactgcgttttctgtatcaaaaaggggctaaacaaagtggctctagctatgcgcgatgagccggaaatgctggcccagttccgcgcagtaatttcctctccagacgtcagggttgtcgagcgcaggcagcaggaaaacaaaatcatgtaccgcgaggggcagtcacttgatggcgtagaggcaatgtacgctggttacgaacgtgatgatatcgcaaaaacagtgcgcagcagcggcgggtatgaatcaggctcctgcacagaaagttgcgaggctttcattgttgataacggacagcttgacctatttgcagaacaggagcgtgcagcatga

SEQ ID NO: 240268 - DNA, 348 bp, Klebsiella pneumoniae
atgagcaccacagacaatgcattctctgcaacccttgaaccgatcgatacgccgaaaaccacgctcaagcagcgctggtggcatatcatggataactggaaggtggggatcgtcccgctgccgctgtttctgctggccggaggactgattgccctcgactgccttggcggcaaactgccgagcgatatcgtggtgatggtggccaccctggctttctttggcttcgcctgcggcgagtttggtaaacgcctcccggtgctggggaaactcggtgcggcggcgatctgcgccacctttattccttccgcgctggtccactatggtctgctgcctgacgtggttatttaa

SEQ ID NO: 240269 - DNA, 1419 bp, Klebsiella pneumoniae
atgcgtattgcaaaaataaagtgggcgatgccacactgctacgctctgattttcttcattattatattagtagcgctgctgacatggtgtattcccagcggcagttttgattatcactcagtgaccttacccggcggtgaaactaaaacattagtgatcccagggtcttatcatctgctggacaaagtcagcagcgagggcgatttacgtcagggtattgccgccgtactggccgcgccgatggaggggattatcaaggccgccgacgtagtggcgtttgtgctcattgttggtggcgcttttggcattattttacgtactggcgcaattgagcggggtctggtggcgctggctgaacgcctggcaggtaaaggaattttggttattcctatcgcaatgaccttgtttagcctgggaggcgcgacttttggtatgagcgaggaggtgatccccctgtatgcgatctttatctccctgatgttcgcgctgggttatgactcaatgactgcgatcctgattctttttctgggaacccagattggctacgttggcgcaatgaccaatccgttctctgtactcattgcccagggcgtagcgggtattcagggaaatccgcagctttggctacgtgctattgcatggctggtcttcacgctactggcgattgcttacaccatgtggtacgcgcaccgtgttaaacgcactccgcaaaagtcgccggtatatgaaaatgattgtcgcaaccgcgagcagtttttgtcgatacaggatacgtcggtccatttttccatcgccgatcgggtaattatcatcgcctttgtgctggcgctggccgtcatctcatgggggttaatcacgcgtggctggtacatggttgagatcggctctgtgttcctggctctggggctgttttccgggatcgtcgggcgcatgggcattagcgggatggccgacagctttgtcgaagggtgcaaagagtttgtctacgccgccgtagtcataggtcttgcgcgcggtattctggtggtggcggagaatggacgaattatcgatacgttgctatttggtttgtctgaaatgctggaagggttgccgcagtatgcgtttaccactctgatgctattagggcataacgtcatcaccttttttgtgccctcatcttcgggcgaggccgcgctcactatgcccgtgctggcgccgttaggcgatttggttggtatcaataaagaggcgatggtgatggcttatcaatttggcaatggcctgacgaacctggtctctcctaccggcggtgtattgctggctgggttgtctattgcgcgcattgggtttggtcagtggttaaaggccattgcgccgctgtttccggtgctgtggatagttagcgctgcttttgctgcgatttcggcctgggtctga

SEQ ID NO: 240270 - DNA, 963 bp, Klebsiella pneumoniae
atgtttgaagaaactattaaaaaacaatttgaattgttagacataagtaacttcaatgttgatatatctcatcgtctccttttcgtatgtggtggcaaagtcgatgtacgtgcaccaattccacccagttttagggatagactacttacttacacagcaaaacatgcccctgaacttcacgaacatttcattctagctgagacattcaaggattattttaaagagaatgcctatccggaccttctagtgtttgaagatgatatagccagtatttcatctcttattatcatttttttagaaagtccaggatcgttagttgagctaggtatattttgcaacaaatcagaactatttaaaaaaatactgattgttgcttcagaggaagaagtatccggtgaggactcattcatttatttaggcccacttgagtatattaagaagaaagtttcatcctctgttgtaatctatccttggccagatcctgaagttttaaaatacgatgatgattttcttgatgatttatgtgtaaatataaaagaaaaactttcatcaatcccaaaaacagaacaattcagtaaggataattctgggcatatagcacttctaattactgaaattatatctctttgcttcccaatacaacttagtgaaatagaaatagccctaaattcattagggattaatatctcgacaaaaattattaacagatcaatttatttacttcagaaagttggttttatagacgttttatcatatagctcaaacaaatattactttccattaaaagaacgcaaatgggtaaaatttggtaaaactaaagaaaataaactcatagataatccacaattaacaatgaagtttagacaatcttttgtaacattaaccgatccattatcaaaacgaagaattacagcactacgtcaaataatagcaaaaaaagaaatggctgaggagataaaataa

SEQ ID NO: 240271 - DNA, 936 bp, Klebsiella pneumoniae
atggacatattacagcatatttcagacttactattaaccaagaaaattgaaatcatttctttttcattgacggcaccttatcgctataaaatatatagaatcgcaaaaagaaactcagacaagaagagaactattgcacatccatcgaaagagctaaaatttatacaacgtgcaattactgagtatttatccgataaattacccgttcatgaatgcgcatttgcatataaaaagggtagtagcattaagaccaatgctcaaattcatcttcatactaaatacttgttgaagatggattttgagaattttttccctagcataacaccacgtctatttttctcaaagttacgacttgcaaatattgatttaactgcagatgataaagtaatacttgagaatatattattcttcaaatccaagagaaatagtaatttaagattaagcattggagcaccaagttcacctttaatatcaaatttcgtgatgtacttttgggatattgaggttcaaaaaatatgctctaaaattggcgttaactatactcgttatgctgatgacttaaccttttcaacaaataataaagatgttttgtttgatatacctgacatgcttgaaaacatactaccaaaatattctttaggtaagattagaatcaatcatgagaaaacagtattttcttcaaaagggcataaccgtcacgttactggcataactctaacaaacgataataaattatctataggtagagaaaggaaaagaaaaatctctgccatgatccatcattttataaatgggaagttacctgctgacgaatacaataaattagttgggctacttgcattcgctaaaaacatagagccatcgttttataaaagcatggttattaaatatggacctgataatattcataaattacaaaaacaaaaagacaaataa

SEQ ID NO: 240272 - DNA, 1539 bp, Klebsiella pneumoniae
atgacagtaaataaaatatctcttgaatgggctattgattttgtcaaccatcactctgatggtgatcttttccctaaaagcatagaaatagagtctattgtgaataacaaagacgactttacgtcaatgattgctaaccataaccttaatgattttttgcctggaagttgtaggcgattcattgtgccaaaagatgaagtgtcatatagacaggcaactcaattagatccacaagattcaataatcctttctgcattagtttatgaatatggaaatgagattgaaaagttaagattgtcagatgacgtagtgtttagttataggtttagccctaatattaatgatgggttgtatagcaataaaaaaggatggaatgatttttggacaaaggctgaagttctagcaagaagttcaacgcatattttatattgcgatatagctgatttctacaatcaaatctatcatcacaccgttgaaaaccagttaatctctgctgggtggccaaatcaagccattaagtggttaatatcgctattggaatcgaccacagctggagtttcacgaggtgttcctgtaggcccacatccaattcatcttatagctgaggccacattaataccagttgataatagcctgaatagtgcaggttataaattcattcgatatgcagatgatatattgattttctgtaagtcagagaagaaagcaaaattcgccttatcaaatttggcaactattttagatcggcagcaaagattaacattacagcggcacaagacaaaaatattaaaacctgttgaatttttctctatctgtagagagatgattgaagatcgccctataaataatcatgaagcaagtttgctgagtataatcaagaaatactctggtggtaatccatataaaactatttcatatgcagaaatttctacagatgactggtctttaatatcaaatattgctatagaggaaatagttaatgaatatattaattctacgcctgttgattatataaggttacgctggttttatcgccggattgcccagattggacatcctggagcaataaatgtgtctttagaaaatttagagaaactagaaccatgttttgctaatatatgtttttacttaggttcaatacaaacaatagcgccaaatgaatggaagaagattggtacgaaacttctgaagctgtataaactaccagaggtgcaatcaagtgaatatttcagattgctaattcttagtgtttttagtaaaaatagttatataaaccacttctcaaaattacgtgaactttatcagaaatctgacccgttcattaggagagagataatattggcagctaagaccaatagagcatatgattgggtgagggaattgaaagagcattatccctcgatggacccatggcagcaaagagcaatgatatatgctgtttcaggacttgcaaaagatgagaagaagtactttctccagcgagttacggtgaaaaggccttttgagatagctttgtctaaatggtcaaaaaatatttga

SEQ ID NO: 240273 - DNA, 258 bp, Klebsiella pneumoniae; identical to SEQ ID NO: 96996

SEQ ID NO: 240274 - DNA, 441 bp, Klebsiella pneumoniae
atgcccggtccatccagaaaagcggcggcatggttgccgatactggtgattttagtcgccatgacctcgattcaaagcggcgcatcgcttgctaaatcgctgttcccggtggtcggcgccccgggcgtcaccgccctgcgtctggcgctgggaacgctgattctggtggtggtgttcaagccatggcggctacgtttctccccggcgcagcgcgtgccgctgctactgtacggcctggcgctcggggcgatgaactatctcttttatttatccctgcagcgcattccgctcggcgtggcggtggccctggagtttaccggcccgctggcggtggcgctgtttggttcgcgccgcccgctggattttgtctgggtggcgctggcgatcctcggactatggtatcttctgccgctgggcagaacgtggcgcaggtcgatttaa

SEQ ID NO: 240275 - DNA, 528 bp, Klebsiella pneumoniae
gtgtccttaggtgctgttctgggtagctattttgtcagtagcattccgaatgatgttttgtatattttacttcctgttttaatggtggttattcttatatatacgattttttccaagaaaatcagagataacaaagaaagcagaagtgttgtttccatgcctgtttttatgactggaatgggattgctgttaggtttttataatggattctttggtccaggtacaggatcactgtgggtaatatcattcatttcgttagttggttacaccataaaaaatgcatctattaatgcgaaacctctcaacttctcaagtaacattatttctctcatatgttttatttatatggggcaggtaaatttcgtcgtcggcatagtcatggcactagggcaaataatcggttcctcgcttggtagtcacacagttctcaagaatggggataaaatagtcaggccagtgttcattttggtcacttcaatcatgacgttgaaaatgatatatgatggcgtgacattaggaaaaatataa

SEQ ID NO: 240276 - DNA, 426 bp, Klebsiella pneumoniae; identical to SEQ ID NO: 109898

SEQ ID NO: 240277 - DNA, 312 bp, Klebsiella pneumoniae
atgagcaagagtgagcggcgtaacagaacagccactcttccgccggtaaggtgtcttccggaagaacgggatgagatacgtcaaaaggcggaggatgccggtctcagcattggcgcattcatgctgagggctgcgttaggaaggaagattgctccgcagacagatcacaagctcattaacgaactctcacgtcttggcggtttacagaagcatctctttaaagaagggaacggggtcggcagtaaggagtacgcagagatactgcaggccatcaaggcagccattttcaggatagagcaaaagaacgactaa

SEQ ID NO: 240278 - DNA, 633 bp, Klebsiella pneumoniae
atgaatatgacccttatgagcgcatatattctgtcagtcctgatgttgcttctcacgcccggaccggttgtggcactcataaccggcaccgctgcccgttatggttaccgcagcgcgtttgccgctgctgtcgggacaaacggagcttccctcattctgatagcggtggccacgctgatgctgagaggaataatttcactgtctccggtctggctgagccttctcgggctggccggttctgtttatataggatattcagcactacagagtctttgcagcacaccaatgtcgggcgcatcagagatcggggcagatactccaggccggggaagttttctgcggggttttgcaacaggtctttctaatccgaaagatattctgttttttgtctcattctttcctcagtttattgccgttacgcgggattttaccaccagtattctgacgttgtgtctggtgtgggtcattttcgacttcgccatactgacgctttatattctgaccgtgaaaaaatggacgcctgccaggcatagcaggaaaatagaaataacgtcatccctgtttctacttgccgtggcgggatgtgggatcgtatataacatattagggttaacacacagccagaatttatga

SEQ ID NO: 240279 - DNA, 786 bp, Klebsiella pneumoniae
gtggaaggtacacttctcaggagtggcacgattatcaggcagtctgacctgatgatgataaataatgataccggcgacgtctgcccggcacgggactggccgatagacgcatttcgtgatgtcgccgcacggctcagcgacaaagacttcccctgcctctttgcccgtcatgcatggaaatcacaaacattgctgttcggtctagtgagtgaggataacaccacggctgacctggtgagcgtgatgcagagcctggtgacacggacccatcagctgccggaagaagacaggctttacagtccgttgctgctgatttttcagcaccgcaacctggaatcgcttgaggaggcccagcggtttgggtggcagcagctccagtgcctccatgataatgacacacacaactggccactccatattcctcagagccccgaagaaagtgcgtggtcattttgttttggcggcatagagttctttttcaatgtcagttgccccggccattctcagatcagaagcaggaatctgggaaaacgggccgtttttatcgtcaacccccgggcacacttcgacattcttgccagccagaacgaccctaaggggataaaaatccgggaaaaaatcaggacgcgtgtctgccattacaataacggttacgttccttctgagctggggttctatggtgattcaggcagcctggaatggaaacagtatctgctcactgagcctggtgcgcttaacccgtcacagtgtccgttgcatatacgtaaggaaaaagcaccacaatga

SEQ ID NO: 240280 - DNA, 924 bp, Klebsiella pneumoniae
atgtcattaccaccactctatgcattacgcgcttttgaagctgcagcacggctgaactcattcagtaaagccgcagtattactcaatattacgcccggtgcagtcagcaggcatgtgcgcacgctcgaaacgtggtttgggtgtgagcttttcaggcgacacgggccacgtgtcagcgtgagtgaggcggggcgtgccctggccgggcagctttccgaaggttttttgagcatagagcaggcctgtctcgctttcagaagccgcagtcagtttctgcgcctgaaagcgccttcgacacttaccatgcgatggcttcttaacgtgcttaacgattttcgcaagaaccatgaaacaccgaaaattgagataaccagcgtctggatggacaaagatgaggtagatttcaactgcgagccctatgactgcgcgattttgctcggagatggtcactttgggaaagggacggagagcaggctgcttttcagcgagtggcttatcccggtctgtgctcctgcgatgcttaccagcgcacaggattcacttccggattgcgagcttatccacccgtcaccggaccgtcgtgactggcgaagatggctgaagagaacgggacgttttaaagggatcagtatcagtggcgggaaggtgttcgatacgctggagcaggggaatcttgccgccctgagtggacatggcgtctctgtaggtgatctgcttttgagctctgaggcaataaggagtggcctgcttaccactccttttccggaagctgtggcaaccggagacggatattatctggtgtggccagaaaattcagccataacgcaaaacattgaaatgctgctgaactggtttacacgtcatattccgcagtttcctgaggataacctgatttatgtctcatctcacaaaacgtctgggtag

SEQ ID NO: 240281 - DNA, 1125 bp, Klebsiella pneumoniae
atgacgatgaaccagcttatatataaggccacaacgatgatcacaccgctatttaatgcccgtatctccggtaataacctgattgcgtcactgaaggacgacacaccgattttttctctcaatgtgagcgaggacccgagcttctggatagagggaggcaccctgatggtcagcctgaataccgatagcagccatccagtatatcgggcgctggactacaaagaggcggaacaactgctttctgtcattacccaggtactcagcaagcgtaagccgaaaataaagtggaagagcaccatcctgcccgcagctgctctgctggttacctgttttgccgtctggcgttttgcgcctgcaacaccctcacagggcatgccgccgttcagacaagcagaaccccggaataacacggcggaaacggccccgccgcgtttccagggcttaccgcagctacgcacccctgcgccggggaacccctattttggcaacaacacaacactgaatgccaacgatggccagacgatgcaggcaggtgacctccggccctctgcagcccggccgtcttctgctgccagtcaggaaatgctgagcccgcacattatgcagaatctgcagaaagcggccgggcgcggctatttcaccgtccccctgtcctctggccatgaacggacgctgtacgtttttgccgatccggagtgcccgaactgcaaaaactgggagccggtcatcgaagcactgggcaatgaatacaacgtggtggttttccccgtctccgcgattggtaaagagaaatccatccggaaaatccagtctgtcctgtatctggagacagcgcagcgcgcagctgcctggaagaaactgttttcggttgacgagggtatgctcaccataggcaaacagaaaagtggcaaagaggaaaaagtggccgcggtaccacgcgatgataaacgctggaaagtcgccggcgaggcgctggccattaacgatgtcgcgttcaggcaataccgcatccccggcacgccctgggtcattgccgacgacggccgccatgtatcgcagtcaattatgaaagatccggctaccctgcgagccttcatggcagagcacagcaacgcggagaactga

SEQ ID NO: 240282 - DNA, 624 bp, Klebsiella pneumoniae
atgacaagccagcgggaacgtaccggcatggagaccttcgtgtcactgttaaaattctgggcagcgatgatttattttccggtatgtctgtttttcgcctttctctttaccgtctcgtcgagaaaaggttcatttgagcatgccttactattctgggcgctgttcgttacgccgttcatcattcggcagtttaccctgcaaaaacgccgccgcgccctgaacagcgtggtggcggccgtcagtggtgaggagtttatgccgcagaaagggaacgtcatcatttcgggcaaccggacctatctgggtgtggatgccatccggggaaccctgctctacgtcagtatgcgccgcaagggggaatacgatgtgatgggcctggacatgtccagctggacgcgggtggcgtataagggagatgttatcaccctcaaaaccaaaaacccggaactccccagcgttagcgtcgatgctccgggcggtgagaagtattccgccgcgctgtatgacgtcatctgtgcgatggagcaccggcagtatgccgacctgcagttccctcagaaagctaatgagcgtgcccgcaacgccctcaaagagaccggcctgacggtgttcagctacacctga

SEQ ID NO: 240283 - DNA, 564 bp, Klebsiella pneumoniae
gtgacacaaacagatattgatgatgtcgcctggctggacgtcagcggcgatgaagcgcctccctcaccagttcaagttaacgctgaatgttgctcacggtgtcggtggccagcccaacgtctcttcagggatcgttatgcagagaaggacgcggtttgcgcgatatgttggaccagtcataacctggacacggcatcagcacacaagggggcgttgtgctggttaccgggcctgcatgccgcggacgttgttaacttacaacggaccgcctgcatcgcggccatcgccggcaacagtcacgctaaaaaacaggggcagcgggtactgcggtggatgctccgccacaaacgggaaacagagcgcttctgggatacttcccgtccggctgaatttgcggcggtgatgtcccggttacacccgcacgaccgtcaggcatttcgccagcgactggtaggttgtcacttggtcctccctgccaccgtgttcagtgatctctcattgctgctcccaaccggaatggacgcagacatccttttgaacaatctcacacttcccaggctgtag

SEQ ID NO: 240284 - DNA, 720 bp, Klebsiella pneumoniae
atgaatgaatttaatcatcccgccccagaaaaggatgagcagccagacatatcggccatcgtgcagcatgagaaaccgggtctgaaatatttcctcctggaaaaacagtacattttgggactgaacggtccttggcttatcggcattctcatcgccgccaccctggccatctggtatctctttggcacagcgtcaacgtcttcaccggatgagctgaatgcggccgccggctttgaaaacgttcctccggcagcctcacagccaaacagcaggtcactgtccacgccactgtcacagccggccggcgatgacgtgaaagaggaagtggccacgatggtgaatggcgtcaagtcctatgcagaagccaaccgcacagcaattcagcggctggccgataccgtgaaagccctgcagcagcaggcggcaaccgcgcagcagcagcagagccagtatcagcaggaaatcaatatcctgaaatcacgcgtggcgacgcttgaggtggcgaaggtcaacaacgcaacgtccgcccctcatcgctcaaggctactgacgtctggcatgaaagtgagtgcagtccaggacggtgcagcttggatcttctggaaaaacaagacctgggctgtccgtgaaggcgataccctagctgacggtaaagtcagcatcatccggatcgattcggcaaaccgccaggtgttcacgtctgaaggtgtgatccgctaa

SEQ ID NO: 240285 - DNA, 483 bp, Klebsiella pneumoniae
atgaaactacccgctttactcttcagcgccgttctcgttcttcctggtatggctaacgcctattgcttcaaatatgccgcctccagataccatcaaaatgagctagtcatcgagtcgattgcgatatgggaaagcagcttccgtcccaacgctgtcggacgtaattatgataaagctggcaggctgctcagctctgattattgcctcatgcaaatcaatacggcgaacgtccgggcgctggtatcgatgggcgtcatttcttcagctgacgatctgttaaaagacccgtgtttatgtgttcaggccggcgcctgggtgcttgcaaaacacctgaaaaaatgtggcaacacctggcgttgtctcggctcctataacgccggtttctcagacgacccgaaacaggaacggaaacgtcaaacctacgccgcagaaatccgctccatctacgaacgcctgtatgccaggcagcatcgtgccagctaa

SEQ ID NO: 240286 - DNA, 600 bp, Klebsiella pneumoniae
atgaaatatctaattccagggctgcttattccggcagctctggctggctgtgtatcacattcagcccgcactgacgccccagccaacatatacgtcgatggacttatcgctgacagcgctcagactatcagtcatgcccagaccggccttcatcagacaggaccgtatccgacccggccagtatcccctgcagcacgggcaaaaccgttaccaccttcaacaccttcagtggctagcgaaccgtatcagaaccagccccgtccggtatcgaaagatgctcagccaccggtgctgagtcatgttgcctacaacgggcgcccgggacctttattattcccgcgacacgccggttacgcccggaacattacggttcaggcagcagcgcaacgcatcgtccccgcgggctggacagtaaactggtcaccaggactggaaaaaatacgccggcagcgtattaacctctcttttaacgaccagtggccacgggtgcttaacaatctgatggagtcacgctcactgtatgccaccgtggaatggggaaactcccgtgtgacggtgactttactcaacccccgttcacacttcctgcagagcaggtaa

SEQ ID NO: 240287 - DNA, 312 bp, Klebsiella pneumoniae
atgaataaattcctgtgcctgacgctgtctctgctgtcatttcctatttttgcctcagccagtagcccggtaaacgacgctgtttcggagcagtatctggtgactatcagcaatcagctacaagtcatttccgccgatattaaacttcagaacaccatgcttgaagacaagcacaacagccgttgttactgggaaggcaaagcctattcagcaggggctattcatactgagaattcacaatcatacgtttgccgtgaacaaaataatgcccgagtttgggagctcatgaacggcgacggcaccgctaaataa

SEQ ID NO: 240288 - DNA, 534 bp, Klebsiella pneumoniae
atgcgaaactggtatctactgcaatgtcaagtacagaactttcagaggattactacccgaatccacatgctcaacatcgaaagttttgtacccacagaagtaaaaatctcacgacgtcgggactgtaacggctgccggacgacggaaaagccgctttttcccgggtatatttttctgcgatttgatccggaggagatccatacatcaactttcacggaaatccccggggccagacagttcgtcagctttggtggccagccagaaacagtaagcgatacgattattgcagcactgaaatgcagcgcccatctgttgatatatccggaagataatgctgtcgggtgtaaaaacctcccggcagaattaattgaaaaaatcactaccatcttttcaactaaaaacgcgctcgaacgacaggttagctttttcaaattactcgaatctgacaacgacatcgaactcatgacgcgtaatggcggcaggatatactcacaggtcccgagcacccagcctcaaatacggccttctgtataa

SEQ ID NO: 240289 - DNA, 306 bp, Klebsiella pneumoniae
atggatgaagatactttgttcatcctggcgagccggacaatgcaggacgttgagcttattcaggtcggcgggaaatatggtgagccgtatgttaactttggcgaatttgtaatcatttcgaatgagtctgatatatataaaaataatggtaaattgtgctatgtgaaaacgagtgagggggtaaaaataggcattgtatctatcttagacgaagaatcaattttattggttggaaatggtgaaaaagaactaaagaaatctgttgtgcaggaatgcaggaaagtgaagtggataaaaaaagtataa

SEQ ID NO: 240290 - DNA, 471 bp, Klebsiella pneumoniae
gtggataaaaaaagtataaaaattaattttcatcgctacagtaatgaggctattaactttctcaataagtttgagaaagttacttacgtctcaacattacttgtcgaggataatatattatctgcacaccaaagtaatggttatgcggactgggataaaaagttctattacgatggcaagtacagagatagtctcctgattaaattagggcttgaactgactaaaattgaggaaggtgataaaaaaaccatcatatgggatgatgttttaagaaatcatcctgaaaacgagatcgataagcagaggcgtgcccataatatctatcatggcgtcagctttatatatggattgactgacaatatcagtatggcaatcaatgtatgcaccgactctgctactaccaaaagggaatttgaggaccttatcctcccccacaggattaatctgctaaatatatttcaggagctgtaa

SEQ ID NO: 240291 - DNA, 387 bp, Klebsiella pneumoniae
atgtttacaaagaagttttctgtagttcaggaacatgttgactttcaaggagttgtagacggtctttactatccgttctatatggagtggactcgtcatgcctatatgaaagaagcacttgggcttgacttagaatctgaatttaaagaaggtcgcattcatatgatcctggagtattccatgaaatttaagaagagccttcttaaagatcataatatggaagtgacttgccagcttcaaaagaatgagaagcgcaatcgtgttaattttgttcagcagattattgttgatggagttgtgtttgctgaggctgtatttgtggctacatgcctggttaacggacggccttctgttcctgacgttgtgcaaaatgcaatcgtcgaataa

SEQ ID NO: 240292 - DNA, 798 bp, Klebsiella pneumoniae
gtgctagatggcttgctgtaccacgaaagtgacctggaaatcagagagcattacaccgatactgcgggtttcaccgagcatgtctttgccctgatgcatctgctggggtttgcgttctgtccgcgaatcagggatctccacgacaaaaagctgtttatcaaagggaaagcggaccagtacccggcgcttcagtcactgatatcaacgaccaacctgaatctgaaagagatcgaaattcactggcatgaagtactgcgtctggcgacctcgataaagcagggaaccgtgacagcatctctgatgctgaaaaaactagccagctaccccaagcaaaacggacttgccaaagcactgagagaaattggccgcattgagcgaacgctgtttatgctcgactggttccgcgatcctgcactgcgtcggcgagtacaggcggggctgaataaaggtgaggcacgtaacgcactggcgcgggcggtatttatgcaccgactgggagaaatcagggacagaaagcctgaaaatcagagctatcgcgccagtggattgacgcttctgacggctgcgatctcgctgtggaatactgtgtatatggaaagggcgatcgatgccctgaagcgtaagggactaaagatcaacgaacaactgctgtcgcatttgtcgccgttaggctgggagcacatcaatctgacaggcgattatatctggaaaagcaaccggagaccggcttccggtaagtttcgtcgattgagaccagctaaagtagaaaggtcaaaaaatagtcttaacgtacaataa

SEQ ID NO: 240293 - DNA, 405 bp, Klebsiella pneumoniae
gtgatacaattggagaagtcctacctcagatcctcaagactggccgctacgttcgggaagaaatttcccaggccgatcgataaagcccgcatgctggcgcaggagatgaccagcagcatgttgccggcgatcatggatgcattgcaggtcgagcagaagcactacaccttccctcttaaccgacgctatcaggatcacatccattcaactgatggtctgcgtgaacttgcgaaaagctcaatggtgatgaaactgctccgcgaactcgatgctgacgggcatgatgtatccggtgccgccgcagaggtcacggccatgctcagctacattgttggtatcggtgccgtactgcgcgacatagagacgcatgctcagtacgtgatggttaaggccaagggttgctga

SEQ ID NO: 240294 - DNA, 420 bp, Klebsiella pneumoniae
atgcttatcagctatatcaaggtcatggatggctctgagatacttattcccaccagtgtaaggtttcattgcccgtataatggaaacgatgtcctgtccagcccttcctatctttctcttaacaattgcgtcctcaagttcattgggtccggaagcgaacgggaaatagacacctttggtactaccacccgctcgcctgacaagatcgcacgccagcaaatcaagagcggcccgcaggttgtggatgacgtctccgatgtagcaggatatgtcttcatggatttcttctttgactcggataacgtagttgtactgaaactcattcccctcaatgacgactttgaccggatttttccgtataaaagaatcgatctcgttattaaggtcacggatgtggcgtttcgctctctcgatttttaa

SEQ ID NO: 240295 - DNA, 132 bp, Klebsiella pneumoniae
atgttgcttggacactggaacggttgcaaagatattcctgatccatacaaaaaaagcgatgaggcttttgactcagtatttaaattaattgaacagtcttgcaattactggattagtaagcttgcaagttaa

SEQ ID NO: 240296 - DNA, 2157 bp, Klebsiella pneumoniae
atgacatcagaattaactagcaaaacaacaaactcgaatactgatgaaatcgatttaggacgtctgttcggtgaattaattgactacagaaaactgatcgtttcaatcactacagggttcaccgctttagctgtattatatacattacttgctacgccgatatatcaagcaaacgctttgattcaggtagagcaaaaacaagggaatgctattttaaacagtttaagtcaaatgatcaccgggagtcagccgcaatcagaaccagagattgctttgttacagtctcgaatgattttaggtaaaacagtagatgatcttaatctccaaacaaaagttgagcaggagtattttcctataattggtcgggggcttgccagattgttgggtaagaaagaaggagaattaaatatttctcatctttatatacctaccattgacagtaatactcctgtaataaaacttacagttattgataaaaatagctttagtattaatagtgatctcggtaatgctaaaggtaaagttaaggaagttcttgattttaaagggctttcattactggttgacaatattgatgctgcccccggaacaacattcaaaatatcctatatttcaaaattaaaagcaatatctaatatacaaggtgttttctctgttttggatcaagggaaagatacaggaatgctcaatctaacaatgttagatgcaagtcctattatggcaacgaatatattagatagcattagccaaaattatcttgctcaaaatgttgaacgacaggctgcgcagaatgcaaaaagtttagagtttttagctcagcaattaccgaaggttcgtagtgacttagataatgctgaagggaaactgaatgattacaggaaacagcaagattctgtcgatttgacgatggaggcaaaagcagtactcgatcagatagtaaatgtggataatcaacttaatcaattgacatttaaagaagcggagatatcgcagttatatacaaaagagcatccaacatataaagctctaattgaaaaaagacagactttacagaaggaaagagaaaggctgaataaaaaagtaagttctatgccgtcaacccaacaagaagtgctgcgtttgagccgagatgttgagtctggtcgtgcggtttatatgcagcttctaaatagacaacaagaacttaacatcgctaaatcaagtgcaataggttatgttcgaattatagataatgccgtaacggatcctttaccagtgaagccaatgaagttggtaattgtaattgcaggttttatctttggcattcttatctcaattggtattgtgttgcttaaaatatttttccgccgtggtgtggaagcaccggagcaacttgaagaggttgggattaatatctatgcaagtataccaacatcggaatggttagctaaggaaggtaagaaattaaataaaaataaaaagacacgagaagaagtgcttttagcgctagagaatccggcagacttagcaattgaagcaatccgaagcctccggactagtctacatttcgcgatgatggaagccaaaaataatattttaatgatttctggcgctagtccaaatgcaggaaagacttttgtaagtagtaatcttgcgtcgataattgctcagactggaaaaaaggtactatttatcgatgctgatatgcgtaaaggatacatacataaagtttttggaaattcaaacgaacatgggctctctgatgttctttctgggaaagctcctctggaaaatgtaataacaagtgttcctgctgctggtttcgatttcatgcctagagggcaaattccaccaaatccagcagagttgttaatgcattcgcgttgtgaaaatttattaaacaaagtttctaagttatatgatttgattataattgatactccgccaatattagctgtaacggatgcggcgattatcgggcgatatgctggtactgcattgttagttgctcgatttgaacaagatacagtgaagtcggtcacagttagtatcaaacgtttcgagcaatcaggaactgtagttaagggatgtatacttaatggcatagtcaagaaagctagtagtcattatggttatgggtataatcattacggctactcatactctgaaaaaaaataa

SEQ ID NO: 240297 - DNA, 1068 bp, Klebsiella pneumoniae
atgctgtcgcttggcacgtatccgcttacctctcttaccgaagccagacaaaagcgggatgaagccaaaaagctggtggccgcgggtatcaaccccagcgatgtgcgcaagagggataagcaggaccggcagaacgaaatcagcaatacctttgaggctatcgcccgcgaatggtacgagaagcgtatcgaccggtggtccgtctcatattcggaggaaatgctaaagacgtttgagactgatgttttcccgtatatcggcggccgccctatcgcagacattaaaccgatggagttaatgggagttctgtcccgcttggacgagcgaggggcaacggaaaaactgcggaaagtacggcagcgctgcggcgaggtctggcgctatgccatcgtcacaggccgggcggagtataaccccgcgccggatctggccagtgcgttttctccccataaaaaagagcattacgcctttttgaagaccgaggaattgccgggatttttcagaacgctcaacacatacagcggcagtattgtggtaaagctggcgatgcgcctgcaggttcttaccggattgcgccccggtgaactcaggcaaggggagtggtcagagatagactttgataaacgcatatgggaagtgccaccagccagaatgaaaaagcggcgcccgcattgcgtgccgttatcagatcaggctattgccattctggagcagctaaagccgattaccggccaagatattttcatattccccgggcgtatccatcacagcaaacccatgagtgaaatggctatgaacgtgctgatccgccggataggctacgcaggtcgcgttaccggacacggattccgccacaccatgagtaccattctgcatgagcagggttacaacaccgcctggattgaaacccaactggcgcacgttgataagaactccatccgcggtacctacaaccacgctcagtatctggacggtcggcgggaaatgctccagtggtatgccgactatatggcggctctggagaatggtgaaaatgtggtgcatggctcgttcgggaaacgtgcttga

SEQ ID NO: 240298 - DNA, 759 bp, Klebsiella pneumoniae
atggtcgtgtctgtcgcgcagttattggcagagaaaaatagtgttatttctttctcggatacagtttccttcatattagaagacaatgactttttaaattttcatgatgttgttcagtttatttataggaatttcaatcttgtaagtgatgatgtttctaatagcttggcaagttgttcttacgatagaattaaaggagtgtctgagtctgatgagattgcagccgaaagcctcgagacattagagtacttgatatcatcaaactggatatcaggtatagataatgaagggcaaggtggatatttttctatttataataacgaagggtatgaaaatggttcgcgtaaggatttcttctttcgtaagaatgaattgattcatgtgcttacttctgccgggattgcattcaggtttgatgaacaacttgataatgaaaatgaagcagaaggcagtgtgcaggaatttgaaaagagaattaaaatattatcagatgaaaatacaatattaaaaagcgaacttgatgaactaaggcatgataagcccaaatatcttggtgtatttagaggcgatgatccattattaattgctatcaacataagaaatgttgagtgggcatcatttgatgagaatgatgctcgagtcacgacgccatctgcagattatgtaattgagaaactgaaggagcaatatggaatgtcacatgcgcttgctagtgccattgaaagagttgcctgcccaatagttagaaagtcttcttag

SEQ ID NO: 240299 - DNA, 147 bp, Klebsiella pneumoniae
atgcacgcatcaatggttcatgtctgggagtatctgacacgttgtggtcataaattcctatggctaaaaattaaccctctacctccaggatataccggttcggtatacagagcgcagtttgaaatttacagcggctttgttgaataa

SEQ ID NO: 240300 - DNA, 663 bp, Klebsiella pneumoniae
gtgtccgggcatctcaataatgtacttaaagacaacgtggtggtcgccgtcgggcagggccgcaacgtcgccgccgtggcggaattttccggaaccatccaggcccgggattgtcgtttcatttgcggaataggcggcacccatcgccccggggacgtcattaacgccgaccatatcagccgtctgctggcaaaaaaattcggcggcagcagcgaatcgctctacgcccctgcttatgtcgaaaacatgcagttaaaagagctgctgctgcacaacggcaccatcaagcagacgctggatcgcgcacgtaaagcagatattgcgctggtgggtatcggggatatgaacgaagaaagctatatggtgaagctggggtggtttacgccgcaggagatcaacgaggccagcctgaaccagggcgttatcggcgacatcgccggatatgatttctttaacgcccggggcgaacatgtcaataccgttatggacaaccgggttatcggcatcagtctggaagagctgaagcagatcccctgcgtgatcgccatcgcctcggaaaacactaaagcaatggcgattatgggggcgctgcgcactggcgctatcgatattatcgccaccagcgcgaggaatatccgcaccatcctgaacatcagccagtaa

SEQ ID NO: 240301 - DNA, 759 bp, Klebsiella pneumoniae
atgaaactaaaaggtagagtcgcggtgattaccggcgccggcccgggaaatggaattggccgcgccattgccctgacttttgctaaacatggggcgcagctggcgattaattattttggtaacacacctcatgtcaaagacgctatccagcatgaaatggcggattatggtgacgatgccattgcggtggagggggatatttcccgggaagagaccgcccgccagttaattgaaaagacgctggccgctttcggacgcatcgatattctggttaataatgccggcatctccaccccggcgctgttaaaagatatgacggcggaaaactgggatcgcatgattgccgtcaatttaagaagcgtatttttaacctcacattatgccgtgccgtcgatgattgaacagggtttcggccgtattattaatatctcttcccaggtagcccagaaaggcagcgtcgagcattgccattatgcggcggcaaaggcgggaattatcgcctttaccaaatctgccgccctggagcttggccggtatggcattaccgccaactgcatcgcccccggcccggtacagacgcagctaatgggcgaagtcagcgatgaatggcgcactaataagctaaaagaactggttattccgcgttttggccatcccgatgaaattgcgccaacggcgctgtttttagcctccagtccggatggtaatctttataccggccagacattagggccgaactgcggcgatgtgatgctgtag

SEQ ID NO: 240302 - DNA, 1491 bp, Klebsiella pneumoniae
atgagtgaattaaataatacgttaaaggatagcggcgcccccaccgtcgccggctttgaccctgcgctttataacgccgaccttgcgcccatgcagggtaaaaataaaaactggacgtggtggtcctattgcgccatctggatgggcatcgttcataacctggtggcctggcaggtggcggccaatctgattgcccagggcatgagtttctggcaggcattttgttgcgtctcgctggcctatggtatcgcctttctggcaatcgtcattaacagctatgccggcgcaaaatatggcgtgccgtttccggtgttaattcgcgccgcgttcggcaccagaggcgcctgcattccggtattcctgcgcgccgtgctgggggttttctggttcggcgtgcatatgtatctcggcagcatggcggttaacgccattctcggcgccgctttcgccgcctgggagcagcttggccgctaccccctgctcggcatgccgttaaataactttatcgcctatgtcatcacctggctgctgcatgcctggattattacccataatattgagcgggtcaggaaatttgagacctgggccggcccgctgattatgctggtggggctgggcctggtgggctgggcggcgaataaagcggatggcttcggcaatttgctctccctgccgggcaccctgagcggcgcccacttctggctgaccttctttatcggtatgtcatccctgttgggcaccgtcgccaccctgatcctgaatatttccgatttaacccgtttttcccgcagccagaaagatcacctgattggccagggcatcggtatgccggtcatgttcgcggttttttcagccatggcgctattaaccaccgccgggacgctgattgctttcgataaaccgttaaccaatccaatcgaggtcctgatgcagtttgaccatccattggtcgttattatcggcgccgcctctattctgatctccaccctgtcggtcaacgtcgggaccaacggcgtcgccgtcggctacgacctgaccagcctgctgccgaaggtgcttaatttcagtaaatcagcgctgatcgccattattatcggcgccctctccgccccctggctctggtatcgcgaagggggctcgtttgagatggtaatgggggccatcggcgccaccatggggccggtgctcggcattatgctggccgatttttatatcgtcaggaaaagaaactatgacgtaaacagcctgttccgccatagcggccggtatgggcagtggaatagctatgccgtcattgccttcctgctcggtattgtctctgcctttatcggcctgttcacgccttcgctcaccatcctgtacagctttaactggtttattggcgtcggcgtggcgggtatcgcctatctgttaatgatgacgctgagcaaaaaccgcgtgtccattgccggacaactcatagccactgagagcgtagccaatgataaatga

SEQ ID NO: 240303 - DNA, 1245 bp, Klebsiella pneumoniae
atgataaatgaagcaagattagcgcaacgaattgaacaactggcattaattggtaaaacccccgaagggggcgtgacgcgtatcgcgctgaccgaaacctatcgccaggggctggaattagtcagcgcatggatgcatcaggccgggatgaccacccggctggatcaggccggtaacttaatcggccggctggaggggagcttagccggtcagccagcgattgccattggttcgcacattgattcggtcggcaacggcggcaaatatgacggggttatcggcgtgctcggcggcattgaggtggcgcagcatattcatgaagcgcagattgccctgcaacgaccgctggaggtgatcgcattttgtgaagaagagggctcccgctttcagtccgggggggtgttcggcagccgggcgatggccggcaaaatcggtgccgacgatttagcggtgcgggacgccgccggcgcgacccgttatcaggtgctgaaggggtttggccttgatgtggataatatcgcgcaggcggtacgaacccgcaatgatattcagctctacctggagatgcatattgagcaggggcccattctggcgcaggccggcgtgccggtgggcctggtgaccggtattaccggcctgtcgctgaccgaggtgatcttcgaaggcgaagggaatcacgtcggcgcgactccgatgtcgatgcgtaaggacgccctgctgggcgcctgcgaaattgccctggcggtagaggagatcgtgaataagtatggcggcacggcggtaggcaccgcggccaccatggatattttacccggccaggtcaatattatcgccggcagaagcgcgacggttatcgatgtccgggatatcgaccttacgcgccgggagcatattttgcaggcgctggcgcagagggcccaggccatcgccgaaacccgcgggctgaacgtccggtttaacacccgactgaaggccaatccggcgatgacggcggatcacgtcctcgcctgcatgaggcgggagagccagcgcctggggctacaggtaatggaactgccgagcggcggcggccatgacgcccagctgatggccgaattcacccatatgggcatgatattcgtgcgctcggaaaacggcagccacaatccgcaggagtatgcctccccccaggatatcgccagcggaacccgcctgctggcgcaggtcgccctgcattatctgaataaagaggagccagcatcgtga

SEQ ID NO: 240304 - DNA, 1386 bp, Klebsiella pneumoniae
gtgagcaccatcatcaaaaatggtaccgtcgtgaccccttccgataccttcaacgcggatgttaaaattgtcgacggcacgatctccgccattgcacaatgcatcgcggtaacggaaaacgacagggttatcgacgccagcggccagtatctgtttcccggcggcatcgatccccatgcccatctggccattaacggcaccgttgatgactttaacagcggtacccgggcggcggcggcgggcggtattaccaccgtgattaactttaccgaccccgacaggcaccagccctcctttctggaaaaccttaatcaatggaagcaaaaggcgcaaagttcgctgattgattacagttttcattcgattattaaccgctgcgacgacggggtgctggaggagatcgcccgcttgcccgacgagggggtgacctccatcaagctgtttatggcctatcgcggcagcgtgatggttaacgaccagcagatgtatcgtttaatggaggcggccgccagggccgggatggtcaccaatattcatgcggaaaacggcgacgtgattgacgaactgattcaccacgccgtccggaacgggcaaaccgcccccctctaccacgccattacccgtccggccgcgctggaagcggaggcgaccagccgggcgctgcgcattgccgaggtgcttgacgcgccggtttacatcgtccatgtcacctgcgaggcggcaatggacgaggtggcgcgggccaaaaaacgcggcgtcagggcatggggggaaacctgtccgcactatctggtgctggatgatacctgtctgaaaaaagagaatcgcgaggcggtaaaatatatctgttcgccgccgctcagaaccccgcacgaccagcaggcgctgtggaagggactggcggaagggacgctctccaccgtcggttcggatcatgcctcccatccttaccacaacggtaagttacggggcgaatttgatttcaccaaagcgccgaacggcttgcccggcatcgagaacggtttttcactgctgtaccacttcggggtcgccgaaggacgcttgtccctgcaacagtttgtcggggccaccagccataacgcggcgaaaatcttcggcttatacccgcgcaaaggcgccctgcaggtgggttccgacgccgatatcgtgatcctcgatcccgcccggcgctggaccattcgccaggataaacagtggcagcggacggaatataacgtctatgagggcaccgaactgagcggacagattacccatgtgctgtcccggggcgaggttatcgttaaagagaacgacatcgtgggcagatcgggacggggtcagttcgtggcgcgcagccgctacggcgcagcggagagttcaggctga

SEQ ID NO: 240305 - DNA, 714 bp, Klebsiella pneumoniae
atggcaaagtatgacgttgaaaaggagctggttgcgctgagcctgcttgacggcgcggccgcgccggttggcgcctttcgtttggttgaggcttttaaggagcacggcatcggcatgagtgaagccaccgccggccgttttctgcgtcagatggatgagcaggggtatacggaaaccttaaccaagcgcgggcggatcctgacctcctgcggttatcaacgtttagacgagctgcgcctgcgcaaaaaaacctcgctgtacagtgaaaaggttacccgcgccgccaggcccgaggggcgggaggatctcattgagctgctctattttcgccgcgccattgaatcccaggccgcctggcttgccgcgacaagggccacggaagaggagatcaaacagcttcaccattccgcccacacccatctgcactgcgcggaatccgatcaccggggccaggcggcgcagaatttccatgtgctggtgggcaaggcctcccataaccgcatgatttccgtcatggtcgaactgttttacgagccgggttacggttcgctttcgatgctgctggaccggtcgctggcggggagcctaaagctgatagcccaggatcatctgcagctggcgaaggtgattgaggagcgaaacgcgcagcaggctgaagccatcatgcgggaacactttgataagtttatcgacgcggtgtcccgggcccgctaa

SEQ ID NO: 240306 - DNA, 894 bp, Klebsiella pneumoniae
atgtctgaaagagatcttattggctatggcgccaacccgccacatccgcgctggccgaacgacagccgcattgccgtgcagtttgtgattaactatgaggaaggcggcgagcgatcggtgctgtacggcgatcgcgaatctgaagcgttcctgaccgaagagccgacccgtgaattcagtaatattcgaaatctgaacgtagagtcccagtatgaatacggcagccgcagcggtttctggcgcctgcaccgtctttttaccgagcggcagctgccggtaaccgtgtatggcatcgcccaggcgctggccacccatcccgaagcggtggcggcaatgcgcgaggcgcagtgggagatagccagccacggcttacgctggataaactatgccgagatgccggaacaggaggagcggcggcatattgcccgggcggtgaaattacatactgaggtcacaggcgaagcgccgctgggctggtataccggcaggatgagcgtgaacagccgccggctgattgtcgagcagggcgggttcctttacgattccgactcctttgcggacgatttgccttactgggaaatcgtgcaggggcatcgccatctggtgatcccctataccctcgataataacgatggccgctatgtcaacagctatggttttcaggcgcctaacttttccgattacctgattcaggcgttcgatctgctgtatcaggagggcaaacagcagccgaaaatgatgagcattggcctgcatacccgcatcagcggcaaaccgggacgggccgccgacctggcgcgtttcctcgactacgtctgcgcccggcccggcgtctgggtgacgcgacgggtggatatcgcgcgccactggcaccggcatttttcaggcgactaa

SEQ ID NO: 240307 - DNA, 360 bp, Klebsiella pneumoniae
atgttgaaacgttaccagaccagtaaacgaatgagcgcgatggttgagtacagcgctaacgccacggtggtttgcctctccggtcaggtgcccgatgacctgaccgacagcgtaaccgtccagacccggaacgtgctggaaaaaatcgacggcctccttgccgaggccggttgtcaaaaagagcagctgattagcgcgcagatatggctgaccgatattaccaaattcgatgagatgaacgcggtctgggacagctgggtgccggaagggcatgcgccggcgcgggcctgcgtcgaaacccgcctggcccggcctgagctgcaggttgaaattcaggtgacctgtctgaaagaggcgtaa

SEQ ID NO: 240308 - DNA, 1020 bp, Klebsiella pneumoniae
atgaaaattatgatcaccgggttgtgcggttttgtaatgagtatgctggcaaaagagatcctgacgaaatatgcgcaggcggagatcgtcggcatcgatatcgccggacccgatgaaactgccgccaggctgtttgcggaccaccgtcaccgtctcaccctgctacaggccgatatcaccgacgcgcaggccatcaataccttattcgaccaggtgaagcctgattaccttatccacggcgccacggtgacgcacgttgatgcctgggagcgggagcagcccgggcgctttatcaccgttaacaccctgggtacgctgaatctgttgcaggccgcggtggcgtgccgttcggtcaaaaaggcgctctatatcagcagcgccgcggtatacggcggccggggcccggagaccccggaggggctacagccggaaagcggaccgttttatcccgatgagctgtacggcatcagtaaattcgccgccgaacagatctgccagcgctttatgcaactgcacgggctccccgtcgccatcgtcagaatgaccaaagtctttggcgcgatggagcggcccacttccgcccgcgcctcgatgtccatcccctaccggttaatgcaggcggcgctgcgccagaagccggtgacgatttctcaacgcagcgcacacgccctgagcgactggattagcgttgacgatgtggcccgggcgctggtgcgcctcttccccgtcgaggcgccgacgggggtttataacctggcctccggccaggggacgccgctctccacgctggtggcgcagtttccggttgaaattcgctggaccggcgagggggaagcggatatcgacagcgatccgaacgagcgctatggcaagaacggctgctatgacatcgggcgccttacctcggcgattgactggcgaccgcagcctgtcgaggagcagtgcgcgcaatatatacagtgggcgagggaaaacccggccgcctttatttcagcagatgaaaaacagaggagtcaataa

SEQ ID NO: 240309 - DNA, 879 bp, Klebsiella pneumoniae
atgcataacgataacgtcatttcattaaccggggtggagcatacgtatccgggggaggtgcgcgcgctgaataagctggatttccatatccggcgcggcgagttcatctccattattggtaaaaacggctcgggtaaatcgaccatcgttaaacattttaacggcatgctgcaccccaccagcccccaggggcaggtcgagatcctgacgcgctcgggagaacggctcaatacccgcaaactgccgctgtatcgcatcgcccgacatgtgggctacgtatttcagaatcccgaccggcaaatctttcacgacagctgcgcggccgagcttgagttcgggctggcgaatctcgcggtggcgaaggagagccgcgccgggcttatcgccgccatgctggagcaggtcgggctggggggttatcagcaacgtaacccggcgcacttaagccgcggcgagcggcagaggctggccattgccgccatcctggtgatggcgccggaggtggttatcgtcgatgagcccaccaccggccaggatcatagcgaatcgcggctgatcctcgacgtgctgaaacagtacaacgccgccggcaacacggtgatcatcatttcgcacgatatggcgctggtggcgaagtacgccagccgcattgtcgccatgcgcagcggcagcgtgctggccgatggcacgcccgaagcagttttctcccgcgtcgaggtgctggaaaccaccaacgtcaggccgccgcagatcgcgcagttcggtctggcgataggggaacccggcctgctgacggtggataaagcggtcgcgcgctgcgcggcgatcctgaccgccgctgaagctggcgaccctttccccctgcgtaaaaaagcctga

SEQ ID NO: 240310 - DNA, 885 bp, Klebsiella pneumoniae
atggataaggtgatagaagtgcgcgacctggcgctgcgttttcacggcgcggaaacgcgcgcccttaacgaggtctcatttacggtacgcaggggcgaggtgctgggcgttgttggggccaccggcgcgggaaaatccaccctcttaaaggtgctgtccggggtgattccgtttcatgaaaaggaggcggcttacaagggggaggtgaggctgttcggccgggaagtgcgcgagtacgccagcctgacggacgtcagcgcccgggtcgggctggtgctgcaggatcctgaagttcagttggttaacaccctggtgcgggaggagctggcgtggggcatggagaaccgcggtttcgcgctggaaaaaatcgccgcgcagatggcccgcgccgccgccctgtttgatattgagccgctgctcgaccgctttacccatgcgttatccggcggcgagaagcagcgggtggtggtggcctcggtgttttgcctgaatccggaaatcatcctgctggacgaaccgacctcggagctggatcccgccggtacggagagcgtgatgaacgccattcgtattctggcggatgagggggtcacggttatcgtggtcgaacacaaaatcgaggagctggcggagtatgccgatcggctgctggtgctggatgggggcaatgttgccgcgttgggcaagccggccgacgtctgcattggcgaatttcagcgcggcaacccgaactactgtccggaagtgctggcgttcagcctgcagatggccgcgcgccatctctggccggcgcagcggctggcgatgacggtcgccgaagcgtccggtatctggcgggagctaaacgcgccgtggggcgaggcgggaggggaagagaatgcataa

SEQ ID NO: 240311 - DNA, 813 bp, Klebsiella pneumoniae
atgagcggctcaatgttatataaaccaggcgactcttttttacaccgggctgacccacggtctaaattcattgcgttactggctattttaattctggcattaagtaccacacggacggaaattttattactgacctttttcgtcaccgtgattgcgctgcgtctgctggcgaaaaccccgttcagcgcttatatgcgcgtggtgctgtttattttgccgctgattattatcctggtggtattgcagggcatagtacagcctggcgcgccgcttatcaccctggggggagtgaccctcagcgcgcagggggtgcagctgggactggcgttaggcctgcgcctgctgaccatgggggtctgtttcctgggcttttccgccaccaccagtcccggggaggtggcgctggcggtgcacagcgcgggcgtgccctatcgctacgcctacctgaccagcttcgctttccgctttttgccgctgatgcaggaggaggccggcgtgctattgaaggcgatgtcggtcagggcctgcgctgacgtcagctctcgtaatcccctgcgccggggcagcgccatcgtcagaatgattgtgcctatccttatcggcgccatgcggcgcagcgcggatatcgccctctccatggagctgcgtggatatggcttagggacccggcgcacgtttgttcgtaccctcaggctgcggggcagcgatgtggcgctgatgcttatggcgataattttcgtcgccgccatgctgtggatacagcatcagggggtgacgctttttccactgacgggggcggtaaggcatggataa

SEQ ID NO: 240312 - DNA, 612 bp, Klebsiella pneumoniae
atgtcatattctcgctggtcagtcctgccggactggcattttcgggtattgccgcgcgataccaaaagtattattacctgcgtctttcttggtctggcaatggctgttttattgcagataaccgaacgtatcgatttagccatcaccggcggaaccattccgattgtttccgccgtggtggtgtgtgccatatggtcgccggcggcgcttttttatggcgtgaccggcgcattaattaccgcctggattaatcccattatctctaacctgacggcctcgcaaccgatggcgccgttcctgttcttgaccaatatttcccacaccctgccgctggtgctgctgacgctgtggatcaagccgaaaatgcgcggcctgtcgctgttgcagtttctggtgattaaccagatcgccggcctgtgcgacgcggccatgtttggcatcggcaatgccattattttacatatgccgtttaaatttattctgttccagattgcggttattcagccctgttatttattaggtggtctggtctcttatctggtgctgcgccggctaattaactccgggctggtaacgacggccggggggaacaataccgttaataccatctag

SEQ ID NO: 240313 - DNA, 1245 bp, Klebsiella pneumoniae
atgagtgaatatcagcatatcgacgtgagcccgcaactggttgaagagtatattatgacgctggcgaaatatggcgcttcccatgaaaccggcgtctggcgaacggtctattccccggagtgggttgaggcgaccgaccagtatgcccggtggtgcgaagagtcaggattagccgttaagcgcgacgcggtgggaaacgtgtggggggtgctggaagggagcgaaaagggcaaatccatcgtgtcgggttcgcatatcgactcgcaaaccccgggcggtcgctatgacggcgcgctgggggcgctggcggcgctaattgcgctgcgctgtttaaagcagcagttcggccagccgaagcgaacgctggaagccatcgccttttgcgaagaggagtcgagccgtttcccggcggccaacttctggggatcccgggccattaccggccgcatcaggccggaagatgtcgacaatattatcggctttgacggcaaatccatcggcgaagccatgcgcgatatcggcctcgatccggcgcgcataccggaggccaaacgcgatgatattgataccttcattgaactgcatatcgagcaggggcccattctggagcaggccgggctgccggtcggcatcgtcaccgcggtaaccggcattcgccactacgaggttgagctgcggggtacccagaaccacgccggcgccttcccgatggatctgcgccgggatccgatgcaggggtttgcggagatcgccagcggcgtggtcaataccgcccaccgctggggacgtccggcggtaaccacggtaggcagggttaacgtcagccctaacgccacggcggtgatccccgacagggtggtgtttacggtggatgcccgtcatcccgatcccgccagcgcggaaaaactgtatgccacccatgaagagatgatgcgggaagtggcgcagcgccgtaatctcgatatcagctggcaggtacagattaaccatattccgtgcctcagcgcgccgaccctgattaaaaccctgaaggaagcggcggatcatcagcaaattcctaccatgactatggcgagcggggcgggccacgatacgcaacaaatggccgctattgccgatgtggcgatggtgttcgtaaaaagtaaggatggccgcagccataccccggatgagttttcctccatcgaggatatcgttcagggaataaaagtgctggccggtgcgttatataaacttgcctggtaa

SEQ ID NO: 240314 - DNA, 651 bp, Klebsiella pneumoniae
atgacgcgcggcgaagcgatccgcaccgggcgtttctggtatcttgccatcggcgcgctgctggtctccgccgcgaccattggcgcctcggtgcatatgatagccctgttcagcgatcgtcacatgccgggctggttgattacccagataccggtggtgttcggcgtgggcgggctgtgcgggcgtttttgtaccgggctggtcgtcgatcgcctgcatgcaaggctggtcgccttcgttaccttcagcgccagcggcgcggcattactggcgctggcgctcttcacgccggcgccgtccctgctggggctgttaccggtgttctttgtcggcctggcgtcgggttcggagagtgatttactggcgtttatggcgcgccgctattttggcgagcgggagtatggtgccatctataatcgcattctcgccatccattttatcggaccggtgatcggcccgttcagcatgggttacgttttcgatcgctttggcggctatcacatcagcctgatcgcctgcggcggcgcttgcttcctcggcgcgctgttaatgctgtttctcgggccttatcgctacctcagccacggcgacgccgcctgtatgcatgatgaagccagccccgggagcgaaggcgcgctaaaaaaagcctga

SEQ ID NO: 240315 - DNA, 300 bp, Klebsiella pneumoniae
atggctaagacagcaaaacaactgattaaacaggcgtacgaaatagccaaaactatgccaccagaacaggcagcaatcatcagggaactggctaccgtcctcgatgtgtcgaatgtagctctgcgccagacgcgcaccgaacgtgacgcccttctcgcagaggtcaaatcatgggcgaaagagtgtgatcgcctgaccgagcgacacaccaagaagcgcacaaatctgcatgttctagaagctatgcgcgatttgaaagcaatttgccccaccagcttccgtaacgtggaggctctctga

SEQ ID NO: 240316 - DNA, 249 bp, Klebsiella pneumoniae; identical to SEQ ID NO: 207716

SEQ ID NO: 240317 - DNA, 1191 bp, Klebsiella pneumoniae; identical to SEQ ID NO: 207717

SEQ ID NO: 240318 - DNA, 714 bp, Klebsiella pneumoniae; identical to SEQ ID NO: 207718

SEQ ID NO: 240319 - DNA, 564 bp, Klebsiella pneumoniae
ttgaaccggatgattactgcgggcgttatctgcgcccttctcagtggctgtgcaggctctgactttgccagcatcaacaaaaatatcagcgataccgctttcagtatcagtaaaaccctgcgtggcagtgattcggattctatggattccggcaacggtatgccggtactgacaaaagcatcaggatctggcggggaaagtgccagcaaacagttcagcgtgccggtagatatcgatacggccgccgcgcgattaaagcgccactacggctatgtgagtgcggatgaaattgaacgtattcgttcaagggatcgtaacagccgctggagtgccgctgccattgaggacgctcatccagtgtgggaatccgttccggggagctcctatcgtatgggcagcgatgtgggtgacaacgaccatatggatatcgagcttgaaaagaacggttccggtacgcgggtatatgtgacatacaaatcacccgtggcatcgcaccttaccggcagcgcattcaacaacgttgtgtctcaggtccgccaggttgcttctggtcaggcacgctaa

SEQ ID NO: 240320 - DNA, 2067 bp, Klebsiella pneumoniae; identical to SEQ ID NO: 207720

SEQ ID NO: 240321 - DNA, 483 bp, Klebsiella pneumoniae; identical to SEQ ID NO: 207721

SEQ ID NO: 240322 - DNA, 213 bp, Klebsiella pneumoniae; identical to SEQ ID NO: 207722

SEQ ID NO: 240323 - DNA, 243 bp, Klebsiella pneumoniae; identical to SEQ ID NO: 207723

SEQ ID NO: 240324 - DNA, 249 bp, Klebsiella pneumoniae; identical to SEQ ID NO: 207724

SEQ ID NO: 240325 - DNA, 648 bp, Klebsiella pneumoniae; identical to SEQ ID NO: 207725

SEQ ID NO: 240326 - DNA, 768 bp, Klebsiella pneumoniae; identical to SEQ ID NO: 207726

SEQ ID NO: 240327 - DNA, 726 bp, Klebsiella pneumoniae; identical to SEQ ID NO: 207727

SEQ ID NO: 240328 - DNA, 630 bp, Klebsiella pneumoniae; identical to SEQ ID NO: 207728

SEQ ID NO: 240329 - DNA, 507 bp, Klebsiella pneumoniae; identical to SEQ ID NO: 207729

SEQ ID NO: 240330 - DNA, 570 bp, Klebsiella pneumoniae; identical to SEQ ID NO: 207730

SEQ ID NO: 240331 - DNA, 2100 bp, Klebsiella pneumoniae; identical to SEQ ID NO: 207731

SEQ ID NO: 240332 - DNA, 774 bp, Klebsiella pneumoniae; identical to SEQ ID NO: 207732

SEQ ID NO: 240333 - DNA, 594 bp, Klebsiella pneumoniae; identical to SEQ ID NO: 207733

SEQ ID NO: 240334 - DNA, 1182 bp, Klebsiella pneumoniae; identical to SEQ ID NO: 207734

SEQ ID NO: 240335 - DNA, 3108 bp, Klebsiella pneumoniae; identical to SEQ ID NO: 207735

SEQ ID NO: 240336 - DNA, 846 bp, Klebsiella pneumoniae; identical to SEQ ID NO: 207736

SEQ ID NO: 240337 - DNA, 648 bp, Klebsiella pneumoniae; identical to SEQ ID NO: 207737

SEQ ID NO: 240338 - DNA, 858 bp, Klebsiella pneumoniae; identical to SEQ ID NO: 207738

SEQ ID NO: 240339 - DNA, 171 bp, Klebsiella pneumoniae; identical to SEQ ID NO: 207739

SEQ ID NO: 240340 - DNA, 204 bp, Klebsiella pneumoniae
gtgaccgtgaaaggcaaccgggataccatgatcaagataatcagaattgccttctatgatagttgtagggccatgtcccggaaccgggcaggacactttgtcgcctttacgggcaacaccgataccaccgaatttcatcgtatcggaagcggtcaggaccgagccgccgtgagtggttttatcgcctttgcggggttttgttga

SEQ ID NO: 240341 - DNA, 1770 bp, Klebsiella pneumoniae
atggatgatttgaccctgcgctattacgaagcagagatgcgctacctgcgtgaagccggtaaagagtttgcccgggctcatccggatcgtgcagcgatgcttaatctggataaacccggtgcccgcgatccttatgtggaacgcctgttcgaaggctttgccttcctgatgggccgtttgcgtgaaaagctggatgatgatctgccggaactgactgaagggctggtgagtctgctgtggccgcactatatgcggactatcccgtcgctggctatcgtcgagttctcccctgactggcgtagtctgcgccagtccgaaatgctggctgaaggcttctccgtgctgtcacgtcctgtcgggccgcataaaaccgcctgtcagtaccggacgacccgcgatgtgccgctacaaccgctgcaccttgcagatgctcgcctccatactgaaaccgatggccgctctgctatccgcctgcgcttcgaatgccctgaaaaagtggactggcgtaaagccgggatcgacaaggtcgccatattccttaacgcagagagtcctgtcagttcagcgctgcatctggcaatgacccggcgtgtacatgccatatatgcgcgtcatgccgggacgcatactgaacgtcatcagtttgatggctggtgcaaacccatgggctttgacgacaatgacggcctgtggaagaaagccgataccgccttcagtggttaccagctgctgctggagtatttcagcttccgtccgaagtttatgtttgttgagctgcgcggtctcgacaccatcgggctcactgcggccagcacctggtttgaaatcgacattgtgctcagtgaagcatggtcatccgatctgccttttgagacagaaaacttccggctgcactgtgcgccggtcatcaatctctttaccctggaagccgacccgctgacgcttaacccgctggaaaacgaatacctgctcaggccgctgcgtcttcaggatggacacaccgagatttatagcgtcgataacatccatggcgcggtgaagaatggcaaacacccctatgtgccattcaccagcttccgccaccggggcggtatgatgcgccacgatgcccctgagcgttatttccatacccgcgtgaaacgcggtccctctggcctgtatgacacctggttaattctcgggggacgctcgttcgaactggagcagttgtccgataaaccggagtctctctcgatgcgaataaccgggaccaacggtcagcttccgcgtaaggcactggaaagtaccctgctggacagggtggtcaaaaccggcaaggtgcccgtcagagtactgaacgtcacagcaccgacgatgccactatatcccccggcaaacgatcgttttcactggcgggtgatgagccaccttggttcaaactttctgagcatgatggataatccggaggtactgcggggcacgctagcgctctatgactggaccgacgatgaaatgaaccgccgtcggcttgaagcaatcgtcgccgtgaagcacaccctgatccgtcgttttgagaagggttttatgctccggggcgtggacattgaggtcacgctgaatatggacaatttttcaggcgagggcgacgtgaatctcttcggggaaatgctgcaccggttcttcgcgctctatgccgatattcacctctttaaccagctcacgctggtgctgcaaccgacagggaaacgactgagatggcgcgagaatcacagccagcacgtaccgggctga

SEQ ID NO: 240342 - DNA, 2322 bp, Klebsiella pneumoniae
atggataactggtcagcgcttttcgacggacagagccgctatgttctggagattaataacagcccgctcaggccggatgtcctgcgctttcgcggcagggaagccctgagcgaaccattcagctgggacatcgagttcacaacgcttcaggcgaatatccctcctgaacaggtgctgatgaagtatgcgtcgctgcggatgcgtggcggcaaaaatgtccacggcatggtgacccgcctggaatggctgtccacatcaaaagaccagtcgcactaccggctcacgctcagctcccgcctggcgctcctcgggtacacccggcagtgcgccgtatttcagaaccagtccgtcccggaggtggtggagcaggtgctgcgccagcacgggctggaaggggctgattttgagttccgccttgagcgcacatacccgccacgtgagcttatcacccagtggcgggaaacggatttgcagttcatccagcgcattctgtctgaagtgggaatttactggcgcacggagatggacgacgtgcgcggtctggatacatacatttttgccgacagccagctgaactatcagtttgatgtacgcctgccctacagcgaaccctcgggtctgtttgacggcgcggcagagtcggtctgggatgtgcggacctggcacaggattgccaccggcaccgtcgccacgcgggattacaactaccgcaccgccaccacgccgatggatgcaacggtcagcgtgcgcagtgatgcggtcaccaccggggaacactaccgctacgccgcgccgtaccgtgacgcgggcgatgacaccagtccggagccggaaaccgaatccggcgcattttatgcccgccttcaccacgagcgggagcttaacagatcggcccgtattcacctgttcagcaatgctgcacacctcactcccgggcaggtgctggagccgcagggcgacgtcattacggccctgcaagaaggcgtgatcctcacgctggtgaccttccgtggcgctcgtgattcccgtctgcacgtgtcggtatggggcctgccttacaccgaacgttactgtttccgcccggcggaaatcccgcgacctgaaatccacggcacgcttccggcgcggactgaaagccgggagaaaaatgatatttacgcgcatctggacgaacaggggcgctaccgggtcaggctggattttgaccgcagcgacagcgaaccgggctacggctacctgtggttgcggatggcgaagccttatgcgggagacacgctgggctggcatacgccgctcattgacgggaccgaagtggcgatagcgttcagcaacggtgatattgacctgccgtacatcgcgtatgcgctgcatgactcggaacatcctgaccacgtaaaccgggacaatcacacccggaacattctcagaactcccgcgaacaacaagctgcggatggaagacaaacggggtgaggaacacatcaaacttgccacggagtacggaaagacgcaactgaacacgggccatctggtgggcagccagggacaacgtcgcggccagggttctgagctgcgcaccgacgagtggggagccctgagggccgggaagggactgtttgtcagtgcggatgcgcagccgaaagcgcagggtgacgcactggatatggatgccgcgctgaaggaaatcgacaggcttaaccagcaactgcaacagctggaaatggccgcagagcaggctctggcgctgaaggcggatgttgacagtcagatagagatgtttgagcagcggctgaaaccgctcaacgaagccgtgcttttctcggccccggaaggcatggccctcaccagcggggagcatctgcaaatgacggccacgaagaatgtcgccattaatgccggggaggatatcagtgccggtgtcatgggcaacatgaccgcactggccggggagaagctggggctctttgcccggaccggacaactgagcctgaaatccggagaagggccggtagaggtccaggcccagaacgccagcctgcggctgtttgcggagaagaagctgacgctgagctcggcgagtgacatctcgtttgccgggaaaaaacgcatcacgctgattggtgggggaagttacctgcgacttgaggccgggaaggtggagtatggtacgacagcgatgtatatgcgcaaagtgaaaaggacgatggcggcgggtgcggcgagtatgccggttaaagccgtgacgggtggagggatctgcctgagctgcctgatgaaagcaacgatgaatggagacacttttgttataaggggcgagtcatga

SEQ ID NO: 240343 - DNA, 147 bp, Klebsiella pneumoniae
atggatggcgacaatcagaaaggcaccattattgtgtctactgaggaaatattcgatggaaacaataaagaacacataggtaaagctaacgacattgaaattaagcttctggatcttggcttattgccacttatgaccgagctttaa

SEQ ID NO: 240344 - DNA, 1257 bp, Klebsiella pneumoniae
atggatgcgatgttcagcgtgcgcagtaatgcggtcaccaccggggagcattatcgttacgcagcgccttatcgtgacgcgggtgacgatgccagcccggagccggaaaccgaatccggcgcgttctacgcccgtcttgatcacgagcgggagctcaacaggtcagcccgcattcatctgttcagcaatgcttccggcctgacgcccggacaggtgctggagccgcagggcgatgtcattacggccctgaaggaaggcgtcgtcctcacgctggtgactttccggggagcgcgtgattcccgtctgcacgtgtcggtgtggggcatgccttacactgaacgttactgtttccgcccggcggaaatcccgcgtccggaaattcacggcacacttccggcccggattgagagccgggaaaagaacgatatctacgctcacctggacgggcaggggcgctaccgggtgaagccggacttcgaccgggaaggaaccgaaccgggttacggctatctgtggctgcggatggcgaaaccttatgccggtgaaacgctgggctggcatacgccgctcattgacggaaccgaagtggcgattgcgtacagcaacggtgatattgacctgccgtacatcgcgtatgcgctgcacgactccgaacatcccgacctggtgaaccgggacaatcacacccgcaatgtgctgcgcaccccggcgaacaacaagctgcgaatggaagacaggcgtggtgaggaacacatcaaactcgccacggagtacggaaagacgcaactgaacacgggccatctggtggacagccagggacaacgtcgcggccagggggccgaactgcgcaccgatgagtggggcacaatccgtgccggtaaggggctgtttgtcagcgcggatgcgcaggcaaaggcgcagggtgaggcgctggacagggacgccgccctgaaagaaatcgacaggcttaaccagcaactgcaacagctggaaatggccgcagagcaggctctggcgctgaaggcggatgttgacagtcagatagagatgtttgagcagcggctgaaaccgctcaatgaagctgtgcttttctcggccccggaagggatggcgctgaccagcggggagcacccgcagatgacggccacgaaaaatgtcgccattaatgccgggggcgatatcagtgccggtgtcatgggcaatatgacggcgctggccggggaaaagctggggcctttgcccggaccggacagctga

SEQ ID NO: 240345 - DNA, 807 bp, Klebsiella pneumoniae
atggcggtgatcaatgccaaacgtgtataccgcatcatgcgtcagaatgcgctgctgcttgagcgtaaaccggaaataccgccctcgaagcgggcgcatacagggaaagtggccattggagaaagtaaccagcggtggtgctctgacggcttcgggttcagctgtgataacggtgaaaaactgcgggtcacgttcgctctggactgttgcgatcgcgaggcactttactgggcggccagtaacggtggatatgacagtgaaaccgtgcaggacgtcatgctgggtgccgtggagcgtcgtttcggtaacagcctgccgacatcccccgttgagtggctgacagacaacggttcagcctaccgttcttatcagacgcgtcagttcgccagaatggtaggactggagcctaaacatacggcggtacgtagcccggaaagcaacgggatggcagagagcttcgtgaaaacgatgaagcgcgattacatcagcatcatgccgaaacccgacgggttaacagcggtaaagaaccttgcggaggccttcgaacattacaacgaatggcatccgcatagtgcgctggggtatcgttcgccacgggaatatctgcggcggcgaaccagtaatgggttaagtgataaaagtgtatggaaatataggggccaatccaaaattgaatatgattttaaaagaagaaattgttttgggtatctacagctggcttcatatgactccggtcagcatgctggtaagaaacataaccagcgatcagggaggggattacgcgatcgtccgctttaccgtcgatag

SEQ ID NO: 240346 - DNA, 996 bp, Klebsiella pneumoniae
ttgaactactttgcatatattgaatcgccgctgcaagcttttaatttaatggaatatacaggctttgccaacattgaaattgacattctcattatcaataaaaaaacccttgtttcaaagaaaaactatcctcagatattatctgtgatcaaaaacatcaaaataaaaaaagttattgacattgatattgaatctggaaagggaaatgtcttaaaaatctggaagttagttaagttatatgtccctcgaaccgatgtgccttacactttaatatgtggagaatatcgctctatgatattttggtacatctgtggccgttttttaaatcgaagagtaataatgcttgatgatgggactgccacattacgtataaacagaaaaaacagaactattaagagtgcgtttcggaatcatatatatagaattcttggttttattgatgtttttttagagccaattgtatttttctcggtgtatgatattcatgcagttatatctggaaaggatagactgattgctcataagtatgatttttttaagaaaaaaatggaatcctttcctaccggggataatgttgtttatgtaataggttccccatttttagaagcaggtgtcgttaatgatgacgatataaaaaccaccttgggtatgatagaaaaattaaaatgtaagtatccaaaagtaatttatatttctcatcggcgggaaagagaagaaaaattgctggctattaataaacacgtgcttgttgaaaggttagattatccttttgaattattgccgttagtcttagggaaaaggataaaagctattgcaggattttattcctctctattcgataatatgcacataatttgtggtgatgatttggatattgaatgtttttatttgcctcaagcatctattaacccttcctggtctgcattcgtttcggatgtttataaaaattaccttgcttaccctggtcaggcgtttaaattccactcgttagtttga

SEQ ID NO: 240347 - DNA, 507 bp, Klebsiella pneumoniae
atgctgtataatataaggaaatacttacacctgttttgtaagttcttgtataagaaaagagtccaccgtaaagccatgagtgttggtcatggtttaaaaataaattttcctactaaagttactgctaaaacgatactgggaaataactttaactctaacggtttgagaatattgggttctggtatggtcacatttggtgataattttcactgtggatttggatgtgtgataattactgaaaaccataatcatatggggaatagcattccttacgactcaacttatattatcaaagatacatttattgaagataatgtttggtttggaattaatgttattgtgttaccaggtgttactattggcgagggcgctattatccaggctggaagtgtagttgtttgcgatataccagcgcttgctattgctggtggccatcccgcaaaagtcttttcctggagagataaagaacattattatagtcttaaacagcaaaaagcattccattaa

SEQ ID NO: 240348 - DNA, 921 bp, Klebsiella pneumoniae
atgaacttgacaggaagaagcccttgcccactaaaagagataaatataattaatctatcgcaccttcgaataagtcagtcatatacgcttgcttctgttgggcaattttctctttctgccctaaatgttttattcactattgtcttgttttctgtattcagtggtacagcaacatatcgtttgatagctgttactctttcttttttattagtgcaattattttactctcgttttatctattccagaatacatattgactttagtaaaaggaatgaacccgtccggcagtcgtataaagaacttatgcattatggtatgtctctgtggccacatcatggaagctactggattaaatcatcaattgatcgtttctttattgcgcattacatgaatgtatctattgttggcgtatatggtttagcactacaattagcttctatactaatgcttttttttagtgtactcaatcaggctgttcaaccttttatttatagatatcttaatgatagtaatttcatcaaagtgaaaaaaatacagtatatttatattgggtcggttatattgtgttcagttatttattacactctaatgccgattatttttccttatttatttaatgtgaaatttactggggcactaagttattttaactatttgatcccaggcacgatgtttatgtgtatttattatatttatacaaacgtgttatttttttataaaaaaaataaaataatatcttttatcacttcttgctcaatgattgtacatttattgggtgtgtttagtgttgtttttacaaatatttctgttgagatgttttgcattgtatatacagtgtcaagcgcttttgcatgcgttgcgactctttatttttgtaataagcaaattaaacttatgatggaggatgggaatgctgtataa

SEQ ID NO: 240349 - DNA, 729 bp, Klebsiella pneumoniae; identical to SEQ ID NO: 161871

SEQ ID NO: 240350 - DNA, 441 bp, Klebsiella pneumoniae; identical to SEQ ID NO: 197637

SEQ ID NO: 240351 - DNA, 450 bp, Klebsiella pneumoniae; identical to SEQ ID NO: 197636

SEQ ID NO: 240352 - DNA, 579 bp, Klebsiella pneumoniae; identical to SEQ ID NO: 197635

SEQ ID NO: 240353 - DNA, 717 bp, Klebsiella pneumoniae
atgttgatcggaccgtatgttaatggtgcggcggtaattatgggcggcctgctcggcgctctggcaagcagcgctatttcggaaagggtcaaaagctcgctgccgctgattttcgggctgtgctcggtgggccttggcattaacctggttatcaaggtgcagtttatgcccgccgtggtactggcgatgattatcggcaccgctattggcgaaatactttatgtggaacgtgggattggtaaagcggctggctccacccgctcgcttatcaacacctttcttccgccggttaagggcttaacccaggacgcgtttacagagaaatttgtggcgatcctggtgctgttttgcgccagcggcaccggtgtatttggcgcgatgcacgagggcatgaccggcgatccgtcaattctctatatcaaaacggtgctggacttcttcacctccgggattttcgccaccatgctcggtttcgcagtgatgaccattgggctaccgctgatttttatccaggtggcactggcgatgctcgcctcgctgatcctgccaatgattacgccggcgatgatggccgacttctcttgcgcaggcggtttgctgatggtggcgaccgggctgcgcatctgcaatatcaaaaccttccccgtggccaacatgctgccagcgctggtgctggtgatgccgctctcctggctgtgggcccattttattggttga

SEQ ID NO: 240354 - DNA, 609 bp, Klebsiella pneumoniae
atgaccacacaacgcattatcgtcggcatcagcggcgcatcgggttttcagtatggcgtaaaagcgctggagctgctccggggccaggggcttgaggtgcatctggtggtttcgaagggtgccgaaaagacctgtgaactggaaaccgactaccgtcttgacgacgtgctggcgatggcggatgtggttcactccatcggcaacttgggagccgcgatatccagcggctcgtttaagacgctcggcatgctggtggccccctgctccatgcgctcgcttggcagcatcgcccacagcctgacggacaacctgctgactcgcgcggcggacgtagtgttaaaagagcgtcgccgcctggtgttgatggtacgcgaaacaccgctcaacctgagccatatccgtaacatgcagtcggtgacggagatgggcggcattctcttcccgccggtccccgcgctgtatcagcggccgcagacgctggatgaaatcatcactcacagcgtgacgcgagcgctggacctgttcggtcttgacgtacgcgccattccccgctggggcgaagagggcttacctgcgcagccggagagcgttacctgtactactcgctga

SEQ ID NO: 240355 - DNA, 900 bp, Klebsiella pneumoniae
atggacttaaagcggataaagtatttttgtaaagtagtagagcatggctctatcagcgaggccgcgcgccagctcaatatggcccagccgccgctcagcaagcgtattcaggagctcgaggacgagcttggcgcgtcgcttctggtgcgcagcagttacggcgtggagatcacagccgcagggaactacttctatcatcgtgcttgccaaattctcaatcaggtggaagacgcgacccgcgaaacggtcaaaatcgcccaacgggaaaatgcctttattcgtattggtctgacgcatctttttcagtcttattttcaaccgtttattctggagttacatcgccgcaaccccggaattgaattacgtattacggtttctgattccagtaatctggagacatccttacatgacggtttattagatattgcctttattcaaaagccgcagccggatgaagccttttattgtcatgaattcccgccagtgtcgacggtagcggttattaataagaagattatgcccgaaccaccggaagagcctctgataatgtccagtctggagggattgccgttaatactaatccgtcgctacgaaggcgtgggaatatatgaaaaatttgtcggcttgctttccaaaaatggaaaataccctaatgtaatcatgcatattacgcagcctaaagcgattattgactgccttgagtctggcctcgaggctgtgtctctgcttccagcctccgaggtggacgcttctcgtctgcagcaatgtcacgttattcctctggcggattcgccgaaacttttttttcctaccatggttaaaatgtctgtggcaccagaaataaaagaaatagtcgatcttttagttaccgaattattaactgataaattaaataattaa

SEQ ID NO: 240356 - DNA, 891 bp, Klebsiella pneumoniae
gtggatgtaaaacagttgcgttattttatcgcgctggcggaagaacagcattttggacgggcggcggaacggttgcatattacgcaaccgccgctgacgcgtagcattcaggcgctggaagccagccttgatacccgtctgttcatacgaaccagcaagggcgcggccctgaccgcagccggtcagcttctgctcgaaaaagcgcgcacaattgtagagttgacccaggacgcaggcgaacaggcacgactcgcaggacagggctatctcggcaggctggaggtcgggatttttagttcgggcatctttaatgttattcctcagctactgggcgaatttcaccgggacaggcccgacgtaaaaattcgtctgcattcgatggggaaagcggaacaactagccgcgttacgtgagaaacggatcgcaatcggctttaaccgactggtgccgaaagaaccggatattgcagtggaatgggtacgacgcgagccatacattgtagcgctttatgaaggccatccgctggcgtccaaaccggttatcacactaacggacctggaagatgaaccgatgatcctttatcccaacgctccggtttacggtcttatgcaggtaattgttgatgcgtttcgccatgaaggggtgcgcttgaacgtggagcaggaggtggatgatgtaatgacggcattagcgctggtagccagtcgctttggcctgtgtattactaccgagtccgctgctaacgtgcaattgcccggtatagtttatcggccgttacattcattggaacttcagggtatcgaacttagctgtctttaccgacgagatgatgattcccctattctttctgcattcctccggctgatacgaagccgacgtcgcaatctataa

SEQ ID NO: 240357 - DNA, 216 bp, Klebsiella pneumoniae
atgcccgtaatacatatcaatctggtggaaggccgtgacagcgaacttatcaaagcctgtgtcaaagcagtcgcccatacggtatctgaaaccctcggcgcgccgcttgagacggtgcgcgtctacgcgaccctggtgcctgccgcgcactgggcggttggcggtcaaaccaaggatgaacaacagcaggcagcgacaaaaggggcgaccttatga

SEQ ID NO: 240358 - DNA, 810 bp, Klebsiella pneumoniae
atgacgccggatgaaatctatgccgcagcgggcgcgctgtacgacgcggccgaacgcggcacagccatcgccccgctgcgtgaacggtggccgacgatgtccctcgaccaggcctacgctatccagcgggtcaataccgagcggcgcatcgccgcgggcgcacggcgagtgggctgcaaaatcggcctgacatctccggtggtgcagcagcagctgggcgtggaccagccagatttcggcgtgctgttaaataccatggaatatggcgacagcgagccaattcctgccaggatactggcgcagccgaaggttgaagcagaaatcgcctttgtgctgaagcaagatctggcgatggcgcaacccggtctgctggatgtgatgcaggcaattgactacgccctgcctgctattgaaattgtcggcagccgcatcgcacaatggaatatccgccttaccgataccgttgctgataacgcctcctccagcgcttatgtgctggggacgacgccgaaacgtctggcagagtttgacctgcgcctgtgcggcatggttatgacgcggcgcggcgaacccgtctccactggtgcaggtgccgcatgccttggcaatccgctgaacgctgtggtctggctggcacgaactatggcgcatttcggtaccccattacgtgcaggcgacgtggtgctgtccggcgcgctggggccaatggtgagcgtgtcgccgggcgacatcattgaaacgcgtattcacggcttaggcaaggtgcgtgtggtattcgcacctgaaggagaaaaggaggagcgcacatga

SEQ ID NO: 240359 - DNA, 792 bp, Klebsiella pneumoniae
atgagtattcatgaactggccgagcggctggacaacgctgcccgcgaggcgcgcgagatcccgcagttcgatacgcaaaacagcctgagcctggaagaggcctacgcgattcaggcggcttccgtcgcccgtcgcgtagcgcgcggcgaacagcgcgtcggcgttaaaatgggtttcaccagccgggcgaaaatggcccagatgggactttccgatgttatctggggacggctcactgacgccatgcagatagaggaggggggcaacgtcgacagccgccgctttgtgcatccgcgctgcgaaccggagcttgcgtttattctgaaacgacccctggctggcaatatcaccgctccgcaagcgctggcggctgtggaggcaatcgctccggcgctcgaaatcattgattcccgctataaggacttccatttcacgctgccagaggtcattgccgacaacgcatcgtccagcggttttgtcattggcgcctggtgcgaccctcgtaccgacttcagcaacctcggcatgacattgaacattaacggccgtgttgcgcatgtcggttccaccgccgccctgcttggacatccgctgcgttcgctggtcgcggccgcgcggctggcagaacaggcaggcgaaccactgcaggcaggttgggtcgtgctggcgggcggggcaaccgctgcggagtggatccatccgggcgatcatgtctcggtggagatgcaaacgctcggcagcgcgggattttatctcaagggtgtgcacaacacagaggctaaccatgtctga

SEQ ID NO: 240360 - DNA, 963 bp, Klebsiella pneumoniae
atgtctgaaaaagtaaaagtcgctattatcgggcccggaaatatcggtaccgatctgatgattaaggtgatgcgcaacgcgcgtcatctggaaatgggtgcgatggttggcgtcgacccgcgttccgaaggactcgctcgcgcggcgaaatggggcattcccaccacggcggaaggaattgacggattgctgaatatggagggattcagcagtatcgatatcgtgttcgacgctacttccgccagcgcgcatcctcaccacaacgctgagctgcaaaagcatggtattcaggtagttgacctgacgccggcggccatcggcccgtatgtgatcccggcgattaacctcgacgagatagaggccagcaacatcaacatggtgacctgcggcggtcaggcgactattcccatagtggcggcagtttccagcgtcacgccggtgtactacgcggaaattgttgcgtctatcgccagccgctccgccggacctggcacccgcgccaatattgacgaatttactgaaaccacccgtcacgccattgagcaggtaggcggcgcaaggtatggcaaggccattattatccttaacccggccgagccgccgctgatgatgcgggatacggtttacctgctgactgatgaagcggatcgggacgccatccgcaccagcgtcgacgaaatggtcgcccgcgtgcagcaatatgtacccggttatcgcctgaaacagcaggtgcagttcgacgagatgagcgaggcgcagctggcaggtacaccagctgcagggctgaaacgcggccttaaggtcacggtgctgattgaggtggaaggcgccgcccattatctgcctgcgtatgctggcaatctcgacatcatgacttccgccgcgttggcgagcgcggatcgtctcgccagccgccgcatcgcggccggaatcgcccgcggcttcgaggagacgctgtcatga

SEQ ID NO: 240361 - DNA, 1017 bp, Klebsiella pneumoniae
atgactatgcataaaaaactttatctttccgatgtcacactgcgtgatggcaaccacgctgtacgccaccgctactcggtggaccaggtgcgtgctattgccagcgcgctggacagagcaggcatcgacagtatcgaagtggcccacggagatggtttgcaagggtcaagctttaactacggcttcggcgcccatagcgacagtgagtggatcgccgccgcggcggaaagcgtacagaatacacgtatcgccacgttgctgatcccgggcatcggcacactgcatgacctgcgcaacgcccgcgacgccggtgcaagcgtagtgcgcgtggcgacgcattgcaccgaggcggatgtctcccgccagcatctttcatgggcgcgcgaacagggcatggacgccgtaggttttctgatgatgagccacatgaccacgccgcagaacctggcgcagcaggcgaagctgatggaaagctacggggcgagctgcgtctacgtggtggactccggcggcgcgatgaacatgaacgatattcgcgatcgctttcgcgcgctgaaagatgcgctggatccgcagacccaaacagggatgcacgcgcaccacaatctgggtctgagcgttgccaattctgtcgtggcggtggaagaaggctgcgatcgcgttgacgccagcctggcgggcatgggcgcgggggcaggcaacgcgccgctggaagtgtttgtcgccgcgattgataaactcggctgggaccacggcgccgatctttatgcactgctcgacgcggcggacgacctggttcggccgttgcaggaccgcccggtacgcgttgaccgtgagacgctggcgctgggttacgccggggtttactccagttttctgcgacacgcggaagcggcagcgcaaaaatatggcctgaaaactgtcgatattctggtcgaactgggacgccgccgcatggtgggcggtcaggaagatatgattgtcgatgttgccctcgatctgagccggcaggcataa

SEQ ID NO: 240362 - DNA, 588 bp, Klebsiella pneumoniae
atgaacgtccttaccctacaactgcttttaaccatcagcacgctgggctacagcgccatcccggcgattttcgatagcaacgccacgcacatgacaaatccggtgtgggtgcctcacgcccgcttccatgtagtgtggcaggtgtgcagctatatcggcttcgcgctaatcgcactatggttaatctggggcgccagtttcgacggccatctgtgggtcgccgccgcgatgtccgccgcagcctacggcggctttttcgttgctgtttttacccgtcgcgcctatggcggcggcacttatgacgccaacggcgtagtaccgtggcggccgcccatactgggccgctggtgcgcctttgaagtcaacatcacgctgtttacctctaccgtgattattcttggcatggcggtaatcggcatgcttattccgcccggcgaacagagcagcccactgatttcggtgctatgggctgtaatgtacctgctgtttactctgcttatggccactgtgctgatttttgttggcgcatttatcgtcggccgtcgccagcagcttgaacctcatgaggatcgggtactggagaaatag

SEQ ID NO: 240363 - DNA, 2604 bp, Klebsiella pneumoniae
atgctgccgatggcgacgcgcaccgataaaggtattctcctggccgaagagttactggtctggctccggcagaataacgtgataatccccgcgattgaagtcgtggagcgtgcctgtgcggaggctatggcacgcggcgataaaatcgtatttcagaccctgaatgccccgttaactccggctcacagggatgccctggatagtttacttgaatcctcagataatcagccttccaggctgacatggcttctgcaaccgccgggtaaaatcaatggtaaaaacgtgctgcaacatcttgatcggctcagtagcattgaatcgctggcattacctgaaggtatagatcgtaccattcaccagaaccggttgctgaaactggcgcgggaaggccgaaagatgagtagccgggatttgacccgattttcagccccccggcgtcatgcgatcctggtgtgtgtgctggaagaagccagggccacactgacagatgaagtgattgagctgcatgaacgtatgctgaacagcctgttcagcaaagccaaaagaacacaggctgagcgccttcagcagaccgggaagctgatccagtccaaactgaggcagtacatcgatgtcggccaggcactgtctgaagctcgtgattccggtggcgatccatggctcgcaatagaaaacatactgccatggcctgaatttgtcgccagtctggaggaaacacgccatctcgccaggaaaaataattttgatccgctgcatattattaccgagaaatacagcacattacggaaatatgccccacgcatgttgtccgctttacagttagtcgcaaccccggcagcgcagcccctggctgatgcgctggttgtgatcaaggatatgtaccggaagcagtcgcgtaaagttccggcgacggcgccgcttgagtttgttcctgaaagctggcgcaaggtggtgattacgcctgcgggtattgaccgacagtactatgaattttgtgcgctcagcgagcttaagggggcgttgcgctccggggatatctgggttaaaggctcgcgccgctacaaaaattttgatgattacctcatacccgaaaaggactttgacaaactcacaccggcgctgccactgcccgtatctgctgattatcataagtacattaccagccgtatgaccctgcttcagtccagacttgaagaggtcaatgccatggctgcccttggtgaactgcccgatgtggaaatatccgacaggggcgtaaaagtctctccgctggataactgcgttccggcgcaggtttcaccgctggcagagctggtttacagcatgctaccgcgacctaaaatcacggaaattctcgatgaggtaaacagctggacgacgtttaccctacattttttacatataaaaaatgacattacccgtcccgatactcgcctgcttctcaccaccattcttgcggatggcatcaatcttggcctgaccaaaatggcagaagcctgccccggtagcaccaaatcatcactcgaagatattcaggcatggtacatccgcgacgaaacctattcagcagcccttgcagagctggtaaacgcgcaggggaaaaggccgctggcggcattctggggagacgggacaacatcatcatcagatggacagaatttcagaacaggcagctcaggccgctacgcagggcaggttaacccgaaatacgggcaggagcccggacgtcagttttatacccatatttcggatcaatacagcccgttttacacctgcataatcagtcgggtcagggattcaacccatgttctcgatggcttgctgtaccacgaaagcgacctggaaatcagggagcattacaccgataccgcaggtttcaccgatcatgtctttgccctgatgcatctgctgggatttgcgttctgtccgcggatcagggatctccacgacaaaaaactgtttatcaaagggaaagcagaccaatacccggcgcttcagtcactaatatcaacgaccagcctgaatctgaaagagatcgaaattcactggcgtgaagtgctgcgtctggccacctcgataaagcagggaactgtgacggcatccctgatgctgaaaaagcttgccagctaccccaagcaaaacggacttgccaaagcattgagggaaattggccgtattgaacgaactctgtttatgctcgactggttccgcgatccggcacttcgtcggcgggtacaggcgggactgaataaaggagaagcccgtaacgcgctggcacgtgcggtatttatgcatcgattgggagagatcagggaccgaaaaccagaaaatcagagctatcgcgccagtggactgacgctgctaacggctgcgatctcgctgtggaataccgtgtatatggaaagggcggtcgatgccctgaagcgtaaggggctgaaaatcaacgagcaactactctcccatttgtcgccgttaggctgggaacacatcaatctgacaggtgattatatctggaaaagcaaccggataccggcttccggtaagtttcgtcggctgagaccagctaaaatcgaaaggtcaaaaaacagccttaacgtacaataa

SEQ ID NO: 240364 - DNA, 144 bp, Klebsiella pneumoniae
gtggtggacttcctggttttcttccatgaatcgacgcgttcgccggagtatgtggacgtcaaaggcgtcgagacacagatgttcaagctcaagaagcggcaggtggaagctcgactgccgatcagaatcctggtcgtgaactga

SEQ ID NO: 240365 - DNA, 741 bp, Klebsiella pneumoniae
atgaaccttacatcaaatactattcttatcactggcggtgcaactggtattggctttgcgttggcacagcaactttctgatcggggaaacctcgttattatctgcgggcgaaacgaagcagcactacacaaggcacaggtagcagtgccaactttaattacgcgtgtctgcgacgttaccgatactgagagtcgccaatcaatggtcgaatggctaaaagccgaccatcctagtctcaatgttctcatcaacaatgcgggtgttcagtatcatcgtgattttaaccacgatcctgctggagaatcgattgatcaagaggtggctattaatttaactgcccccatccatctgattattgagttattgcccctcctcaagcagcaggaacaggctgccattattaatatcagttcaggccttgccttttcaccgatggcggatgttccagtttattgcgccacaaaagcagcgattcactccttcactctcagccttcgtcatcagttgaaatcgacaggtgttcgggtcgtagaaattgctccgcctatcgtcgacactggtcttggtggcggtacacgcagtgaaggaacatccaaccgcatgatggtcacaccggaagagttcgctaccgaaacgatggctcagcttgaagcaggccagaatgaagttcttgtgggcgtttcagtcgatacgcgacgcttaggcgaggctctgtttgaacgaatgaataatcgatcttaa

SEQ ID NO: 240366 - DNA, 843 bp, Klebsiella pneumoniae
atgactattttagcagtaggcgctgcgggtacgttggctggagaaatcgtgccagcgcttgttcgccgtggtgcgattgttcgtggacttgttcacagaccagagcaaatgcaattagcaaaaacgcgtggagcatcggaagtcgccattggtgatttatctgatcccactagcctagatgcggcgatggaaggagtcgagggggtttttcacatcggccctgttttcgctccagaagaggtgcaatacggcaaaaatatcattcaggcggcacagcgtgccggtgtacggaaattggtgttttcgtcggtaatacaccctgtattaaacttgcctaaccatgctgccaaggcattggtcgaagaagtgttggtcaattctgaactggaatacacgatccttcacccaaccatgttgtatcagaactatgccgcgtcgtgggatcggattgtcgaaacaggtatcttggctgaaccatggtctgctgacacccgcttcagccgcgtagattatcgcgatgttgcagacgtggcggctattgcgctaactgaggatcgtttagcatttggaaccttcgagctatgcgctcccgatattctaactcgtcatggtgtggctgaactcctgagtcaggttcttggtaagaaagttggctatgccacgcttgatcgcaacaaattgggtaatgtgccgaaggacatgcttaccatgtttgagcactatgaccatagcggcctactgggtaatcctctcactcttcgctctattcttgggcgagagccgcggacacttcgagcttatttcgaggagttggctcaggtgcgaccgggtaaggtattgtaa

SEQ ID NO: 240367 - DNA, 1644 bp, Klebsiella pneumoniae
atgattcagaatcccatatttaaaggctttaatcccgatccttgtatttgccgacgagatgatgattattatgttgccgtttcctcatttgaatggtttccggggatcccgatttatcattctcgggatttaaaaaactggcagttgctgacgcacgttttgcaggatgacaatgcccccgatctgcgtaaactgccctccgccaaagggatctgggcaccttgcttgacctggtgtgaagaggaacagttgttctatgtcatttatggcgtaatgaactccatgaatgcacgctattttgatgtcgacaattacctgattaccgccaaagaaattaccggaccgtggagtgcgcctgtctatcttcattctgccggttttgatgcgtcgatattgcatgatacggacgggcggaaatggattgtttctctggagtgggaaacccgccccggctatgaaaaaccaggcgccatttgcctggtagagtactccccggtgcagaaagcgattgtcggctttcctaagcgcgtctggaccggcggtaccgatcggggctgcatcgaagcgcctcatctgacgaaacgtggtgattactactacatgatgacggcggaaggcggcactggatatgggcattcggtcacgatggggcgggcgaaaaatgtctgggggccctatgagagcgacccgcaaaatccgattctaacgtcgtacggtgaaaattttaatgaacggcacgatgcgaaccatcttaagccacagtatttcaacccgggaacttacctgcaaaaagccgggcacggcagttacgttgaaaccccgcagggggaagtctggctggttcatctgtgtagccggccgtttcgcgaagagcgacgctgcacccttggtcgggaaaccgctatccagcagatgtactggacgcaggataactggctaaggttaaaaggcgggggcaatattgcccggcatgaggttaacgcatcgaccttagcgcccatcccgtttgcgacggatgagccgacggatcatttcgatagggcgcaactggataacgcttattacgcaccgcgcattgattattgccgcttcgcctcgctgaacatacgcgacagccacgtcacactgcgggggcaggagtcgttaagttcgaccaatagggtgagcctgctggcgaagaaactgacctcggtctattgcaccattaccactaaactcgacttttcccctcaggtctaccaacacagtgctggcttagtgctgtattacgacaacatgaattatctttacctgctgaaaacctgggatgcattaacagaagagcccgtgttgtctgtaattcatatggataacggccagcggcatgacattgtgcagcctgtcaggtcaggtggcgaaccggtctttctccagatgcgcattgaaggccgagatatcacctgttactggtcactgggggatggtgattatcagactattggcgaacgatatgatacgacgaaactctccgatgaatacagccagtatggggaatttaccggtgcatttttcgggctggcctgcgtggatgcgatgctccaccaacatgaagctcattttgattttttacgctatgaggcagatgaggcgcgcctgattgattaa

SEQ ID NO: 240368 - DNA, 1602 bp, Klebsiella pneumoniae
atggccgctatcactaatcctattattcctggctttaacccggacccgtcaattattcgcgttggcgagatttattatatggccacctcgacattcgaatggtttccgggggtaagtctgtacagatcccgcgacctgaaaaactggcagcggatagcctatccgttaaaccgcagcagccagctcgacatgatcggtaacccggattctggcggcgtttatgctccttgcctgagttatcacgacggacgcttttacctgatttttagcgatgtcaaaaatgtcgccgggcgcttctgggatgcaaacaattacctggtcacaaccgacgacattgagggtgaatggtccgaacccacctacctccacagtcgtggtattgatccgtcattgtttcaccatagcgatgggacgaagtggctggtgagcatggagatgagccacctggaaggtgggaagccgggcttccccaaatggaacggtatcatcatccagcagtatgacgccaaggaaaacaggctggtgggggagtgcaggaaaatctacgcgggcagtgcgctggggaccaccgaagggccgcatatttaccaacgcgatggctggttttatctgatgacggctgaagggggcaccttctacaaccacggcgtgaccatggcccgctcgcgcactctcttcgggccttacgaaacggaccctatcgggcagatgatgaccgcgcgttacgactgccgtttgccgctacagcgtgtgggccatgcggatctgtttgaaaataccctcggcgaggcgttcattgtgcacctgtgtggcagaccgctggcgacaagagggcgcagtcctatggggcgcgagaccgccattcagcgggtatactggaatgaagagggctggttacggcttatcaatgagaagacgacgccggaaagcgtggtccacacccgtctggaagaacatccgtggcccgcactaccggctaaagacgattttgatgccccgatgctgccgctgcattaccagtcgctacgcattccgctcggcgaagagatgtgttcgcttagtgaaagaaagggctggctgcgcctgcgtggccgtgagtcgctcagctcacgccattaccagagcctactggcccggcggcagacggattttgcctataccgcacaaacctgcgtggatttttctccgcgtgcgttccagcaaatggccgggctggtctgcttttatgacacgaccaattacctgtatttgaatatctcctgcgatgaggaagggcagcggaccgtcaacctgatggtcaacgacctgaacaaattcaccatggtcaccggcgacggtatccgtattgcccgtgaagggctggtgtatctcaaggtgtgtgtgaagggcgatgcagcgtggttttactattcgctggatgaaaccgagtggttccctgtcggggggtatgtggagtacagcaaactgtccgacgaatactttaaagaacgcggcattgagcgtttcaccggagcttttgtgggcatgtgttgccaggatttaactggcgaacaggcttatgcagacttcgattatttctcttattcggcagacccatactaa

SEQ ID NO: 240369 - DNA, 1356 bp, Klebsiella pneumoniae
atgaataaagcagggtttaaagaaaaggtaggctatggcctgggagatggtgcctccaatatcatctggcaaaccatcatgctttttatggcttatttttataccgatgtgtatggcctcagcgcttttcatatggggactatgtttcttgtggttcgcatttttgatgcctttgctgatgtttatgccggttatttagccgaccatacgcaaacaaaacacggccagtttcgcccttacttactctggttttccctgccgtttggtatttttggtgcgttaacgttttataccccggacttcggggaaacaggcaaaattatctatgcttacgtctcctacaccacgctgtcgcttttttactcgctggttaacgttccctactgcgcgatgattaacaacctctcccaagatgcgaaagagagggtatcaatgcagtcataccgcttcgcctttgccgcactgggcgggattatcgtctcggccgtggcgctgccgctgactaaagtgctgggcaatggcgatctgcaaaagggctatttctacggcatgatcctgatgggcgggctgagcaccattatgttcctgatgtgctttgcgatgaccaaagagcgctacgttaaagagattgataaaacgcagaaatttatcggcatctataaagagctcaatattctgctgaaagatcaaaactggcgctgcatctttagccttaacgtcgtcaacctgattgccggcatattaaaaaccggcggggcgatgtacttcgtgaattattatttgcatcgcccggatctggtcagcgtggtgctttcgataatcctcggcgcaaaatttatcggttcgatgttcaccaccacattgtacggaaaactcgaccgtttactggcctacaaagtggcgatgacggtacaggcagcagtgatgattgcgctgttctttgtacctgctgactacatcatcctgacgtgcgtggtggtgggtgttattcactttatcaactccacagcgacaccgctgcaatggagcctgctgagcgacatcattgataacgtagagaaaaaatcgggtagatccctcagcggcctggttttttctaccaacatttttgccataaagattggtattgccatcggcggtgccatcatcggctggctattgacgatgggcggctatgtcggcaatgcgcctgtgcagactgaatctgcgaccctggtggtgcgactcattttcacggtaattccggcgatgttgatcctcagcctgattttgattctgaaaaaataccgcaataccgaagaacctgataacacactaacgataatcgctgcggaaaatgagcccgccagacactaa

SEQ ID NO: 240370 - DNA, 897 bp, Klebsiella pneumoniae
atgagtgacgaatctcccgttttcgaaaaaatacccgtgcgagccggcgatctgtttaccttcagggttgatgctttcggcgacttcccagggatcgaggttgtacctcattaccacatgatgcacgaactgatgtggttcagaaaatcagctgggagctttaccattggtaatgagaaattatcaataaaaaacaatacattgatttatgttccagcgctaatgatccacgagatgagcattccggttcaggcaaatcatgttcgttatctcctgcaatttgaaaaagagtggcttgatgagtacgcgctggcatccgacgcgctgcagtgcggtgcaatggccattcttggtgcagaagacgccgaccggctggaaatgttatttaactggtgtagcgaatttagtgattttaccgatacgctgttccgctcgcttatccgcagtattttgctgcatgcatttaaaaacctgaaagcggctgtgcatattacggaaagagaaaataatgcctatctgggggagcttattaggcttattaaatccattgatgtgaacgaaaattatgaaataactacggaggaggccgcgcgaatgtgtaactggtcgaaatcgtggttctcaaaaacatttaagctcaccttcggtatcagttttaaaaaatttatgttgctgagaaagattaatattgcagttaatttgctagcaaatactgagcttcggattagtgatatttctcagcgtgctggttttactgatagtgcttatttttgtcttaagttccgggaaatgatgaatgatacacctttgtcattcaggcttaaagtcagatctactactgatgtcggtaatgggcttggctcatgggcaagtaatgttaaaaatgaagctgaatga

SEQ ID NO: 240371 - DNA, 798 bp, Klebsiella pneumoniae
atgaacagtacgcaattaactgtaaaagaaaaaataagttatgggctgggcgataccggttgtaatctagtgtggcagaccgtaatgttgtttatggcctttttttatacggatatttttggcttaagcccagcacatatgggcaccatgtttctggcagtacgtattctagatgctgtaacagatgtattaatgggcgcagtggcagacagaacaaaatctaaatatggtcagttccgtccttatttattatggttcgccattccttttggggttctgtgttgtttaaccttttacaccccagatttatcgtacggtgggaaactgatttacgcgtatatttcttatacattactgtcgctggtttataccgctattaatgtgccctactgcgcgatgatcaataatatttcaaatgactccagagaacgcgtgtcactacaatcctggcgatttgccctcggcacgctggggggattgattgtttccctgacggccctgcctctggtggcttatctgggtaaaggtaatttacagaacgggtatttctacaccatgatggtgatgggtacgctaagcattattctcttttttatctgttacggtctcacaaaagagcgtttttcaacagatgtcgaattaaccaaaaagaacagcatcctcgacgatcttaaaacgcttcttgccaataaagactggcgtattctgtttacgctcaacgtagtgaatctggtggcggtactatttaaaggcggtactacgctctactttgtgaacagtgttggctttgttgaataa

SEQ ID NO: 240372 - DNA, 246 bp, Klebsiella pneumoniae
atgctacgatcattggtcaaaaagggcgtgggcgtcggattgctgtcatggttggacgcccatgccgatattcagaacggcgagctcagatttgcgcgcatcgaaaacaaagagctgaagccgatggtattgtcgctatgcgtagcatcacaccggcaactctcaaaagcggcacaagcggcactggaggttctgcgggtaaaggtcgacggccttgaagctatctaccggctaggctctgactga

SEQ ID NO: 240373 - DNA, 705 bp, Klebsiella pneumoniae
atgaaaatagctgtccccattccgccatccgtccgatcggccccggatctggtggcgattcgactccgcgacgccatctccactggtgagctgagccccggagagcagttgccgccggaggtcgatctcgctcgaggattcggtatagcgctgatgacggtgcggattgcgttgaatgcgcttaaggagatgggactgttggtgactgtccgaggccgaaatggagggacctttgtcgctatggatgtaggcgagcgcatagctgaagctgccagaaagtccccgctctcaaaggccgagatcagagacctaacggactggcgtcgagcggtttccggcgaagcatgttatctcgctgccatgcgcgctactgcccaggagcgtagcgcgataaaggtcgcatcggaaaattttgatgccttaggaagtaagtttcccgaagtgcgatttgcagatgccaaatatcacacgctgatcgcggaagcatccagatcacccacacttattcgtaacgaaattgagattcagcgaatattcaccgagataatcttggctatcgacaagccactaaagaccaaagaaattgcagggtacagccatgacgacattacgtcggccatcttggccggcgatcatgaccgagcccgtcaagcgatgttgaatcatgctgaggccacgtttacctgggtcactatgcttctgtga

SEQ ID NO: 240374 - DNA, 774 bp, Klebsiella pneumoniae
atgatgatcgcaaccaacgaaatccttcaagctcccatgcccagaattctggtggtgggctccctgacgccgcctgatgccagcgattggctcaaatgtaagctgaaagaactttcagatggtgtgttcgccgcattagaacgcgctggcgccgcctgcttatttgtcgaggcctcttcgccgaacggcgtgccaggtgaattattgtcagcggcagatgggctgctagtgctcggcggtggagacgcagaccctgcctgctatggtcaggccccagtcgcggacactatgtatgcaattaaccctgccgctgatcatttcgaattaggactgattcgccaaggagccatcgatgatctccccatccttggaatctgccgtggaatgcagctaattaacatagcgttcggaggggaacttattcaggaaattggcccagggtgccataacggaaacgctgataactcattgatggtctctcatccagtcttgctggcgacaggcagccgcctgcactcaatttatggcacatccacgctcactattcggtctgcacatcatcaagcagtagcacagctaggcaatgggctcacggtagcagctaccgcagaagaccaggttatcgaagcggtcgaagcgatcgataaacgttggattgtcggagtgcaatggcacccagaagacgctctcgcgcctgcaaaagatttcgacagactcctcgatgcattcataggcgcagcagaatcagggcaagcacgtcagttacctgtataa

SEQ ID NO: 240375 - DNA, 1425 bp, Klebsiella pneumoniae
atgaaaactgatgttgacgcgcgtgattcagatgtcagcgcccaagattttacgttacaacgaaaactagaaaatcgacacatccagttgatctcaattagcggtgcaattgggactgggctattcatgggggcaggtaaagcgatatcactttcaggaacatccattctcctggtctacgccatcatcggtatatttatttatttcgtgatgcgcgcgatgggggaaattttactgtccaacttgaaattcaattcgtttgcagatttcgtgacagagtatcttggccaacaggtcggcttcatactggcttggacgtactggttgtgctggtgcgtagctgcagtagccgacatggtaatggtcaccggcttcttccagtattggtatcccgatgcaccttcttgggcaccgggcctcataacagcaagcatattgataatgctgaaccttttagcggtcaaggtctttggtgaggtcgaattttggcttggcatcattaagatccttgccattgtggcgcttataattacgagtgtcgttctggtaataaattctgccatatctccctatggcgtaacagcttccgtctccaacctagttacacctggctccattttaccacatggcataatgggattctttgctggttttcaaattgcaattttctcgttcaatggtactgaactgatcggcacgaccgctgcagaagctaagaatcccgaaacgacaattaagaaagcaattaatacgatccctttccgcattctacttttttatgtactttcgcttgccggcatcatcagcgtgatatcgtgggcgcatatcccgtataaccggagcccatttgtcgagctcttcctctccgcggggctcccagcggccgccggcatcatcaatttcgtagtgcttacatcggcagcgtcctcagcgaatagcggtatttattcagccggtcgaatgctgttcagccttgcgcacaacagaagagcgccagccgcgctaggctacacgactagatttggtgtgccaggcaatgcgatcctattcacagggttcactattattgttggcgttacacttctgttctttatttcggaaatcatgacaatcttcatcatggtgtccactgttgccgcagtgggcggtttattcgtatggtcgatgattttgctgtcttatctcgcgtacagaatcaagaaccctggagccaacaagagatccaccttcaggttacctggaggcgttgcaaccgcagtcgccatgctaggttttatcctcttcattgttggcctcctcatcgtggacatcgacacccgcaccgccgtaattatgatgccactctggattatcggcctggccatcgcctaccacgtcaaggtcaagaaaatcatcttcaacgctgagccagcatcagcaccatag

SEQ ID NO: 240376 - DNA, 276 bp, Klebsiella pneumoniae
gtgcctcactcaccggtcgagaaaaagagagtattgagtcgtgtcaggcgagtgcgtggccaactcgatgcactggaagcggcgcttttggagggtgtcgagtgcgggcctgtactgcagcagatagcggcgatacgcggcgctgtcaatggattgatggcaggagtgttggaaagccatttgcgcgagcagtttgtggacggtacgcacgactcgggagcgcagaatgcgtcggtggacgaggttatagggctggttcgcacctacttacggtaa

SEQ ID NO: 240377 - DNA, 1110 bp, Klebsiella pneumoniae
atgaaatctcgtgcagcagtagcgttcgaagctggcaaaccgcttcggattgtcgaaattgacgttgaaccgccgcgtgcaggcgaagtgttgatccgcataaccgatacgggcgtctgccacacggacgcatttacgttgtctggagacgatccagaagggctattccccgtagtactaggccatgaaggtgcaggtgtcgttgtggaagtcggcgaaggtgttacgagcctggcaccaggcgatcacgtgattccgctgtacaccgccgagtgtggtgagtgtctgttctgcaaatcgggaaagaccaatttgtgcgttgccgtacgcgcgacccaaggcaaaggcgtgatgcccgatggctcctcgcgcttctcctacaacggccagccgctgtaccactatatgggctgctcgacgtttagcgagtacacggtggtggccgaagtctcggtcgcaaaaatcaatcctgcagccaaccatgagcatgtttgccttctaggatgcggggtgaccacaggtattggtgccgtccacaacactgcaaaggtacaacccggcgacaccgttgctgtgtttggtttgggggggattggtctcgctgtcattcagggcgcacggcaagccaaggcgggtcgtatcatcgcgattgacaccaatccaggaaagtttgaactggccaagtctttcggcgcgacagagtgtatcaacccgaaagatcacgaaaagcccatccaacaggtgatcgtagacatcacaggctggggtgtagatcactcgtttgaatgtatcggcaacgtaaatgtcatgcgatccgccctcgaaagcgcacaccggggctggggccaatcaatcgtgatcggagtggccggggctggccaggaaatttccacgcgtcctttccagctcgtgaccggacgaacctggaaagggtcggcgtttggtggcgtgaagggccgtacccaactgccaaaaatggtcgaggacgcaatgaaaggtgaaatcgaactggcaccgttcgtgacccacacgatgccgctggaaaaaatcaacgatgcattcgacctaatgcatcaaggcaagtcgattcgctccgttatcaaatactga

SEQ ID NO: 240378 - DNA, 570 bp, Klebsiella pneumoniae
atgagcaatgtaaaactgcacccagcgctcgataacggtctgcaatccgccacacctggttttgctggcggaacactggagtgcttgtgtccacaggacaaagttcaagtcaggatcggcgcacagactctgcataaccacgcgtgtggttgtagcaaatgctggaaacctgaaggggcgagattctcaatcatttctgtagttcctcgtgaaaagctccaagtaagcgcaaatgctgacaaactgggcatcgtcgatagcaatgcggtcattcaacgtcacgcgtgcaagctctgcaaggcccacctgtacggacgcatcgagaacacgaatcacgcattctacggtctcgactttgtacacaccgagctctcacctcagaccggctggtccgctccaggcttcgctgcatatgtatcgtctgtaatcgaaaccggcacgcccagttctgaaatggatgctatacgcgctcgctttagagagattgggcttgagccatatgactgcctctcccctgcactgatggatgtactcgccgtccataccgcgaaacaaaaaggcgttgcctag

SEQ ID NO: 240379 - DNA, 1200 bp, Klebsiella pneumoniae
atggcgaagattgtttgcgttctttacgacgaccctgtcaccggccaacctcggagctacgctcgtgatgagctacctcttctggatcgctatccggacggtcagacactgcccacgcctaaggctattgactttcaaccgggtgcactgcttggcagcgtctcgggcgaactgggattgagaaagtatctggaatccaacggacatcaactcgtagtcacctcgagtaaagatggcgcggatagcgtgcttgaccgtgagctgcatgatgccgagattgtaatctcgcaaccgttctggcctgcttacatgaccgcagagcgtatggacaaggcgcccaagctgaagatgatcgtcaccgcaggtatcggctcggatcacaccgacctgcaaggtgcgatggatcggggtatcaccgttgccgaagtgacctattgcaacagcaatagtgttgccgaacacgttgtgatgactacgctggcattggttcgaaactatttgccctctcatgactgggtgctgaaaggtggctggaacattgccgactgtgtcgcgcgctcatacgatgtcgagggcatgcatgttggtaccgtggccgccggtcgcattgggttgcgagtgctacggctattaaagcctttcgatatgcatttgcactatatggaccggcaccgccttcccgaggtagttgagagggaactgaaccttacctaccactcaacactcgagagcttggccaaaatgtgtgacgtggtgacgctcaattgcccgcttcaccccgaaactgagcacatgatcaatgagcaatcgctcaagcacttcaagcgtggtgcttatctgatcaacactgcgcgtgggaaactctgtgatcgtgatgccatcaaggcagcgctggagagcggtcagctcgctggctatggcggtgacgtctggttcccgcagcctgctccagcagatcatccatggcgcacgatgccaaatcatggcatgacccctcacatctctggaacaagtctctcggcacaagcgcgctacgccgccggcactcgggaaattcttgagtgttacttcgaaaaacgccccattcgtgatgagtacctgatcgtacagggcggtgagttggctggcgtcggggcgcactcgtacagtgcggggaatgcgaccaaagggtcggaagaagccgaaaaattcaaacggtga

SEQ ID NO: 240380 - DNA, 732 bp, Klebsiella pneumoniae; identical to SEQ ID NO: 202668

SEQ ID NO: 240381 - DNA, 234 bp, Klebsiella pneumoniae; identical to SEQ ID NO: 202683

SEQ ID NO: 240382 - DNA, 1197 bp, Klebsiella pneumoniae
atgagcgagatgagttatctggaaaaattgctggatggggttgaggttgagtggttgtcactctcaaaagtattcaacttaaggaatggttatacaccgtctaaaactaaaaaagaattttgggagaatggtgatataccttggtttagaatggatgacatacgtgaaaatggtagaattctagggaattcacttcaaagaatttcatcctgcgccgtaaaaggggggaaactatttcctgaaaattcaatattaatatcaacgtcagcaacaattggtgagcatgctttaatcactgtacctcatctagccaatcaaaggtttacatgtttggctttaaaagagtcttatgtagattgctttgatattaaatttttattttactactgtttttctttggctgagtggtgccgaaaaaacacaacgatgtccagttttgcgtctgttgatatggatggattcaaaaaatttttaatcccacttccctgcccggataatccggaaaagtccctcgccatccagtcagaaattgtacggattctggataaatttaccgcccttaccgctgagcttaccgctgagcttaccgctgagcttaccgcacggaaaaaacagtataactactatcgcgagcagttaatgaatcttgaggaaagggaagatactcgagaaatgagtataggtgatatttatgattttcagtatggaacaggcaatacaattcctaaatctggggggcaatatcctgtttatggtagcaacgggattgtaggctcccatgacaaatataacagcgaagactcgcctgttattggccacataggtgcttacgcaggaatcgttaattggggccagggtaagcattttgttacatacaatggagttatttgtaggcacaaatcgaaagaagttcttcaaaaatacgcctaccatttattacttttacaagatttcgggtcaaaatctaatagtgcatcacagccttttgtttcatataacatattaaatgctcccattgttttcgttccccctttacaagagcaagctcgtatcgtcgccatcctcgataaattccatacactgaccagttcaataaccgaagagcttcctcgtgaaattgagctacgccagaagcagtacgaatattaccgagatttgctgttcagtttccctaaacctgattccgtaacgaactga

SEQ ID NO: 240383 - DNA, 627 bp, Klebsiella pneumoniae
ttgcataataaaaaatcgtctactattcccaaaaaactgccgactcaggaacgctcccgtgcaacagtcacggccattatgcagtcagcaacctatattttaacgaaaaagggatgggagggtttgactaccaaaaaaatagcagaacaagctggagtaaacattagttcgttgtatcagttctttccaaataaagaatctattgttgctgaacttcagcgacagcacacagctgctaggcaggcagaattgtctaaggcattagatatgttacctcaacaacattcgctcagagaggtgctgttattaattgtcaaaggagttattgacgaacaccgtatatcccctgaaatgcacatagccattcacgaagaattacctagctcggtaaggctggaaaatgatcacaaacagaaaatacaattgcttttttctaatgcacttaagccatttatgataaacatacctgatccagagttctcgacatatataacaagtgttactttgtatgcaatcgttaatacaattgcagaagacagaccttatttattggaacaacaacacttcatcatggagattgtcacacttcttgagaaatatttatcaggaagtgatggtgcggcataa

SEQ ID NO: 240384 - DNA, 906 bp, Klebsiella pneumoniae
atgaataacagagacttagcgtattttatggtcgcggcaaaaataatgaatttgggacaggcatcacaaaatcttaacattactcaacctgcgctctctaaatcaattacgcgactggaaaaagaattaaatatcaaattgttccagcgagcaggtcgtggtttagcattaactgaggcaggagagattctttatcagcgaggcctgcaactgcaaagctcatgggatgatgtcgttaaaaccatggaagaactgagtaatgggcgccgcggggttgtgcgcatcggctctgctggttctgccacccagtttctgctgccagaagtttgccgacgcttgcaacatgaggctccagatatcaaactggaaattcagattggcatgaacgatgtgctgttcgggcagctagcgaagaatgaactggatatcattatcggacctctggtgggttataacaaaccgatactacagttgccagttaccactgatcgagtagtggtggctgcttcacgtagtcaccctctggctaacagatctaccagcctgcgggatcttagtcgttttggttggatccttccggccaaaactgtctcgatgcgtcagtggctggagcatatattttatgaacatcactgccctgcgcccgaagtcaaaatagagatcagttcgctggcggctgtacctgcattgatcgccagtagtggtctattgagttttatttctgagaacagcctggcggagaaggaatttgctgcgcttttgacgcggatagataacccccaactggtgatgtctcgtcgcgtcggtattacttggctgcaggacactatactgtcaccagccacacagatggtaatagatatcgcctgcgcatatggacgggagatcggtttgagtaccatataa

SEQ ID NO: 240385 - DNA, 696 bp, Klebsiella pneumoniae
atgaacaacccacgaaacgaatggccagtcggattttatatttctgaacgtcaaagtacgatttcagctgacgttgtctcagagtttcgctctatccctgtagcggtcgcaggtgactgtatgggacggataagtggtgctaccggacttcaacgctatcaccaggacgtgaatattagcgtctgtggacctgcaattacagtcaaagtacgaccaggcgacaacttgatgatccacaaagcactggaacaggctcagcctggcgatgttattgtgatcgacggaggcggtgatctgacccaggcactaattggcggattgattcgcactacagcgcaggcaaaaaatatcgctggatttattgtcgatggcgcaatccgcgatctggcagaatgggtagatggagtcgtgcctgtattcgcaaaagggcatacccatcgcggaccggacaaaagcggaccaggtgaagtgaatgtaccaatttcctgctctggcatggtcgtgttccctggtgacctggtgctggcagacagtgacggaatgttggcgataaaaccagcagaagtagaagcagttctggcacgggcgaagactcatttacaaaaagaagaaattatccgaaagaataactccgccggtaccagcgatccggaacggtttaattatattcttcgtgaattaggttgcccactataa

SEQ ID NO: 240386 - DNA, 1329 bp, Klebsiella pneumoniae
atgtaccttgccctcgtaggttatgctctaattgcatgcctgatgttttttcttatcaaaggaaaatcgacacctatatcactttttattttcctatcagttatcgctggctttttttctggttatacaccagagcagatgaatgattatattatgaagggagtaatgcaaaccgcacccaatgctgtattattcactttctcaattatctttttcagcatcgtcaccgatgctggagtatttcaaccgttggttaactggttaactaaactagctggtaataatgtagtggcaatagtagttgtcacgggatgtatcgccactattgcacatctcgacggctcatcagttcctactgtcttgatcaccatcggcgcaatgttgccaatatacaaaaaatttggcatccgcccggcggtacttttatgtatgctggccgcaggaatgggagtaaccaattttactccctgggctggtcctcttgctcgcatcgccgccgtctctggtctggacgtcaatgtcctttaccatcgacttatcccgacacaaatattcggcctcgtttgtatgcttgtgttggggctgtatttgggtatacgtgagaagagacgtatcgctctgggtattccaattccagaaacgtcactagagcctgaaacactagccgcaggcaaggagcaccactatgtgcaaggaaataaaagccgtctattattcaccattaacgccacattggtgatcggcgccacgctactactgttagtaacccatattcaggcatatattatttttatgtgtgctttctccgcagccatgattttcaattatccaaacctgaaagcacaggaagcagtgatgaaaaaatatgcatattcagcatatatgatttccggtactgtaatggcagctggtgcctttgtcggtatcttaagtggcggcggagaaaaatcaatattgactgaaatggccgatgtggtacttcaggtgatgcctgatactcttggaactcatctgcatattattatgggagttctgggtgggctcattggttttgttattggtccagatgcgttcttctatggtatctatccattggttgcaaaagttggaactaactacgggctgagttgggaagtaatgggactaacgatggtggtagggaaaaatattaccatgatgctaagtcctgtatttgctacaacctatttagctatcggtttagctggtgtcgaattgaaagaccacattcgcttttccttcatgcctgtcgtggtattttctattgtgatggttttctcgcttgtagtgaccaacactgttcccttgtaa

SEQ ID NO: 240387 - DNA, 840 bp, Klebsiella pneumoniae
atgaaaattgttaattttattgtccgcgcaaccagagaaagaagtttcgggatttatcgttccgaggggattatagacatcggccgtctacttaactgccatgacattaatatatttttacaacagaagcaactcagcgaactataccgttatcaagcattcccaccggatcttgagatgagagatattaattttcttccggtgattgacaagccaggaaaaatatttggtgttggcatgaattatgcccagaaacgcaatgaattcaacgaaacagaagatgctccgacgctgtttattcgttttgcggactctcaagtcggccataatggcatactcatgaagccttccagttccgaacagttcgactatgaaggagaactggcgattgttattggccgggccgtaagaaatgtgtcgcgggagcaggcactaggatgtgttgctggatacagttgctatatggacggttcaatacgtgactggcagcacaaatggtataccgcaggtaagaactggccatccaccggtgcattcggtccttggctggttacaccagatgaaattggtgacccacagcaactctcgatcaaaacctggctcaacaataagttggttcaggatgacaccacagccaatatggtgcattcaattcaggatataattgcctatattagcacttttactctactatccccaggggacgtaataatgaccgggtctccaggaggtgtgggtaaatttcgcgtaccgcagttatttttacataaagatgatgtaatttctgtggagattgaaaaaattggtaggctaagtaaccgtgtcgtcgacgcatcatga

SEQ ID NO: 240388 - DNA, 159 bp, Klebsiella pneumoniae
atgaaaaagttgcgattcaccgaagagcagattgtctttgccctgaaacaggccgaactgggtacgagcgtgtccgaagtctgccgtaagctgggcatttccgatgccacgttttacacctggcgaaaaaatacggcgggatttccccttctgaactga

SEQ ID NO: 240389 - DNA, 219 bp, Klebsiella pneumoniae
atgggttttatctctgacgccttatttgacgggcgtcggttacgtctgctgacagtcattgatctctacacgcgcaaatgtctggggatctgcgtggcccaggatctgcgctcaacggaggttgcagaaatgctgaacaccattgtgctcagacgccccttaccccagttgcttaaaactgataacggctctgaatttgcagagaaaaatgctggataa

SEQ ID NO: 240390 - DNA, 213 bp, Klebsiella pneumoniae
gtggggtcgttcaacggcaaactgcggctggagtgcctgaatgaaaactggttcatgtctctggaggatactcggtgcaacatcgaagtctggcgcatacactataatcagaaacatatccattctgtcctgggctggatgactcgtccgaatttgctgaaaagtttgccgattgccagaacacgcaaccaacatgaagccgattattcctga

SEQ ID NO: 240391 - DNA, 579 bp, Klebsiella pneumoniae
atgctggagcagttcgttcaggagcgtggacataaaatagccagttactaccgggagaatatcagcgggacaaaacttgaccgtccggagctgggacgcttactgatggacagtcaccgcaatgatattttgctggtcgagcagatagaccgcctgacccgtttaagtaacagcgactggatgacgctgaaaaggcagatcgagcaacacgagctgcggattgtcagcctggatgtgcccacctcttggcaggcactgtcagataaggacccttcacaggctgacccaatcacccgcgccgtgataaccgccatcaataatatgcttatcgacttgatggccgcgatgtcgcataaggactggctgagccgccgcctgcggcagaagcagggaattgaacgggcacatacactggggaaataccgaggtaagcaggccgatcgggagcgacatcagaaagtcctgtactaccgacaggtaaagaaactgagtatccaggaaacggcagatgctacgggctacagtgcgtcacaggtttgccggatacaagcgcttcataaaactgaaaagctgaaataa

SEQ ID NO: 240392 - DNA, 1332 bp, Klebsiella pneumoniae; identical to SEQ ID NO: 207743

SEQ ID NO: 240393 - DNA, 348 bp, Klebsiella pneumoniae; identical to SEQ ID NO: 207744

SEQ ID NO: 240394 - DNA, 618 bp, Klebsiella pneumoniae; identical to SEQ ID NO: 207745

SEQ ID NO: 240395 - DNA, 420 bp, Klebsiella pneumoniae
atgttacacgcacaagctaaaacgaagaaccagcgctcgattcagaccattcgtgacaatacgagtgtaatcgcgagctttgaacctcgttctatgtttcctgacactgttgaagtgcgtaggatgctgaaccgtacccagaaggattcgcagcactttatcgttaccctgaaaagcgacctcaagcgagcgctggacacgactgttgttaagccatttgcggagatcgccattcgtggtgagaacctgcgctttaccgtgaagcctgaaaagcaatatccaaacctgtctttaaacgacgaagttattggaatgattgaaacatcagttgctgatttcatggaaaagcacttttctgctcacatcaatcaccgtgaagctaaaaatcaggattgcaaaaaggaatggcaccttctctaa

SEQ ID NO: 240396 - DNA, 735 bp, Klebsiella pneumoniae
atggcaccttctctaatcggcgacaattacgccaaagatctttcccaactcccgtctttcccaggcgggagttttgtttcacacacgtcatgcttcatcctgcctgacgacgtcgtaattctccgcctaacggaaacaacctacgatagcgccgattatcatcacatagcggtagtggaagaagttgccttcaccgatcctgagttcattgccagccacatcgacgatttgcgtgacaacgacgggttggaagacagtgagatcgttgatcgcatcatggttcttgagatggaggacgagggcaaatctgaagtgattgctcgatttgcttatgataatttctctttcatagacccaaacggaaacccagctgaaggtaagcaaatacgaggcgcttatgttacgcctgaacgagctggtgctggtttggcggggcagatttaccgtcatctgacggaagtccacaaacatctaatctgcgataacacccaaacagtttatggggcagccctatgggcaaatacagttcgcaacgttgtcggccgcgttgatatttacaacgtagctaaacatgagtatgtcgaagagttaggtgatggagccaaaggggtaaaaggcttcataccttgggacatcgggaaactaaacccctcatcgttgggcaagtggcagcaatatcccttcaacccgaatatccagcaatgttattacctggtgttgatcatttcagcttaa

SEQ ID NO: 240397 - DNA, 930 bp, Klebsiella pneumoniae
atgaaaacgttaattttaaagctggatggaatgcctgataatcttgaacatcagttgaaaaacgattatgagctgattgatgtctatgatgcaatatcacccggacaacaagataatatcaagagtgcgacaattggtgttgcgaacggggaaagtcaactcgatgccgatttcctgaagcaattcccggccttgaaactcatcgctatttttggcgtgggttttgatgggatcgatatgcattatgcacggcaacatgatattactgtcaccaatacgccaggcgtattaaccgaagatgttgctgaccttgccctcaccttttgcctggcgctcacacgtgaagtgattgccgccaatgattttgtacaacaagggcactggaactattcacgttatccattaacaaccaaattcagtcgacgtaaagtgggaatatttggtatggggagggttgggcagtcgatttgtcgccgtttgtcggcatttgactgcgatatttattacacagattccaatcgggtagatattccggctacacggattgagaccgtgcagcagctggcgaaggaggtagacttgctaattttatcagccaatgcgtcagcgcaaacccacaatattatcgacctggcagtgctaacagcattgggtaaatccggttatctggtaaatgtggcgcgcggcagcctggtgaaccaggacgctctgataaccgcacttgaaaataatttgattgcaggtgcggcactcgatgtactggcgcatgaacctgaaatacctattgccctgcaacgacgctccaatgtcatcattacacctcactatgcaagcggcaccaaagagacccgtgaagagatgaagaatcttgtgtgtgagaatatccgtttatatttgcattcggatagagtactaacacccgttaaataa

SEQ ID NO: 240398 - DNA, 942 bp, Klebsiella pneumoniae
atgccgttcaaagatgtagtttttagtggggtttatataatttttatgctcatcatgtggaatgcagatcacttttttgaaaaaatcgaaacaaccatcggcgtcgattacgtgctgcgcgcccgagaaggcgtacctgaaaaaggtgtatacattcgcccgcacatgcaccttgagcatgagattatgtggtttcataaagtagaggggagttacagtattggtagtgaaaaattcaatctcaaaaataacaccttaatctacgtcagtccgctggtattgcatgacatggaactgacatttaccggcgatcatgagcgtttcctgttgcaatatgataatgcggtactcagtcggttaaaatatcctttcccggcgatggatccacataccggtattgtgacacagctcaatgagcaggacgcagaacggttgcagttcctgtttcgatggtttacggaaatacatgaaacgccgcactctgcccatgagattaatcccttgatgattttgttgctcaatacggtctttcaccacgtcacgcaggcggaacacatttcaccggaaagtgaaggtagcagttcgtttgaaaatatcattaattttattattgatatggagacgcgcacctcatttaatattactttgaatgaagcggcggaattagtggggctgtcgtcgagtcatttttcgcgcaccttcaaaaaaatcatgcagatcagctttaaagagtatctgattagaaagaaaattgccttgtcagccgacctgctgattaatactgaattgaatgtgacggacattgcctatcagtgtgaatttaccgacagtgcttattattgctttcagtttaaaaagattgttggtgtgacaccaaagaaattcagagtcaacagtcggtcgacaaaacagttatccaccaagcatgataaaaccgaatga

SEQ ID NO: 240399 - DNA, 1185 bp, Klebsiella pneumoniae
atgaagaatgaatatatgtaccagtaccgtgttgggttgttatttaatgccaataaagcctgggatcgccaggttatagaaggcattggtgagttttttgctatatcagaatgtaactgggatatctatatcgaagagtcgttttgcaccgacagaattaacgccattatggcttcaaccgacggcattattgctgatctggatgatctcaatatggtgaaaacattagccgggtctgcaaagctttttgccggtgtcgggggatcgtttgcccgtgaacacgactatccgcaatgtgattatgtggcgacggataattatgcggtggtccagttggcgtttgagcatctgatgaaaaagggcatccggcacattgcgttttttagcttgccggatgcccgcgaaaagcgatgggcgacagagcgtgaaaaggcctactaccaactggccaaaacgcatttttacccccctgaggtgtacaacgattacgatgccgccatccagcatcgggaaaacgcaatgcgttcgctgatagcatggatccgctcgcttgcgccaaaaagtggcattatcgctgtcaccgattcccgcgcccggcatctgttgcaggcctgcgcgatagccggagtaaaggtgcccgatgaggtcgccatcgttggtatcgataatgaagacctggtcaactatctgtcgcgcatctccttaacgacagttgtgcagggtgcccggcagataggctttcacgccgcccgactcttatacacgcagcttgaatcaggggagaaacatgttccgcgccgtattgtggtcccgccggtgggcatcaaagaacggatgtcgacggatgtgaaacagacatatgatccgctggtggggcgtgcgctgtcttttatcagcgagaacatccacacaccgcttaaagtggttcatgtgatcaactatttggggctttcccgcacatacattgacgagaagtttcaaaaagagctgggctgtaaggttcatacggtgatcctgaaagaaaaactcattcgctgccggatgttgcttgagaacaaaaatattcctatcgcggatatccctgcgctggccgggttttcctcaattaactacttttatgacttctttagccgccagatggatctcacgcctgcgctctaccgtcaacagaacgcaaaagactaa

SEQ ID NO: 240400 - DNA, 561 bp, Klebsiella pneumoniae
atgaaacgccctgatttgggcagcctgttactgaccgccacgctggcttcgggcgtattgggtgcgatgctctcgtccaccgtctttaaaaatatcgataaagtgaaagggtttaaagcggcaatgctccttgaagccgcgctactgctaggcatgtattttattcccggcagcaacgttatcgccattttctcgttggtgattattatcaatatcatccagctcgccgcgacacccttacagtggagcatgctgtcagacattattgatgctgaggagcaaaaaagtgggaagaaactcagtggcatcgtgttttccaccaatttattcgccattaagttagggatcgccattggtggcgcgctggtgggatatatgctcgcctggggcgagtatgtcggcggtgtaacaacacaaaccgcatctgcactggaaaccattcggctgttattcaccgtttttccggctattctggtggcgttattggtgctgatcatgcgcaaatacagcctcaacgataaagcgctgatgaccatgacgcataaaaactcagcggcataa

SEQ ID NO: 240401 - DNA, 1296 bp, Klebsiella pneumoniae; identical to SEQ ID NO: 207748

SEQ ID NO: 240402 - DNA, 1272 bp, Klebsiella pneumoniae; identical to SEQ ID NO: 207747

SEQ ID NO: 240403 - DNA, 1629 bp, Klebsiella pneumoniae; identical to SEQ ID NO: 207746

SEQ ID NO: 240404 - DNA, 684 bp, Klebsiella pneumoniae; identical to SEQ ID NO: 207742

SEQ ID NO: 240405 - DNA, 1500 bp, Klebsiella pneumoniae
gtgacgctcaatactcatcaggtcagttattacatgactcagcgtaaaaaaggtgtaacccagcatatctcggccatgaaggccggtatctctgttcgctcaggtcgcaggatcgaaaaagatcagtggtctaaaactggtaatcgtcactggcggacacgtaaagatccgcttgaggccgtctgggacagcgagcttgttcccctgttgaaggaaagacctgctctgatgcccacgaccctgctggaaatgctgcaggataaatatcccggtcagtaccccagcagccttcgcaggacgatgcagcggcgggtgcgcgagtggaagctgcagtatggtgccgagcaggaagtgatgttccggcaacttcatcagcctggcctgcgcggcctgtcggactttaccgagctgaaaggtgtagttgtcaccatcggtggcaagttattgacgcataagctgtaccacttccgcctggagtggagccactggagctggatgcgggttgtactgggtggtgagagcttctctgccctggctgaaggcctgcaggaagccctcgggcaactgggtggcgtaccaacagagcataaaacggacagcctgcgggcagcatggaaacaccagggtgaagacgggcgccgcgagctgactgagcgctatgctgccctctgccagcactacggtatgcagggcgtgcacaataatgccggtcgtggccacgaaaatggttcagttgaaagcgcccacgggcatctgaaaagacggatccgccaggcgctgatgctgaggggcagtaacgacttcagcaccgtggaagaataccaggccttcatcactcagcaggtcatgcgccataaccgcaacaaccaggatctggtgaaagaagagcgcccccatctgaaaccactgccgctgcgtcgcagcgccgactacgacgaactgacggtgagggtcagtagcagcaataccatcaatgttaggcacgtcgtctacagcgtcccttccagacttgtcggtcagctgttacgcatccgcttgtgggatgatcgcctgagctgttacgtgggtagcagtgaagtgatgagctgcgcccgcgtcaggccagaaaaagggaaaaaccgggccaggcgcatcgacttccggcatgtgatcgacagtctggcgaaaaagcctggtgcgttctgccatgccacgctgagaaatgacatcctgccggacgatgaatggcgaaaactgtggcgtcgcctgtgcaatcatctggagccagagatggccggtcgcctgatggtacacgccctgaaactggcggcgggctatgacgatatctcgatcgtggcacgggggatggagcagatgctgaataccccgggtgagctggatctgcaccgcctgatgcggttcctggggataaaggaaaaggagctgccggcagtcagcgtggtgcagcacaacctgagcagttatgaacagctgttgcgcggcaaaggaggtctgcagtga

SEQ ID NO: 240406 - DNA, 756 bp, Klebsiella pneumoniae
gtgagcaatatccaccaccttgagcgtagtctgcgcaaactgcgtctgacccgcgtcagcgctgaatggcatgcgctggagaaacgcgctctggcagagggctggaccccgtcacgctatctgctgacgctgtgcaatgaagaactcctgtggcgcgagagcgaaaaactgcgccgctataaaaaggaagcccggttgccggtggcgaaaacgctgggtgagtatgacttcagccaggtgccggaactgaataacgctcagttccggcagctctgcgaaacgacagactgggtggacagcggagaaaacgtcctgttgttcggtgccagcggcctggggaaaagccatctggcggcagcgatcgtggatggcgttgtaggtctgggctaccgggcccggttctacagtgccggagagctgctgcaggagctgcgaaaagcgcggacacaactgaaactgaacgagcttctgctgaaactggatcgctaccgggtgatagtgatagacgacctcgggtatgtcaaacgcgacaacgcggaaacgggtgtgctgttcgagctgatcgcccatcgttatgaacgcggcagtctggtcatcaccagcaatcatccgttcagcacgtggggcagcatcttcgtggatgaaacgatggcggtggcagcagcggacaggctgatccatcacggatatatgttcgagctaaaaggagaaagttaccggaagaagacagcgaaggcagtaaccagcgtggcttaa

SEQ ID NO: 240407 - DNA, 1755 bp, Klebsiella pneumoniae; identical to SEQ ID NO: 207757

SEQ ID NO: 240408 - DNA, 1743 bp, Klebsiella pneumoniae
atgaaaaaacaattaagttggtatattccattaactatatttgctggctcactcatatatcctgtgtccgcattacctgcaaatcagttctcctcagctgcaccaactggtgaagatttgccaataataactcctgtcactgaatgctccacactacaacaaactgatttaacctctattggtggggaggggagtcaggtgctgaaagcgacttttgatgaaaaacgtcaagtttgcattgttacagggcgcctggctcctcagattggctttgaggtccgtttgccaacagagaactggcgccagcgttctctgcagattggttgtggtgggttgtgtggacgaatatcagatgaagtcggtgcagctgacggatgttcccatataacagatggttctttcgttacctcagcaacggacatggggcatactgtagctgatggatcttttggcaaagattctcggttgcggacggattttgcttaccgcagtgtccatcttaccgctaaggccaccaaagcattagtcgcagcattttacgggaaaaaccccagatatgcctattttactgggtgctctgatggcggacgggaagcattaatggcagcgcagcgataccctgatgattttgatggcatcattgcaggagctgcggcgatgaacttccagacccaaaatggggtatatcatccttggctggcacagattaacactgataatgatggcaaccacattttacttgcggataaattaacgctgattcataaggctgtactatctcagtgtgatgctcttgatgacgacaaagatggtctgattggtaatcctctttcctgtaaccctaatctgcagcatctcttatgcccgtccgggaaatcagataccagccagtgtcttacaactcaggagctggacgtactgaataaaatttatcaggggccaaaagacgctcaaagtggtttacctttgcttgctggtggtccattgccgggttctgaattagcctgggaaggtgtttttatccctaaaagtcaaaaagatcctctcttcagtactaaaattagccaggatgctaatgatgtgttgtttacaaaggaggatacgccagagaaattcgatttaaacagaataaagtttgatgcatcgtattttgacaaattgagtaagctacatcctttctatgattcaacgaatcctgacctccacgcattctatcagcgaggtggaaaattaattctgtggcatggactggcagaccagcatatcagtccgttgaatactatcaattatcatcttgctgttcagaaaaatatggggaagacagtaaccagtcaatttgaacggttatatttgctgccaggagtatatcattgtggtggtggtgaagggccggacagtattgacttactcagtcctatgatggcatgggtggaaaaaaacattcctcctcaggaggtgttgacggtacagcgtaataataaagatgcaaggacattcggccaacctacatcgttgatcgtttcccaggaatctcagtcatcagaacatgtgggaaaagaaccgtccgtaatgcgaattcgccctgtttatccatatcctgaggttgcggtatataatggacatggagacagaaatacccctgagaattatcatcctgttatttttgatggaacggataatttaacccaatggttggggtataaattcttctctccctatcagtttttaaatttctccgattaa

SEQ ID NO: 240409 - DNA, 510 bp, Klebsiella pneumoniae
atggccaatgataacaatcagttagcgctaattatcactgagcaagataaaagttctggtgaagttatacatttggttcctaactcaaaacagagtattcaacctaaatcgctactgcgattgggggtctttgttccgacagtcaaggatggcagcgaccctatggcacgaggtcatgtcatcgatgcaacgactgagttgtgtcgtctttcttctatcgctggagaggggtacgaaaagattagtatttttgggcccaggcttgatatggatacggatttcaaagtctggctagggatcgtggacacactcgccaacacgtttcttgagcctgatgggactgttagggtcaattttattgattttgctttcagttgtgggcttgctacaaaacgagttgattcaaggttaaggaaacgttttagcgactcactgacacggatccagcacacccatttccagttcatcaaaaactcaacagtagaagggaaaaaaggctttgttgaataa

SEQ ID NO: 240410 - DNA, 633 bp, Klebsiella pneumoniae
atgaaccttttagcttcagacttttttaattatggtattgtgatggcacaaataaaatttgtaataaaagatacgtttgatagcaatgaccccgtatttaagagtctaacggatactatctctaactataacaacgtaaataaactcaagttaataatcaatataacttataatgaaggtggtgaagttgctattatgctcgcttttgtagcaacaattgagaaagcggtgttgaataattcaaaccttagtatcgaactgagatttggtggttttgctatgagtgccgccgcttttgttttttgctattttgtattttatgctgacattccaagagtgagagtgctatccaatacacgactatctgtgatttatcataaaccccggatgaaacaaaaaaacgtatctaactttatttttgctaatgatccaattaaaatgaagaagttaactaagaaacaacagacagttctaataagttatacaaatcagtttgatgctgtctgggatgctgtagtagcaatctatgaaatgggtgggggagcatttgatccttccttgcttagttcgtataatggtaatggtgactttgcattcacactctcaaatcgagtgtttaaaggagggtattaa

SEQ ID NO: 240411 - DNA, 177 bp, Klebsiella pneumoniae
atgaacttagatgctaaaacgcttaaacagcttcaactgaaacgagctaagctgattgcttctggtgatcttagtaagccccgcctactcagtgatatcatcgatatggatgaagttgctaagcgaatgaaaaatacagaaaaaaagaaagccaaacctaagtatttagtagtttaa

SEQ ID NO: 240412 - DNA, 930 bp, Klebsiella pneumoniae
atgaaacagaatattacccagaaaattattgctcaacatttgctgagcggcaatatggttgcaggtgaagaaattagtattcgcatcgatcatactttaacccatgatgtcaccggcaccccagcctatctggcatttgaaactttaggtattccacaggtaaaaacagagcgttcggtcagctatatcgaccacaatatgctgtataccgataataaaaacccggacgaccatatttatttacagaccgttgccaaaaaacacggcatttatttatccaaagccggaaacggtatttgccatacggtgcacttcgaacgctttagccgtccggggattacgctgttgggttccgatagccacacgccaaccggcggcgcggttggcgccatggcgcttggcgcaggcgggctggacgtcgcgctggcgatggcgggcgagccgacctggctgaaaatgccgcgagtgattaacgtacgcctgcacggtcgtatgcagccgggggtttcggcaaaagacattattctggagatgctgcgccgtgaaacggtcaaaggcggactgggcaaagtctacgaatataccggcgaaggcgtggagcatatcagcatccgcgaccgctcaaccatcaccaatatgggcgcggaaatgggcgccaccacctctattttccccagtgatgaagtgacccgtgagttctttattaaagagaatcgcgagcaggactggatttcattacagccggatgaaggctgcgagtacgacgactatattgatatcgaccttaacacgctggagccgctggtggcgatgccggatatgccggataacgtgaccgaagcgcgcaactgccgcgacgtgaaaatcaaccaggtgttcctcggcagctgcaccaacgcctcctataccgatttcggttttgttgaataa

SEQ ID NO: 240413 - DNA, 579 bp, Klebsiella pneumoniae
atgctggagcagtttgttcaggagcggggacataaaatagccagttactaccgggagaacataagcggtacaaaactcgaccgcccggagctgggacgcttactgatggacagtcaccgcaatgatattttactggtcgagcaaattgaccgcctgacccgtctgagtaacagtgactggatgacgctgaaaaagcagatagaacaacacgaactgcggattgtcagcctggatgtacccacctcatggcaggcgctgtcagataaagacccttcgcaggctgacccaatcacccgtgccgtgataaccgccatcaacaatatgcttatcgacctgatggccgcgatgtcgcataaggactggctgagccgccgccagcgccagaagcagggaattgaacgggcacatacactggggaaataccggggtaaacaggccgatcaggagcgacatcagaaagtcctgtactaccgacaggtaaagaaactgagtatccaggaaacggctgatgctacgggctacagtgcgtcacaggtttgccggatacaagcgcttcataaaaataatgaatcaacctga

SEQ ID NO: 240414 - DNA, 1131 bp, Klebsiella pneumoniae
atgagaaaactgtgttatttcataaattcggattggtacttcgatttacactggatcgatcgtgccatcgcctcccgtgatgcaggttatgagattcacatcatcagccattttattgatgacaacataataaataaattcaaaacattcggctttatttgccataatgttactcttgatgctcaatcttttaatgcattagttttctttcgtacttaccatgatgtgcaaaaaattattaaaaatataaaaccggatctcttgcattgcatcactatcaagccatgtttgattggtggtgtgctcgcgaagaaatttaatctgccggtcatcgtaagttttgttgggcttggaagagtattttcttcagacagcatgcctttaaaattattacggcagtttactattgctgcatataaatatatttccagtaataagcgctgtatatttatgtttgaacatgaccgtgacagaaaaaaactggctaagttggttggactcgaagaacaacagactattgttattgatggtgcaggcattaatccagagatatacaaatattctcttgaacaggatcacgatgtccctgttgtattgtttgccagccgtatgttgtggagtaaaggactgggcgacttaattgaagcgaagaaaatattacgcagtaagaatattcactttactttgaatgttgctggaattctggtcgaaaatgataaagatgcaatttcccttcaggtcattgaaaattggcatcagcaaggattaattaactggttaggtcgttcgaataacgtttgcgatcttattgagcaatcaaatatcgttgctttgccgtcagtttattctgaaggtgttccgcgaattcttctggaagcatcttctgtgggtcgcgcttgtattgcttatgatgttggtggttgtgatagccttattattgataacgataatggaattattgttaaaagcaattcacctgaagagctggctgataaacttgcctttttgcttagcaatcctaaagcacgcgttgaaatgggtattaaggggaggaaacgtatacaagataaattttctagtgttatgattatcgataaaacattgcaaatatatcatgatgtagttcgatga

SEQ ID NO: 240415 - DNA, 783 bp, Klebsiella pneumoniae
atgaataataaattagatgtaggtatcataggtgactggtttgtaacatatgctgggtctgaaaaggtggtttctgaatttataaagatattccctgaatctgaactatattctattgtcgacttcttaagtaataatgataaaaaacattttctcgataaaaaaattaatacaacttttatccaaactttgccaaaagcaaagcaattatatcaaaagtatttacctttgatgccatttgcaatagagcaactggacgtaactaaacatgaggttatcctctctagtagccatgctgtagcaaaaggtgttctcactgggccagatcaattgcatataagttatgtccattctcccattagatatgcatgggatttgcaaggtcaatatcttcgagaggctggtttagataagggatgcaaatctgccattgctcgatggatattacataagataagaatgtgggatgttcgaactgcaaatggagtcgatcactttatagctaactctagatttattgcaaggcggatacacaaagtttatggcaggaaagcagatgttatatatcccccagttgatattaatcgttttagactcaatactataaaagatgattactatattacagcatctaggctagtgccttataagcgggttgatttaatcgttgaagccttcacgcatatgccgcataaaaaattgattgttgttggtgatggtcctgaaatgaaaaagataaaatctaaagcatcttcgcatattacaacctggaagtctttatag

SEQ ID NO: 240416 - DNA, 972 bp, Klebsiella pneumoniae
atgagcgaaataatggatttaaccgtcatcgaaataaaaccagaacaggcgacgaccctgtaccgggctggcggtcttgacgcttacctggagcagattcgccaggccgtgaacgaggttccggatctgaccaccaagaaaggtcgtgaccgtgtcgcttctctggcggcgcaggtatcacgcagcaagacggcaatcgagaagccggggcgcgagtacctgaaacgtcttaaagaggctgtgcgccctgctgaggcggaaattaagcggttcgttgacgcatgtgacgagctgcgcgatgcaacacgtcgcccactgactgaatgggaagccgagcaggaacgcattaaggccgaagaagccatgaacgcactgcatgccgaagcactggccatgaatgaagacttcgatcggcggctggcagctcgtattgagtctgaccacgaaatggccctgctgatgaatgacgctttcgaccgcgaacaggccgagaagaaagcagaagccgaacgccagcgcattgcccgcgaagaagagattaagcgcctggcagaagagaaagcaaagcgtgaagcagcagaacaggcgcagcgtgaaattgacgccgcagccgccagagagcgcgaagcgattttggccaaagagcgagcagaacgtgaacagcgagaggcagctgagcgtgcggagcgcgaaaagcaggccgctgtggaagctgaacgccgcaaagcacaggaagaagccgatcgcatccgccgcgaggcagagcaacgcgaacaggcccgcctggctgaggagaaacgtaaagcagatgagcaggcgcgccgcgaagccgacgttaagcaccgcaaggctgtaggcactgaaatcgtcaaagctcttctggccaataccagccttaccagggatcaggctatcgaggtactcaccgcggttaaagacggccgcattcctcataccggtatcagttactga

SEQ ID NO: 240417 - DNA, 981 bp, Klebsiella pneumoniae
atgaggacccggcatctgatggcgctgtttacaggagtgctgatactggccatcatcctgcccatttcactcagcatctggcaggcggcgcggcaggccaaaatgcagttctatcgtgaactggatgactattccaaccgtatcgtcgttcggacgctgcaggttgccgaccaggcccgggaagcgttacgagaggctgacgcacacaccgccgcctcctgtagccctgaacatctgcttacgctccgccgcatcgcctatacccatcgctacattcaggaagtgctctggctgcgtgattccgtgccgcaatgctcctccctggaagaccatagcgtcgcggtcaccttccccccgccggaccacattgcccccgacggctatcgcacctggctgacctcaattaacgatcttggcctcgatcatcagatgacggccatgggcagccggcagcacatggtgatgatcgaccccgtatcctttattgatgtcgttcccgccagcgaagagaagatccataccatgctgtttggcctggaccaccagaaaatggtgatcagcagtcagccgctgccggcgaaagtctggcaacgcattaaagatccgcatgtggatatgcttactctggataacacagtctaccggatccagcgcattcccgagctgggctctggcatcgtaacctggtcttcaaccttgccgctgcagcagcgcattcgacagcagctgttcttctggctccctgccggcattttcaccagcctgctcgccacctggctgctgctgcgtctgctaaggcacctgcgctcaccgcgcaacagcatgctggacgccctcaattccgaagcgattcaggttcactatcagccgattatttcgttgcaggacgggaaaattgccggggccgaggccctggcccgctggcagcaatccgatggcacttttttatcgccggatatctttattcccctggccgagtag

SEQ ID NO: 240418 - DNA, 570 bp, Klebsiella pneumoniae
atgctgattggctatgcacgcgtctctacaggggatcaaaacctcgatttgcagaaaaacgcgctggttcgagcagaatgtgagcagattttcgaggatacagccagtggaaaaaacgccagacgtccggggctgaggcgtgctattcgtcgtttaaaaccaggtgattctctcgtggtctggaagctggatcgccttgggcgtagtgttcgtgacctcatcacactggtctcagagctgcaggataaaggcattcactttcgtagcctgaccgacagcatcgataccagtacgccagcaggtcgctttttcttccacgtcatgagcgccctggcggagatggagcgcgagttgatcgtcgagcgtacccgcgcaggtttagctgcggcaagagaacaggggaggataggcggccgccgcagagttatgaccagggaggtagtgaaacgctgccgccagatgctggcgaatggagccagccggcagcaggtttccgcggtgattggtgtcgatgtgaaaaccatctatcgctattgccccgcatcagaggtcatcgtcgataagaaatag

SEQ ID NO: 240419 - DNA, 657 bp, Klebsiella pneumoniae
atgatttttaacgctgagatggtgcgggcgcttctcgacggtaggaagacgcagacccggcggcctatcaaatggaaacagactcggttcactgaaattggtgagcgcgaagacggtagcaaatggccgtggagcgaagacgcagagcatgcttgcgacttctggcacccatgcccgttcggcgccgtcggcgaccgcatctgggtgcgtgaaacttggggcgttgtcagtcacgcctttagtgacgatggcttgatgattgactgggttcctgatcgtccagcgactgccatccacgaaatgccgtttggcaatggctattactctggctacgccatttatgcagctgatggtgattttacctggggtgatgacgatggttatgaagatggccgttcgtgctggaaaccttccattcatatgccgagagcagccagccgcattctgttggaaatcaccaacgtgcgcgttgaacgcctacgcagcatgagccaggacgatgcacgcgccgagggtgttattgccgcatctggccctatggaagtcggtttagcattccgcgagctgtgggactcaatctacggcgaggagagctggaaagccaacccctgggtttgggttattaagttcaaacgaattgaggagctgacagcatga

SEQ ID NO: 240420 - DNA, 300 bp, Klebsiella pneumoniae
atggctgagattttccagtttaagccaaaggctacgctgacagcagcagaaaaccttgaagccttcatttccaagtgtcgggatcaattgactgtattcggctccgatatagattgggaagaacctgtttggccaaacataactgtgtttgccaagttaggcgttatcacgcgaaaacccgttcagggagaggtacaagaccctgagttcattgattttgctaaagcctatttccgttaccagcaagtgcatcggcccacgggaacaaagaatgaaagtaaggccctacgtgcggtttaa

SEQ ID NO: 240421 - DNA, 222 bp, Klebsiella pneumoniae
atggcggtaaaatttatccgggtgcttctctatccacttggccagttgtcgggcattttcagagagcagtctgactctagttacggctgttttagcgattccaaccatcacggtgggtatccatttgatatcaccctcatagcctttccccgcaaaaaaacgccaaccatagcgctctataccttcacgatcagtttcaaatacctcgcaatcaacaggtaa

SEQ ID NO: 240422 - DNA, 981 bp, Klebsiella pneumoniae
gtgcatacgctaaatagcttgtggcaacacactatggaacgtttgccagaaggcttcccgtggtttgataaagacaaggggattaagtacagcaatgccttgtttgcactgaatgttaatcagttccacggaaaccgaggatgtcttccggttgaattacataagccaatcaataacttttttaacagtgatctgactcctcgcgaggctctggatggaaaacatgccagtatatttgatcgccatggttatcgtactgaaaatggagaacgggtcaaattgacctcgcatcaggctcgacacctgctcaacaccattgcccagcgtggaggactgtcaaacttggaaattgccaagtggtctggacgggcagacgtgaagcagaatcgaacctacaaccacatgactgaatacgaactgattggcatggctgaacgccttgatctcacaaaagcgctatttgggcctgctggcgaagtggcaaagcatctgcccgtgactatgcaggaattcaatacattagagcatgccgcagtccatgtgacggagtatggctactgtgtgcatgattacaccatgagtccttgtgagaagttccgagattgcgtcaattgtatcgagcaggtttgtatcaaaggtgatgatactgaaaagttggaccgaattaagaagcgtctcgaaaaatcggaacgactatttttgcttgctgaagcgtcagtggaaagcggcgagatgggggctgatcgctggtatcagtaccacaagaaaactgttacccggcttcgtgatttagtggctattttagagaatccagacattgaaaatggtgcccagattaagctccgtggcaatgatttcagccagcttcgccgtgttgctgaaaaaaagtctattgaggccattgagaaaaaaggcaaaggaagcgaagaagctgtgatgttagataatttgaaaaccttgtttggggggggccttggctaa

SEQ ID NO: 240423 - DNA, 2475 bp, Klebsiella pneumoniae
atgagcctagactttggcaagctgaacgcgggtatcggtgcaaagcaaactgatccgagaaaaatctttactacgctcaagagagacgcccgtttcaagcgtcctctggatgagcaggctgacgtactcgacgcttggtatgcacggaggaaagccaaagatttgacgcttaagatgaatactggcggcggcaagactgtagtgggcttgctgtgcttgcagagttcgcttaacgaaaacatcaagcccgcagtatacatcacgcccgatagcttccttgtcaatcaggtactacatgaggcgaaagagcttggtattcccgctacagatgacgagaaggaccccgacttccttgcaggtcgagccatccttgttgccaacgtgtggaagctcttcaacgcacgctcggtttttggggtcggacagaagaagattccgatcggttgtgttgttgtcgacgatgcgcatgcatgccttggcgtggttcacgaccagttctcgattaaggccgatgtcggcacaccggtatatgacggcctactcaatctctttgagaacgacttggaaaatcagtcacctgccggtctgctcgacgtgcaggccctagaccctagtatcgtgatggaggtgccctattgggcttggcagtctcatcaaaagcaagtcatcgagctgctgcatacccaacgggcttccgcagatttggagtggagttggcccttgctgcgcgattgtatcccgctttgcacctgcctgttcggcggtggcaaactagaaatctctccacatttcatcccgatcgatcgcattccgtcattcgacactgcacagcggcggatctatatgacggccaccttagcggacgacacaatccttgtgagccactttggggccttggcggatgaggtcgttaagccgattcgacctaaaggaggtggcgatattggagaccgcatgattcttgctccacaagagatcaatccggacttcaaaatggaggagatccgcaaacttgtgtcagcgatcgcagagaacctgaacgtcgttgtaatcgtcccctctaaagagcgcgcaaaattctggaaagatgtcgcgcatcaaactcttgacaaggacaacattcaggcaggtatacagcatcttaaggacggtattgtgggtttaaccgtgctgatcaataaatacgacggtatcgacttgccaggaaaggcctgtgagttgctcgtcattgacggcttgccggaggtttacgggctcggcgaacggcgcgaaatgttactgttggacggaaccaaacgccagcttgtgcgtcaagttcagagaatcgaacagggaatgggtcgtggtgtacggtccagtgacgatcattgtgtcgtactattgcttggcggcaggctgacgcaacgactccatcaacccgaggccgaaacgatgttttcttccgccactcgcgctcagattgacctcggcaaaagtgtggcggagcagttgcgtgggcaatctctcgagaagcttgaagagattatggacctatgtctggcccaagacgacaactgggtgcaggctggccgtaatgcggttgtgaacgcgcctcctatcacagagggacgcattgatgctaatcaggtgctgttgcgggaggccttcgatgcggcacgcgtatcgcgacatgatatcgctaagaacaagactcaggtagcggtgaacgcaacaagtgagcgtcagatcaaaggctacctgaaacagcagctagcagcgtacacgaattttactgacccttcacaggcgcaggaactgcaactggctgcgctcagcgacaactatcggcttcttaagccattggcaggaacgacttatcaccgtctcagcgcaccagccagcggacaagcggccgcagccgttaactttatgacgcgctttctcgaaggtaacgacctcatcatctgggtcaacggattattagatgatctacagtggggtgaagaagggtcaaagcggtttgaggccgccatgaaggaactaggagtgtttctcggtttcgggtcagaaaggccagaagatctagtgggtcgaggaccagataacctttgggctctcggtaattcacggtatttcgtgatcgaatgcaagagcggagctgtactggccgaacgaatttccaaacatgacacgaaccaattaaatgggtccatcgtctggtttgatgaaaagtacggtcacacttgtacaaggacgcccatcttggtgcatcccaagaccatctttgaacatgctgcatcgccccattccgatattagaatcgtcaacggacaagggctcactaggatgcgcaatgcgattcaagcatattcgatctcgttggccagtaatggcgggtatgctgacgcgcaagtagtgcataaacaacttaaatatcacaaactttctgcggaagatattgaggcgttgtgcacggtcgcacaaggtgccaagtga

SEQ ID NO: 240424 - DNA, 1608 bp, Klebsiella pneumoniae
gtgacccgcgagctggcgacgctggccccgctgtcggcccagctggaggagagcgacctgacgatcagctggtacatgtatcacatcaaagcgctggtcgcgttgcttaacgaagatatcaatcagtacgtgacccgggtggcggaagcctcagagcagcgggcggcgcagagccatcgggagctgcgctccatcagtatgtttattctgctttccgcgctgctggcgctggcgatcaccggctgcgccgggtggtacatctaccgtaatctcggctcgaacctgaccgccatctcgcgggcgatgtcgcggctggctcagggagagccgaacgtctcggtgccggccctgcagcggcgcgacgagctgggggagctggcgcgggcctttaacgttttcgcccgcaatatggcgtcgctggagcacaccacccggctgctgaaagagaagaccaaccagatggagatcgatcggattaagcgccaggagctggaggaggcgctgctgcatagtcagaagatgaaggccgtcggccagctgaccggaggactggcgcatgactttaacaacctgctggcggtgattatcggcagccttgagctggtggagccggatgcgcgcgatgcgccgcgcctctccagggcgctgaaggcggcggagcgtggggcgcttctgacccagcggctgctggccttttcgcgcaagcaggcgctgcatccccaggcggtggcgatggcgccgctactggagaacctcagcgagctgatgcgtcactccctgccggcgaccttaagcctggagattgaggcgcagtcgccggcgtggccggcatggatagacgttggccagctggaaaacgccttgatcaatctggtgatgaacgcccgcgacgccatggcggggcgcggcggggtcatcaaaatacgcacctggaatcagcgggtcacccgcagcagcggccagcggcaggatatggtggccctggaggtgatcgatcatggcagcgggatgtcgcaggcggtgaaagcccgggtgtttgaacctttcttcaccaccaaagccaccggcagcggcagcggcctggggctgtcgatggtgtatggctttgtgcgccagtctggcggccgggtggcgctggagagcgcgccggggcaggggacgacggtgcggctgcagctgccgcgagcgttgaccgaggttgagaaggaggtggcgccagcggtggacgagccgcccccggcgggcgagcggctggcgctggtgctggaagatgaagaggatgtccgccagacgctatgtgaacagctgcatcagctgggctggctgacgctggaaaccgccagcggtgaagaggcgctgcagctgctggaggcctcgccggatattgccctgctgattagcgatctgatgctgcccggggccctgagcggcgccgatgtgatccataccgcccgacgccgctttccggcgctgccggtgctactgatcagcggccaggatttgcgtccggcgcagaacccggccctgccggaggttgagtggctgcgtaagccgtttacccgcgcccagctggcgcaggcgctgagcgcggcgtacgcgaggatttga

SEQ ID NO: 240425 - DNA, 759 bp, Klebsiella pneumoniae
atgagcctgaccctccgcttaaccggcaccggcggcgctcagctggtgccggtcttcggctgcgactgcgcggcctgccgccgcgcacgccgcgaggagagccaccgacgccgcccctgtagcggagtggtcacgttcaacagcgccgtgacgctgctcgatgccggacgaccggatctgatggagcatcatcccgccggcagctttcaacaggtgctgctgacccactaccatctggatcatgtgcaggggctgtttccgctgcgctggggagtcggcgcgtcgattccggtctatggcccgccggatgacgcaggctgcgacgatctgctcaaacaccccggtctgcttgactttagccataccgtcacgccgtttgtgatgtttaacctgcaggggctgcgggtgacgcccctaccccttaatcactcgaagctgacctttggttatctgctggagtcggcccacagccggctggcctggctctcggataccgccgggctgccggacaagacgctgaagtttttgctcaataaccgcccgcaggcgatgatcatcgactgcagtcatgagccgcgcgcgcagaccccgcgtaaccataacgatctaaacaccgtccgcagccttaaccagatcattggctgtccgcgggtgatcctcacccatatcagccaccagtttgacgtctggatgatggataacccgctgccgacaggtttcgaagcgggctatgacgggatggaaatagcgctggattaa

SEQ ID NO: 240426 - DNA, 954 bp, Klebsiella pneumoniae
atgaaactcaccgacgtggcgattgtcgctgtagagggctttagcccgtttcactacgccgtcccctgcatgctgtttggcgattcggtttcggaaatcaaacgctttaatctgcacatttgcgccgagcggccggggctgctgcgcgcccgcgatggttttgcgctgtacgccaccggcgattatgccgcgctggaacaggcggatatcgtggtggtgccttactggggcgaggtcgatcgacgtccgccgcaggcgctgcttgatagcctggtgcgggcccgggataacggcgcggagattgtcggcctgtgcctcggcgcgttcgtcctcggctacgccgggctgctggatggcaggcgagcggcgactcactgggagttcgagcaggatttccagcgccggtttccgcaggtgcagctggatatcaacgccctgtacgtcgacgaccggcggatcattacttcggcgggcaccgcggcggcgctggactgttgcctctacatcatccgccagcgtttcggcagcctcgcggccaaccagatcgcccggcggatgattgtttcgccgcaccgcgagggcggccaggcgcagtttatcgcccagccggtgccgaaaaacacccgcgatgcgcgaatcaactgcctgctggattatctgcagcagcatattgccgagccgcacagtctcgattcgctggcccgggtggtggcgatgagccgccgtaccctgacccgccacttcgcccgggcaaccgggatgagcattaccgactggctgaccgccgaacgtctgcgccgcagccagactctgcttgaggcgggcgatctgccggtcgagcaggtggcggaggcggtgggctatctttcagcggtcacctggcgccagcagtttaaagcgcgctttggcgtcagcccgacggaatggcggcgtacctttcgtcgcggcgcttag

SEQ ID NO: 240427 - DNA, 255 bp, Klebsiella pneumoniae
atgaccctgccgactctcggctggttggtggccagcattgtcatcgctaccagcctgcgcttcggtctgcagatgaaggggcagaagtacgcggcggtggccagcgcggcgatcatcatggtgctcgaaccgctgctgacggtcattgccgccgcgctgtggtacggcgaacagctgccgctgcaaaagattatcggcggcgtgctgatcctcgtggcccagctgtggttccgctggcggatgcttaagccgtaa

SEQ ID NO: 240428 - DNA, 906 bp, Klebsiella pneumoniae
atggacagtctcagtcatctgctggcgctgctggcgccgcgctgcgaagtgaacctgcactgtcgcttcggcggccgctggcaggccgggcaccagcaaatgcgcagcggcgtggtgccttggcacgtggtgctgcgcggcgaggggcggctcaacgtcggcggccagacccatcacctgcgcgcgggagatgtcgtcctcctgccccacggttcgccgcacctgatggagagcctggtggagtggggccaggtgctgccggtggcgcaccggtttaacggcacggtgacggaaatgcgcgccggcccggcggagggggcgctggagatgctgtgcggcgaattctattttggtccgcacgtcagctggctgttcagtgaagtatcgacgctgatccatctccataccgatgcgcgtgaagactgcccggagctggacgcgctgcttaatatactggtgcgcgagagcctggcgcagcgtcccggcggcagcgctatcgtgcgcagcctcggcgatacgctgctggtgctcctgctgcgcatgctgcttggcgagcaacagccgcccggcgggctgctgcgcctgatgagcgatgaacgcctgatgccggcggtgctggcggtgatggcgaccccggagcaaccgtggacgctggagagtatggccgcccgcgcgtttttatcacgggccacctttgcccgtcattttgcccgcgtctatcacctgacgccgcaggcgtggctgtcgcagttgcgaatggcgctggccgcccggctgctgcgcctggagcgtcagaccaacctcgaggtcattgccgaacgctgcggctttcagtcgctggcgtccttctcaaagcgcttcaaaatgcgctatggcgtgacgccgggcgagtggcgacggggctag

SEQ ID NO: 240429 - DNA, 2886 bp, Klebsiella pneumoniae
atgatcagtagaggctcagaatggaataaatgggatcttcatgtccatactcctgcatcagttttgagaaacgaatatagagacgactgggataaatatattattgatttattcactaaagctatcgaagaaaatataaaagtaataggaattactgattattttttcatagatggatataaaaagataaaaaatgactacttatctaaccctgaaagaatggagcaattattaggtgctgaaaattatgagttagttaaagaaataaaggtattaccaaacatcgagttcagaattgataaattagttatcggaaaggaatcagatttaaggtggaatagaaaagtaaattaccatctcttattatgtgattctgtttctccagaaaccatagaaaaagaaattataaactgtctgaaatttgatttttattcagaaccaggtgccagaacagacagaagaaacttcacaaaagagaatataatcgaatttggcgaaaaactatgccaacatcaacataattttgctggacaaaatcctttatttgtagggatgataaattcatgcttcaatcttgatgaactcaaagacatattaaacacgaacggaaaattcaaaggaaaatatatattagctttaccagcagacgaagatctaagtaaagtcagttggaagagtcaaggccatgccgttcggaagcatctcataatgcaatcacacatgctcttcacttcaaatagtggcactattgatttttgcaaaggtgaaaaacacgagacgataagagattacctgaaagagtttggaaacataaaaccttgcgtttggggttcagatgcacactcctcagataaaatgtttaaacctgacgataacagacacacctggataaaagctaatctcagttttgatgggctaaaacaaataatatatgagcctgagtcgagagttaaaatccaagaatctcaccctcagacaaaagctggatatcaaacgatattaagagcaagatttatatgtgaagataaaaaattccccaaaaattggatatatttaaataaagatttgaatacaataataggtggaaagtcttctggaaaatcacttttactttacttcattgcatcggctataaataaaagtgctgttttagaaaatataaacttagctgacaccgataactataatacacaaggtgttgactttgaggtagaatgggatgatggaagtattagtttgctctctgacttagaggatacaaaacctataacttacatacctcaattgtatattaataaactggcggaagttgaaggaaaaaatcagctcaaaaaacttatcgagtcaattctgaagcagaatagagatttttatgaattcagtgaagtaaaagactctgaaattaaattaaaaaacaaagagataaaagaaaaaattgaacttcatcagacattttcagataattacacaacattatgtgatgaaagaaataagattggtgataaatcctctattgaaaaggagatcagttcattagaagaacaatgtaaaaaactaagagaaaaatcaggattcaatcagcaagaaataataaaatacaataaactcaacaccattctaaaaaactctgagaatagactaagagtagttgataactatcatttaaactccacaaagctaataactggcctacacgaaaggtttctagattacactaatgctttaaaatctgatttagcatcctcattaagtgttgcggatactgctattttttccagaaaatactattccattattgaaaaaggtatggacagtattcgcttagaaactcaaaagcattttgagttgaaaacaaataaaataccaaaactcatcgataaaatcacacaaataaaagaaaaatcagagttagagatcactcctttattattaaaagttaaggaaaaagaaagcctcgacttatttaccaaaaaaataagtatcgaaagagaaaaactaagcaaaataaatgggctgcaacaagtaatagataaattattagtagatgcaaaagacaacctttctaatttacaaacaaactatgcagaattaatgtctttatatcaagactatattattgagttatcatccgagcaatatagtatttctgatgatatgaaaataatccctaaactgagtttcaataaagatggatttgataaattcatagataattatgacatgagaggcaatttacaacctttaatgggtgatgcatatgatcctaaagagatttttgcttttgatgtagtaaaccatatagaaaaaataaataccattttagcaaatacaaaaaaagaaacctgtcccaaagtgaaaaaagggattactaaaaaggatatcctttacacactctacgatgactatttcttcattgattatgaaattatctataataatgatgaaataataaaaatgtctccgggtaaaagagggttagttcttttgaatttattgctgcacctgagcaatgcatcgcatccaatactcatagatcaaccagaagataacttagataacagaactatttatgaacagttgaacaggtttattaagcaacgcaaaaaaacgagacaaataatattggttactcataacgcaaaccttgttgtttccgctgattcagaatgtgttattgttgcaaaccaaactggtcaaattaaagatggtgagaatgaagagtatcagtttgaatatatcagtaatgcacttgaaaatacttttgaaaaaatacaggatacttgccttctcaagagtatgggtataaggcaacatgtatgtgaaattctggagggaggccaggatgcatttaaagaaagagaaataaaatatggcctaagattctaa

SEQ ID NO: 240430 - DNA, 1263 bp, Klebsiella pneumoniae
atggataacaatacgaaaggcgcatggttagtacatcatgctgaaaaaataaaaaaattcccaggggctgatagtgaatttgaacaaataagtttctccggaaagtgtgggattcttttgtcaagtatcagctctaattcacagcacattctatctgaagatagaatcttaagtttatctaaagctgccggtataaatcgtagaacggaacttccgtctatcctagatgagttaaaaaagcaacaaataattgcacattcaaaaaatttaaataaatatgaagttttgggcattcctgactccattacaatacttaatcatgtttcaagaatttttgatgaatccaaccccagccaatcagaaagtgcagcgattgagctttctgagttatgctctgaatctccaataaatgaaagcaacgctaaaacaataattgaagatacattcaggctagcaagagcggatagtgataatttattcaataatagtcaactagttggcttcgtagattctgaacaagcatactcgggcgacaaacttttattcaatggtaatttattcagaacagatgatgtcaataaatcatacactatactcaattcacttagcgaaaacgatgcgagaaaaacaaaagaattcaatgagttactaagaaaatccagctgtatcgacattacttcagccaagatggttcttggggacgaattattaaaaaaactacactcaatcggggtttttgatataaatcagattggcaatgagtttggcaatcattattatattacaaagccttctgctttcaacaaattctcctcctcggctatagacgatgcttttgatttggctaaagcgtttgttacctctcttacttttggtatgcaaaaaagtgctagttcccgtggtagaatcacgatgattgaagctctcttaaggaggttaattaatggttatgaagtcggcccagccacagctattggccgcgactatcaaatacttgaattaaaaggggtaattaaaataaccgaatctgagaaaaaaggtcaatacaatatgagcttattaaaaaaggatattggccaaatggcacttaaggttataacaagtggagatgccagcttacaatctttaaatacactcccttcagtaactgttacttcttacattgcgccggaagcaacaagagcactcgaaagaattaatcaaccagaaccactcaagagaaacataggggaaatacttaaccaactgaggaagggtaactaa

SEQ ID NO: 240431 - DNA, 1041 bp, Klebsiella pneumoniae
atgagtaatttagacttaaaaaagggtgagcgagcagaagaattattaagaaaatactttctgagtattggttattatgttttgagatcagttgaattcaaatatcatggtttcgatattacagatattgacttatggttatattcaagaccatccccaatatctagagaaagaacaaatgttgatataaaaatgaaaaaacaaccacaagcacttgaacgtgtattgtggacaaaaggattgcaaaaggttttaaacctcgaaaaatgcatcgttgctactacggataaaagacctgatgtaacggaattcggcattgagcatgacgtacttattttagatggtaatttcctctcaaaattaacctccactgaaagatatgataacaaaagaataagtgaagaagagtttgaaagtattctaacttcactcgactctagttcttatggtggtaactggaagcaaagataccgtaaatcaaaagcgaccctagtcacaaaacttaattttgacggtgtaaatcatcttctggatgacattcatcattgtttagaaagagttgcaactgctgaaagtgtgtcttatagcccaacttgcagagccctttactcttcaatatctatgatgctgattttactggattattcaattaaagatataatatttaaagaacatgaagaacgcataaaaatgattagcgaaggtattcgctacggcatagacggtaaggttcaagctaaaaaactgttatccatgacaacaacattaatttcatccttcgtaggttctgcgccaattgataatactgcaatcacagcagaagttgaaaaccagttcaactgtattcccgctgagatcatagggaaccatttctctacaactcaatcgatgaaaaatatatttcacttagcaatagctttcgaaggacttgcatttggtaaagaaatagttagaaccatagatcttgaagttgagatgaaatcaattattggggtgctatgtgattttaactcaatagacagaaaaaaggtcattagataa

SEQ ID NO: 240432 - DNA, 1161 bp, Klebsiella pneumoniae
atgatgacagaacctttaagttgggagagctggagcaaggtttacctgaacaagaaacacaaaaaaagagcctcacttgaacggtgggggctacgaaacctacactctgtagaaactcttgatcacattgtttctgaagttaaaaaaaaatacttaaacaacaatccgtacattaatgtcagtgcaaactcagtttgggttgatgggacacctcaggcaaaattcaccgtaagcaagtacgaaaatgtgaacaactcctctacgagttatggcaacacgaatcaggttagtcttaaagccaggaaagatgaagtccttaactgcgaactagcagaccttttgtttatcttcaatgaatttaacagccaaaatggttttaaaaaagtccgtgccgttttattacagggcaagtgctcagaaaaaaacaatttattgcccgatggtccttcaacagaaaaagaaaggaagctacttgaatcagttaaccgggaagaacagctgaccttatatcctggtactaaagcatcgggtaaggaaatagggacgtacaaacttggtggcgatgagccgggactcgctgattgtgccaaatatctgatgatgccgaaatatgaagcatggaactataaatcacctgaaaacacagatccttatgtgatcggttggccagaaaattcgttaagtaaaagtctcggtgtgacaaaaaattacttagatgctgtcatcgatgaaatgctcagatctcaaacaatgggaagagaggttaaattcaaaaatggcgatattgacaggacatgcgaatggtcaaaaatgatagatgacttgctgacaagttatcatagcgtaactatgaaaggctatgatcgtcaaaggcgtttttataagtcatctagatatattcctgaccatattaaaagccttattttgatgaatgatgatatcagattgcttaacctcttaccgatagattatgattattttctctggtgctatggcgatctatataattattttttaaaaaaatacggcgttgagcatgaaaggcttatacaaaaaaagttatggcaatatttaaatttatttatttcagaacaggggcctatcatctcgacgataactgtaaacattgattatcatgaaggtgagtttacccgagattaa

SEQ ID NO: 240433 - DNA, 186 bp, Klebsiella pneumoniae
atgcgtgaattaaccaataaaagtgcgtcaatagcctgtgaactggctgcgttgttgatgtttgtcgaagagtgcgacgttgatcaggttgagcgggaaaaccttatcagcctggctagacgagtatcggatcagttggcagcaagcatggtagagcagaattcaaagggggcgctcaatggataa

SEQ ID NO: 240434 - DNA, 213 bp, Klebsiella pneumoniae
atggctgacttacagcatacccaaactcgcccggaatttacatggagatttctctccgcttctgagcgctaccctaacgccaaaccattggtgatctacctcaacgcatccagcgaacaggaggcccgcgacagtatgccgggtgtaaacctcattttcgctgcacgtctcccattccatgcctttcaggctatggaggtacgccatgcgtga

SEQ ID NO: 240435 - DNA, 186 bp, Klebsiella pneumoniae
atggcaacaggtgcgaagaacgcaaagtcacaaatgactacagttcgaatcccccatgatgtgatggacgatatcgaacttttgaaatacgaaggtgaaagcaccgcagggtttcttgtcaccgctgccaaaggcgagatcaaacgccgccagcgcaagcaagccaaagaagcagacaaagagtga

SEQ ID NO: 240436 - DNA, 846 bp, Klebsiella pneumoniae
atgacaaaaaaaattaacagtaaaagagacttaccaaagtcattcagcttggaaaaatatgatgaccttgaaaatatgtctgataaggatttgtttcgtcagctttattggcgatgcgatgatttaacaataaaaaatacagactgccctgactatggtttgcaatatggtgctaaatacccgcttaacaataattttggtgatccattcggggaactcaaagcagaagaatggtttcttgaaaagcaaaaggaatacgagtacaagactcagcctgatttgctaaaattaagttacggcgatggtataaaaccattaatgagatttgagttggcatttttaaataaaatcaatgctgataaaggtcactggaaaggaaagccaatagtagttgacgatgatttggtgggggatttgtttacaacagataacggtatgttttgggctgtcatgcgcgagccggtaaacttactttctgatgttgtggaaaacgtgatgattactgttgacttaaacaacagagatgaccttttgattgaagcattcacgaacctcctcccaaagtggcgcgaagaactcggaatacctgaaccagataagccagtctcaggggactgggagagcgtcagacggaaaataattgactacagaataattccacttattgatttaatgtcatgggaaagcgctaccgacagcaaaatatctcttggcgtactcgcagtatcgctgttcccggatggagaaaaggagtcattcgccatagctcaaacggtaaaacctttcttggataaaattataagaagtgattctttagataaaatcaggaaagaattatctcgataa

SEQ ID NO: 240437 - DNA, 1224 bp, Klebsiella pneumoniae
atggctggtggaacgaacaaattaagcgacacgtcgcttcgtaaaatgctgggaagagagagccccggagacagcttctatgctgatggcgatgggctaagtgtgaaggtgtccagatcgggcgtattgacctggtacttcactttccgcatcggtggccgggaatcaaaatctcagcgtataaagctgggtaattatccagacctttcacttaaagcagctcgtgagaaacgagagcagtgtcgcgcatggctcgcagaaggaaagaatccaaagtaccagttgaacgttaccactcaggaaacgttaaagccggtgacggtcagggatgcccttgaatactggatcagggaatatgccacccataaccgcgctaatgttgaaaagcacattgagcagctcaataagcatatctttccttatataggtacttatccgctttctatgtgtgaaactcgtcactggctggaatgtttcgccagggtaaggaacgaagcgcctgtagcggctggctatattttgcagatgtgtaagcaagctcttaagttctgccgggttcatcggtatgcggtgagtaacgtactggacgatctgaccattgacgatgttggacgtaaacagaataagcgggacagggagcatacccggcaagagcttgctgatatatggcgggagtgttcaggcttgaaattcaagccctactactcctcgctgctacgtctgctagtagtgtttgggtgccgaactcaggagttgagattgtctcgcgtaaccgaatgggatctaagtgattgggtttggactgtacctaaagagcacagcaaaggtggtgagaaaatactacggcctattcccgtagatatccgcccatttatcaaacagctcttagagcaacaccaaagcacagggcttttgcttggagagataaagaagccggaagctgtcagtcagtggggaaggatgttgtataagcgtctgggccactctgaaccgtggacgcttcacgatctacgccgtacgttttccacgactctgaacaacatgggaattgctccgcatgttgtcgagcagcttctgggccatgcgctgggcggtgtcatgtccgtatataaccgcagtcagtatttacctgaaaagctggatgcactgaataaatggatgcagagattagaggttattacctctgatatctcaaatgttactattcttgaggtcgcaagatga

SEQ ID NO: 240438 - DNA, 315 bp, Klebsiella pneumoniae
atggacgaaaagaaaatcttttcatcgttcttctttggtatgccagagatccacgatatagatgtcactatcgcgaagttcgtagtgaacctcgtaatcatcgaatatcacttttcggacctcacgaggttcataccgagtctgctgtacgccaattgccggatgcgctgtaagaccagcacaaccagtaatcaggcgatccaaaacgtcatcggcgtgctggcggctgtactgaagggcaaaacggtagatacgctccaggtcatcctgagctttaagcgtccagtaaacttccatttatcaggatttctttaa

SEQ ID NO: 240439 - DNA, 249 bp, Klebsiella pneumoniae
atgggttcgcttactaaacaaaccatcagcgcacagatacccgttgaattggctgctgctgttgagaatctggcaattgagttggaccgttctaagagctggattattaaagaagcgttgaccagtatgctggccgaaagagaacggcgtcaccagagcattcaggccggtcttgcggatgtggatgccggtcgcgtggtgagccactcggacatggtggattttgctaatcgcttaaagaaatcctga

SEQ ID NO: 240440 - DNA, 342 bp, Klebsiella pneumoniae
atgaaaactttacctgcatcaactcagcgggcggctaagccatgcccgacgcccgtagttgtctggcaaacgctactcacccgtctgctggagcaacactacggtctgacgctcaacgacacgccgtttggcaacgacggcgtgattcaggagcatattaatgccggtatcacactggctgatgccgttaactttctggtagaaaaatacgaactggttcgtatcgatcgcaggggatttaactgtcaggagcagtcaccttatcttcgggcggtagagattttgcgggcgagacaggcaaccggtctgttacgacaaagccataatatttcgacacgctga

SEQ ID NO: 240441 - DNA, 327 bp, Klebsiella pneumoniae
atggagaaaaacgatcccatcgaatgggggcttcgacgcgatatcacgccgcgtgtaggagcacgactggtacaggaaggaaatcaattgcattacctggctgaccgggtcggtgtcaccggcatttttaatgaagctgagagccgcaaactgaatgcagcatttccgcatttcgtggagcagatggagttaatgctactctccggggaactaaacccccgttatgcacattgtgtcaccctgtaccatgatggatttacctgtgaagctgacacgcttggctcttatggttacgtctacatcgtcatttaccccactcaacgctga

SEQ ID NO: 240442 - DNA, 474 bp, Klebsiella pneumoniae
atgcctgaactgattttacccccagccttcccggtgaatgaacagcgtattatccgccgcgccatgcgcctgctggagaaatacctgcgccagcctggtgaacagtttcttgccgcgaattgtacgaaaacctggctacaactgcatctggcgcgacaggaacgagaaatcttcgtcgcactctacctcgataatcaacatcgcctgctggaacacgaaactctatttctcggcacgatcagccataccgaagttcatccccgtgaaattgtaaaatctgcactgcgccataacgcagcagcggtgatagtcgcccataaccatccgtcagggattacggatgcaagtaaggcagacagaaccatcaccgcccaaatcgtaaacgctctgggtctggtcgaggttcgggtgctggaccatttcattatcggtaatggcgaaatattgtcttttgctgaacggggctggctgtag

SEQ ID NO: 240443 - DNA, 549 bp, Klebsiella pneumoniae
atgatggaaaaggattatcagaaggttatcgctataccttctcccacaatggtaaagatatttgcaaaacctgattgcagcaatctcctgccgttcgtcaatcgaactgctaaagccttatcaatcattgtcggtttaatgttgtgctattcatcctacgcttacgcagatgaacaacgctatatcagcgtccgcaacactgataccgtgtggactcccggtaatatctgcgtgtatcagttccgtctggataatgggggaagcggtgtgagttttggcccgttgtctgtttcgctgcgcctgaaagacaaggcgggcaacacgctggcgacaggagccatggacgttgcccccttcggtggcagcgatgccactcgttttcaggacgcttttctggagcataaatgtgtcgaaaacgtcagcgctgttgaaatcataaaggcgaccgaagagcgcaacggccatcaggtcagactgccactgtccgttttcgacccacagtattaccagccactgctgatatcagttgccgggaataaggcatcatag

SEQ ID NO: 240444 - DNA, 633 bp, Klebsiella pneumoniae
atgaaattatttaccactacattgatggctgccagcatttgcctgggaacagtttttccggctgatgctggaaatatcgtcggctctgtcaaagcctggcagtacatgcaggctaacggctggaaatcggctgatggtatggatgacaacacactgcacaatatgctctaccaggccaatgttattgataactacccgtggacgaagcagtttttgctacgtacccgtggtggtggtgcaattttcctggccgataagaaaacccacaccattcgtcaactaaaactgagtcctgtcggtgaaacctacaatgatattgaaacggtttatcagggagatgataaaggggaaggctgctacttcgccattatagataaccaatcctcggccagatacgaagcggagcaaagtgttctatacagctatcctaaggtcgataatattgataacgaactggctaaagtcaggctgaaattcagcccacaagtagttacggtcattccggataactgcgtaaataaacaacagcaggccgcattggcggctaagcgctcggaagaggatcggaagctacagcaatgggtggcgcagcaaagcttggcggaattgtgtcgtcgcacaggcaactgctaa

SEQ ID NO: 240445 - DNA, 876 bp, Klebsiella pneumoniae
atggttcgggtagttcgtaatgatggtgaaatgataaaaatcctggaaaatgcactacagcgatacaatattaatttcccatcacatgcaggtgataagaattatcgcacctacctcgaacgtgtcagaaaacactgccagtctcttggtcataacgagcaggatttagatactttcttcgctgaggtggaaagctatcaatcattttccttccctacggaagttgatcttggatggtttaaaagtgatgctcgtgcgagcctgtggttggcatgtgaattatattctgaaacacaaggaatgacgttgggagcgggggttcttgatattttgtctccagattctttaccgcccgatcatcttgtcaggatacagaatatcaggaaggtaatttacagctggccactgagtataacacctaaggagtttatgaaatctaaagcaatagaatgggctaaattaattgagcatgaagatctttttagtgatttttcctctcaagaaaatgatgtttctggttggttaaaaggttatctagacaaacatattccgtctttaggtgtgcgtgtttgtggtaattccagagacgaaactcttgcatggtgctacgcactatacttcgaatggagaaagaaaaactcagggtcacctgatacagtgagcttatttaaaattaagttcaaaagtgcatgggcaacacaaaagaataggttgaaaaacaaagtatataaaaagctaaagccactgaatatctacatttcagaagatactcatcggatgttaaggacgttagccttagatgaatgcatatcaaacgataaggtagttgaacatgcaattatggctgcatacaaaaataaaagatcaaagcagtga

SEQ ID NO: 240446 - DNA, 579 bp, Klebsiella pneumoniae
atgaaacgaccatataacgccaacccaaagtataaaatggatgggctattgctgactgatatcaatacgcatatggaggctatgttccagcgattttcaaaattactacctttcaggatcgactttgcctataaaaagaactcagcaagctttgggcatgcctgcaaacattcaatgtataacgaagtccaaataatgattaaagagttcgaaaaatcccttccgattgtgggctattactgggtgatagagtacacgaagagaaaaggactgcatgtccattttgtttgctatctgaatgggcagtttcagaactgtcattatcctgtgtcccgagcaatggggaatatttggaaacaagtgacaaatcatgatggatatcatcacctttgcgtccccaaagatatttacgaagtcaaaattggcaaggttatccggcattttgatacggacgagatcgatgatctgcgttatgtcattagctatctggctaaatgtgagcaaaaggaaaatggcatcatcgcgggtaaaagcgtgataccggtaagaagcaaccgaggtagaccacgcatacgctga

SEQ ID NO: 240447 - DNA, 207 bp, Klebsiella pneumoniae
atgaccatcaaaccttccttacttgaagaccaatttgtcgatatggctttcattacccgtctattaagcgtcagtgataagtggatataccgactcatcaaagatggtgtctttccgaaacccatcaagctggggcgcagttcccgctggctacaaagcgaaatagagtcctggttgcaggagcgtatcagccagtcccgtcagtaa

SEQ ID NO: 240448 - DNA, 576 bp, Klebsiella pneumoniae
atgcaagatacaatcgctcgctatgattttttactcaaaacctaccaaagctggcttaccgatctgactaaactgactgtcaggcatggaatatgccatcagaatatttatcccagccattaccttacgctgtcgacactctacttcccggataccggccctgttcctgggatcgtaccacagtgcctgtaccgaatgatctataacaaaaccaagccagaaccgctgagtattcaaaatgatttacgtcttagcctggagactgacgggcaattgctttttactcacggaggccttgaaggtgtattgcttagcgagtgtgtcaggctcaagcaacgctcacttgccaataaactgataagcctgcttcagcagttcaataacgtggagtatcgccataagcttgtttggcttttctggtatgaccgtatgctcggagcgcctctcgacgactggctggagaaccttaagaaaatgaatgatgaagagttctgcttttggctgttacagcgtcaggaagaaaactcaaagctaacccatctaatggatgaatatgtgaattttacgcaccactga

SEQ ID NO: 240449 - DNA, 1164 bp, Klebsiella pneumoniae
atgagctggcctatggtgaaacttaaagattgctgtgacgtagtgggaggagccacacctaaacgcaacattgcttcttattgggaaggggatattccttggataacacctaaagatatatccaaccttaagtctccttttatttatgaggcacctgaatatatatcttcggcaggatataaagctgctgcaacatatatgttgccagtaggaactatattacttacctcacgagcaccaataggaaatgtggctattgctggtattgaactttgtacaaaccaaggttttaaaagcttaatcccaggaaaaaatattcacaataaatacttatatcattgcattaagaaatttgtaccaaaattagagttgcttggtaatggtgcaactttcaaggaagtatctaaaacagttgtagaaaatttcgaaatacctttacctccttttgaagaacagaaacgcatcgcgagcattctcgataaagcagatgttatccgtcagaagagggaacaaacggtcaaactggctaatgattatttgcgtgcaacctttttggagatgtttggggacccagttcgcaatcccaaaaattggaaattaggaaaatttggtgatatcgcagattgtcagcttggaaaaatgttgtccaaaaaatcaaaaacagggattttttcaaaaaaatatttacgaaacgctaatgttagatggcgaaaaattgatacccacgatcttcttgaaatggattttaatgaaaaggaaatgtctaagtttgagcttagaaggggagatttactggtttgcgagggcggagaaataggtaggtgtgcaatttggaataaccaaattaaagattgttattatcaaaaagccctgcatagagtacggcctaattatagcttggttacttctgtatacttacaggaatatttatattcaatggcaaaaaaaaatgccttctcagagtttatatctgaagtgactttcagtcatttgactgccgaaaaactaaaaaatttacttgtaccagtaccaccattatcgcttcagaaaaaatttgaactgatatataataaattcaattcattacttaatgataagtataacaatcatgagctttcgtttaccttattatctaacaccattaatgaaagtgtttttaaataa

SEQ ID NO: 240450 - DNA, 129 bp, Klebsiella pneumoniae
atgcccgatgtcatgcatcagggcagcgagtctcaactcctgaatgttgtgttttggtatctgatcgatatgaccaaacacatggccatcatcatatttcttttgataccgtatcgcattcaggcgtaa

SEQ ID NO: 240451 - DNA, 606 bp, Klebsiella pneumoniae
atgaataatatcagtttagttcccatagaagctgctaatgacccgatccaactgtacgaagcgtgtggttctcatggaacctgtcgttctagagctgaatcaatcctttccgaagggttcaagtcaggcacgaaaggcagacgtggtgatggtgcttatctttggtatgctgaatcagtaggttgcgaatatgcaacacagttagcgcatcattggtttttatcatcagtaaagcgccgagagtttgaaggtgatgtggatcaaagtgaagcgattctatggggtaaggttagcgcgccgcccgatgaagttcttaatcttgagcgccctgagttccgtgacactttaagaaaagctttagcacggcattggactacaattaactccaaagatccgaaagagaaggaggcgttagtatgctctatacatcaaatgcttatccaaggaatcgagactactaagccagtaggcgttgtacttgctacggtaacgccgcctaagatgcccgatgaactagctggctatgtaggacaaccatatgccttgatagttagaaatctgagctatctgaccatatttagtgacattgagagggttccatcatga

SEQ ID NO: 240452 - DNA, 294 bp, Klebsiella pneumoniae
atgaaccgagaaatgaaagcagcaatggaagctgcattacaagatattctggctatgtccccagaggattttttagctgccgcgaacaaaactatgtccggtgatgttttcgaatttttgatgtccacagggaagtttgagtctttcgatttaaagcaactcgaaccacatcaaatccaattcgctgaggctatgcctgaaaaaatcgttgatatgttaaccaaaatgagagtttacgaggcccgcgttaacgtcgatacctttgactcagatgatttcgcattggcggcttga

SEQ ID NO: 240453 - DNA, 303 bp, Klebsiella pneumoniae
atggctgagttacgcgcaggcgggttggcgatagttatttattcagaaaataaacctgaaattggcagatgcgttgagttagtcgaaaaagtaacgaatggatatgtatttaattttcctggcgtgggtaagcatgggtggcgtgatgaaacccctggatggttagtaaagggagatgtatcgatttatacaaacacaccttcaggtggtttctcttatttctacgatgaagagctcatgccaatcgatggagaagacttctctcacgaagatgagcgtcagaaggtgctggagcatgcctaa

SEQ ID NO: 240454 - DNA, 258 bp, Klebsiella pneumoniae
atgtcagaacatcaaaaaccagatacgaaaatttatgatgaagcctgcaggatagtgggtcagtgttgtcttgcactggctgataacggtgctgaaacccaccgggaccagcttgtgcatcaactaaaacgtctatcatggctgtacatgcaggaaaccaacgaaacaaaccttgctatgctgtttgctattgaaaagttggcgaccagtgaagactggaaaaagccttacttgggtgaagaccataacaaagggtag

SEQ ID NO: 240455 - DNA, 177 bp, Klebsiella pneumoniae
atgacccgcgccaatatgtcaggtgattttattgctatggatgtttctaaatcgggaattattcccggcgtccccatggttatttatgagaaggggatatccgctggtgggtatgttgcgacggaagaggacgagaaggcgacggactgggcagtttttacggtcgcgcaggactga

SEQ ID NO: 240456 - DNA, 342 bp, Klebsiella pneumoniae
atgacccaaccaacgaaaagacccatcatcttaagccagctccagatggcggcgctggagaaaattcagaatgatgagcgcgagaaatcaccgtatggcgccgccccctcaatccctgatatagccagggggatgattgatatagcactggcatatctggcggcccaggagaccgaaaagcgccggaatgcatccaaaaatgcgcttattagacatcaaacaaagttaaaccagatggaagattctcgcttagctctggaacaatttaacgactcaattatacgtacattaaatacagcgcagtcggatgccgaaaccgatggtaaagcgggggaaaagtaa

SEQ ID NO: 240457 - DNA, 606 bp, Klebsiella pneumoniae
atggtcagatacgccgatgacatcgtcatcgggttcgacaaacgatacgatgcccggcgcttccgtatagccatgcagcgcagactgagggagttcggactcacggttcacccggagaaaacccgtctgatggagttcggccgcttcgctgccgaaaaccgtgccatcaggggaaaaggcaaaccagaaacgttcaacttcctcgggttcacgcacatcagcgggaaagatcgcaacggcaggttcatgctgatacgaaagacccgccgggatcggatgacggcaactctgaaagccatcaaagacggtctgcgaaggcgctggcattactcaatccccgaacagggaaaatggctcaggagagtggttcagggatacctgaactatcactcggtaccgggcaacttccccaccatgcagaagttcaggacacacgtaacaaacctctggcgccgggcgctcaggcgcaggagccagaaggatgatacgacctggacgaaagcaaacaaactggcagccgcatggctaccaagggttcgggttcttcatccatggcctgtggagcggttcaccgccagacacccgaggcaggagcccggtgcgtaa

SEQ ID NO: 240458 - DNA, 159 bp, Klebsiella pneumoniae
atgatgctgatcatatacaaaaaagaacaaaaaggaatttatttatttttaaaaatgcttatcactgcgcttatcactcattattttggcatagaatgggggttgttgtatattgctgcaacaaaccccctcccctcattactaattaaacctaattaa

SEQ ID NO: 240459 - DNA, 852 bp, Klebsiella pneumoniae
atggaaaatcatgttttaatgtttcctgatatgtttattaacgcagataataatagcgtacatatagcacaatctaatttaaactacaggaaattattaataaatgctctttattgggataagattattactacaaacaacaatttaattaatatttctaataatggcactccaggcgttccagagcttaaaagggaagggttatttactgaggtgatgttgcctatcaatggtaatggtaattttgctacgatattatatgaagcaaacatgaaatttatgctcgagtcacttgcgcgtaaagatataaactttattgccagtgaggctgataaggtattgattaagaatagtaatgaggttgcacctgataatggcgagttatttactttgataaatgcaattccagaacctgatgaaagtgtaaacatacatgatgttttggagtttaggcataaaagacagggtgaactaaaaaacctcatgaacaaaattaatgagttgaatattagggtgttaaaagctgaaaacagagacttagagttaaaggcagcaataaatgaaatagatacagcttgcgcagaggttataaggctatataaagaaagtctaattaaatttaatctatcaaaggtaaaatttaatttaagtccgttgaaaattattgccggggctggggggatgtataaaggagcaaaacattttgagttaccagaaacagcagcgataatttccggtatagttggaggcgttttcactgcaattgatttttcagaatcattttcactaagaagaatagataaaacaaacccatttaactatgttggagaaatgagtaaaaaacttaattag

SEQ ID NO: 240460 - DNA, 441 bp, Klebsiella pneumoniae
atgacgccgcggctctgcgaccgcaaccggcattactatcatgaatttatgttgccgaataacgtgcgcgacatgaccgagatctttatccgccgcgagcggcggatcgtcgccggtatctcgctgatgcgcgacgtgcctttctccagcgaagagcgccagcgggcccaggcggtgctgccgctggtagagctggccatccgcgactgcctgcaggaagaagatgatctgcccgccatcctgacggcgaaagagcgggaaatcgtcggcatggtgcgcgaaggcgccagcaataagctgattgcccgccagctggatatctcgctctcgacggtaaaaacgcacctgcgcaatattttcgccaagaccgaagtggtcaatcgtaccgaactggtttcccgaacctggatgccggccgctcagcgtacgctgcatctgtaa

SEQ ID NO: 240461 - DNA, 2181 bp, Klebsiella pneumoniae; identical to SEQ ID NO: 186045

SEQ ID NO: 240462 - DNA, 816 bp, Klebsiella pneumoniae; identical to SEQ ID NO: 220143

SEQ ID NO: 240463 - DNA, 1290 bp, Klebsiella pneumoniae; identical to SEQ ID NO: 190629

SEQ ID NO: 240464 - DNA, 354 bp, Klebsiella pneumoniae; identical to SEQ ID NO: 59978

SEQ ID NO: 240465 - DNA, 423 bp, Klebsiella pneumoniae
gtgaaattagcaaatcagcaaatacgtgctgaattattttatgaagtctgtgacagccttacaagctttgcctcttacatgcgaaaactggttaaattcagaccttacgatcttggttttgatccctattttttcatttatggtcaggccattgatatcgtcagaaatgaaggtctggtgagtacacttaaaaaactcaacatttttaagatgaatattggccttgaatcaggatctgaccatacgttaaaaatgatgaaaggcaagagagattcagttgatgtgaattatgcagcgctgcgaaaactcaaagaagcaggtatctatgtatatagttcattcgttctcgggactgagtttgaaacggactcaacgttaaggggaactattgagtggatcaaaaaatcatacatgaaggattaa

SEQ ID NO: 240466 - DNA, 948 bp, Klebsiella pneumoniae; identical to SEQ ID NO: 170880

SEQ ID NO: 240467 - DNA, 1398 bp, Klebsiella pneumoniae; identical to SEQ ID NO: 170879

SEQ ID NO: 240468 - DNA, 1473 bp, Klebsiella pneumoniae; identical to SEQ ID NO: 170878

SEQ ID NO: 240469 - DNA, 960 bp, Klebsiella pneumoniae; identical to SEQ ID NO: 170877

SEQ ID NO: 240470 - DNA, 1500 bp, Klebsiella pneumoniae; identical to SEQ ID NO: 170876

SEQ ID NO: 240471 - DNA, 975 bp, Klebsiella pneumoniae; identical to SEQ ID NO: 170875

SEQ ID NO: 240472 - DNA, 1524 bp, Klebsiella pneumoniae
atgaacgacaaaatcagtcaggacacgatcaacaaagccctgtgggccgcgtgtgatacgttccgtggcaccatcagtgctgatacctataaagactttatccttaccatgctgttccttaagtacatttcggatgtctggcaggatcattacgatgaatataaaaaacagtatggtgatgcaccagaactcattgaagccatgatggccaacgagcgttttgtactgccaaaaagtgccagcttttatgcgctgtacgaacgccgccatgagccgggtaacggtgagcgtatcgatcaggctctgcatgcgattgaagaagctaatggcaccaaactgaaagacgccgggaaaagcgtgttccaggatatttcgtttaacactgaccgcctgggtgaagaaaaacagaagaacaccatcctgcgtcagctgctggaagactttgccggtgaagatcttaacctgaaaccaagccgtgtaggtacgctggacgttatcggtaatgcctacgaatatctgattaaaaactttgccgccagcggtgggcaaaaagccggggaattctataccccgcctgaagtttcggacctgattgcagaactgctcgatccgcagccgggtgataccatttgtgatcctgcctgtggttcaggttcgttgttaatgaagtgcgggcgtaaaattgtctccgggcatgatagtcgtaactatgcattgttcggtcaggaagcgatcggttctacgtggtcgctggcgaaaatgaatatgttcctgcacggggaagacaaccataaaatcgagtggggcgataccattcgtaacccgaagctgctcgataaaaatggcgacctgatgctgtttgatatcgtgaccgctaacccaccgttcagcctcgataagtggggccatgacgaggccgagaacgataagtttggccgttttcgtcgcggtgtaccgccgaagactaaaggagattacgcttttatctcgcatatgatcgaaaccctgaaaccgggaactggccgtatgggcgtagttgtgccacacggtgtgcttttccgtggctccagcgaaggtaaaattcgccagaaactgatcgacgaaaatttgctggatgcggtaattggtctgccggaaaaactgttctacggtacggggattccggctgcgattctgattttcaaaaagcagaaagttgatgacaaggtgctgtttatcgatgccagccgtgaattcaaggcaggtaaaaaccagaaccagcttagcgaagaaaacattaagaaaatcgtcaagacctaccgtgatggcgataacgtcgagaaatacgcctatctcgccagcctgaaagagattcaggacaacgactataacctcaatatcccgcgctatgtcgatacctttgaagaagaggatgagattgacctgctggcggtgcgagcagaacgcgagcaactgaaggcggaattggcgaagctggaaacggagatggctggatatttgaaggagttgggttatggctcgtga

SEQ ID NO: 240473 - DNA, 465 bp, Klebsiella pneumoniae
gtggatcgcatcttcaagatcaacatcgagggcgtgctctggggcatccaggcggcggcgaccaagttcaaggcgcgcaagcagaagggcaagatcatcaacgcctcgtccatcgccggccatgacggttttgcgatgctgggcgtctattcggcgaccaaattcgcggtccgggcgctgacccaggcggcggcgaaggaatacgccagcgctggcattaccgtgaacgcctattgcccgggtattgtcggtaccgacatgtgggtggagatcgacgaacgcttttccgaggtcaccggcacgccgaagggcgagacctacaagaagtacgtcgacggcatcgcgcttggccgggcacaaacgcccgaagacgtagccgctctcgtcgccttcctcgccagcgacgattccgactacatcacggggcaggcgatcctaacagatggcggcatcgtctatcggtaa

SEQ ID NO: 240474 - DNA, 939 bp, Klebsiella pneumoniae
ttgaataacgcagtactcgaacttttcaacgaccgcttaccgcacaagccgtacttttcggacgatctgcactttggtgtacgcattgccggtaaggaacgcgccattctggcgaaatacatccagttcaatcagcctcacgccatgttctggctgggattcgacgtcgatcgcgccggtgccgctattgactggagcgaccgcaatgcccccgcgccgacactgacgatcaccaaccccgacaacggacacgcgcacctgctgtacgcgctgaaaacctctgtacgtaccgcgccggacggaaaaatgaagccgctgcgctacgccgccgccgtggagaatgcgctacgtaaaaaattagaggctgatgcggggtattcgggactaatctgcaaaaatccgaaccacggacactggaaaattgccgtatggcagccggaactctacacgctggactggctggctgactttctcgacctgaacgcggcgaacgacaaagaaatcgttgccgactacggcttaggccgtaactgcaccctgttcgacaaaacccgcaagtgggcataccgtgccatccgtcagggatggcccgagtatgagcagtggctgcaagcctgctatgagcgagccagtgcctataatctgcaatttgcagctcctctggatgaaaatgaggtgaacgggatagctaaaagcattgctaaatggactgcatcaaatttcacagaagaagctttttatgaatatgtgaagaacactcacaattcagaaattcaaaagaaaagaggtgctaaaggcggtaaattaagcagttcaggaggtagaccaaaagggagtcataagcttgattcctataattttaagaagagttgggagttattaggtattagtcgagctactttttatagaaggttgaaaaatgctaatttatgtgaatag

SEQ ID NO: 240475 - DNA, 1590 bp, Klebsiella pneumoniae
atgctaatttatgtgaatagttttagctgcattggcgataacagtttttttgatgtttctagatcggttactgggtggataaagaaagtatctgggcttcacctatcaatagatgaagttttctctagaaatgatttcaaggtaggtggttcctacgtaagaacatacacagctgataaatttgattcaaaaacctactctataatgtatacacatcctgacaaaaatgtcagcggtaggcaatggataacggaaataggaatatccaaagaagagcatgctacatttatttctattttactggagataagcgacgttagtacaatggttgatagccgtcctatggcgaccaggccattattggtttcctttttaaaaagaaattgtacctttgatcatgatgtggttggtcagaacataatctcaattagaaacgattatggtgactatcaatatcttctacatgagatatatagggatgatagaagttaccctctagttttccttagttctaaaaacggtgtctttccaacaaatgcgttgaagctacaagagcaattgttgggtctagcgcaggttgtttcaaccgagggagacatagactcctgggaaatggagcgtcttttagggaggaggtactctagttgggatggtgcaataaatattatttatccgataaatacatctggtgaagctgggactcgtttgatcttaccaaatcaaatagaggctgttttttccaatggtacgccggtcaataactatatcctttcaataataactcatgggacgaatgggttcaaaaagaaaaaacatatatcacctgtactcaccagagctaaaaggcttgctgatgataacaaatcatttagagagagaataaggttagctcagaataattctgaatctgaagagcttttaaatgaagctctgaaagaattggatgaaatgaaagtgtctcatgatgaaaaagagttattttatcttgagcaggtggagcttgctgagaactcattgagggaggaattaaaaagaaatgtatttcttgagtctgaagttgataggttaaaatttgaaaaagagtcattatcatcaaacgcgcaaaccaataatatagacatagatatagataggttagcgatcttgttgtctaacaggctaactccagttgccgttctctctatattggagattcttctccccaaaaatgtggttattcttaaaagtgcgtatgcctcagcaaaaaaatcatctggatttaaacttggtcaaaggcttcttttccttctgtataagctgagtactgaatacttatctgtctttcttgaaaagggagataacgaggctaaatcaatactgggcgctgcatactctgcaaatgagtccgacagtgtcgaaagatcaaaatctctttctgacttacgtacatttgagtacgaaggcaacaagataaaaatgttcaagcatgtaggtattggtgttgcacacaataaaaccgagacgataagagctcatttttatatcgacttggaaaacaaaaaagtagttatagggtattgcggagaacacctgcccgtgcaatcaacataa

SEQ ID NO: 240476 - DNA, 408 bp, Klebsiella pneumoniae; identical to SEQ ID NO: 182227

SEQ ID NO: 240477 - DNA, 333 bp, Klebsiella pneumoniae
atgacaatatctgtgcctgtcaggtctcttgatacacatgaactgatgcctggcgatatttacccacatcctgcagcggggggaattgattccctgtcacatcgcgaggtctgttctctcttcagtgaccacatcatgtatatctgcagcgcgttagttattcttctgcttgttttcatcgcaggtgtctttttccgaaaaataatgacgtcttccgtggagcgtaagcgaaacacggcgtcagttatttccgatgcaaagccagaagtacagagcaaaccggaatacttccatctttccatggctttgttgaataaatcgaacttttgctga

SEQ ID NO: 240478 - DNA, 693 bp, Klebsiella pneumoniae; identical to SEQ ID NO: 236610

SEQ ID NO: 240479 - DNA, 327 bp, Klebsiella pneumoniae; identical to SEQ ID NO: 92459

SEQ ID NO: 240480 - DNA, 267 bp, Klebsiella pneumoniae
atgcatcacggaaaaccggtttatgaccggacggcctgggaggaagactgtatccgtaaggtgtcaaaacgtatccgtgctgcgggcaaggcgccgacggcagagcgggtgatctccggactggactttggtttctggaccaattttctgacgaaaaactacgatgaaccgcggaaccgctcgctcctgtggccccagctgcttccgtcggtgttccccgggcaccccccgtcacgtgctggaaaagaaatttacccggatccgtga

SEQ ID NO: 240481 - DNA, 243 bp, Klebsiella pneumoniae
atgtctgctttgttaaaagccagccataatgatgcgataatagcccgttgtttacagactatttcccagttaattccactaacttcagcggtgttttatcgagtaaataatcgtttaaaacccgaaaactatatattgcataatatttccgataatacgcaccaacaatatctggaaaacttccagccgctggatccgcttctgccgtcgcactttagccaccagaacggctttgttgaataa

SEQ ID NO: 240482 - DNA, 825 bp, Klebsiella pneumoniae
atgaccgacattataaacggagacatttacaagtattttggtacagaagaagcattatccgaagcgagtcacataaccaacgttaacacaggggagcgtgtcgagctatctaacaataccaaagcattatacgcccgtatgcgcaagcgttttcatttttttaccacttcgaacattggcggaaatacaggtatctactatgacaacgtagaagaattagccgcaagtgttggaatctcgaaacgtacagccttgcgttgtctggacgacttgaaacaagtgggtttggtgattgctaatctttcaggacgttccaatcaatggattgtagccaacattacaccggattctttcttgcttgaacgtaacgcagggacaccaaaaaatcctgtctgggtggattgtctaaaacatcccgtatttggtaatgccagggaagacgtggtgcaaggagtgcaggaagaaaagcaacagcctattccagaaaccgatccgatgtgcgaaatggatgaaattgaagtgggagaggatgagccgcctgtcattcgtgtagaaaggcagaccgttaaacctaagcaaaagcgtaataaatctaaacctgtgcaaaataatccattcgagtttagcagtccacgtgatgaaacgaaggattggttttacctcaaacattatcagggtgcagagcggtttaccacctttacagattttgatctcccgtatttggcactattcaaggcacagggcgcactcactaatccctatgctctggattatctccagctcagaacagatcaaatacaacgacagttagcgaggaatacatga

SEQ ID NO: 240483 - DNA, 405 bp, Klebsiella pneumoniae
atgagcagaaaagaacgcaacgtaatcgcccgtattgaacgacaatccacagtattaccccccgctaaatcgctagtctctagaaaagagtttcgagagctatctcgcctctctatggaatataactccacccctggagaatgggaaacagaaataatcgagcatgactcccctccgttatcagaggaggagcagaacgccctagatgatattctctcctcctgtgatgctgtatatttcaaaccacgtaaaagaaaacagtatattatgaacagcacagacctgcgcaaacaccaaatcctaggatttgaaagctatatccactactgcgggtatttatcgactaatggcctcaataaccttgtacgcgattttgacgcagtatatgcagataaggaggaataa

SEQ ID NO: 240484 - DNA, 225 bp, Klebsiella pneumoniae
atgcaccaacagacaacacaaacaagacactttaatagaatcctcaattggtgccaggggcaggtgagagaaatcgagtttattctcgatgatgcctatctgagcgaagaagaaaaaatagcagcgcttgaagaacttctggataaatgcctaaccatgcaagcgcctctcattgtactaagcaataaaatcaaaacagcaattaaacaattacaggatcaataa

SEQ ID NO: 240485 - DNA, 378 bp, Klebsiella pneumoniae
atgcaatttggaacatttctacaatcaaacgggaataacgcattcgcccgttataaagtggtggcacatgcaagtgatgccctgctacaggataaattggtagccattacagacggcattgcaaccgatctggttgtaggcgatatggtcagcactacaggtgcaaaagctacagcagccgctgatatcgcgtttgttgttgtagagccagcgtttgcaggggatacagctatcgtggtagcaaatcccgtacacgttattatttcaaaactcggacttgagttaaacggaatggcagaaacagatgttctgtctcgccttaacactctgggctttacgttcactgattataacaccgtagcactacgcaccacctaa

SEQ ID NO: 240486 - DNA, 198 bp, Klebsiella pneumoniae
atgctcaaatctaaagtactgaaacatttcggaggcgtatcaaaaactgcaattgccttgggtatttctcatccagcagtttgccgctgggggaaggtgattccagaaaagcaggcttttgttattgatcgtattaccaatgggaagctcaagtacgacgccaggctttatcacaagtctaccaagtcggctgcttaa

SEQ ID NO: 240487 - DNA, 1338 bp, Klebsiella pneumoniae
atggcaaatattagcgaccaactcgcggctgatattcacaacgcattcagcaaatactacacagacatcgccaatcaggatcagatctttttcggcgttggcgacgtgcagatcaccaagcaggacggaaccactgcaactgtgcgctcatggaacaaggtgatcggctcagtggataccgcagctcaacgcggagctgcgaacaccttcacggccctgcaaacgttcagcgccgggatcaatgtctctgccggaaacatcaacgtgatgaacgacaacagcatggtgatccttgggaaaaacagcgatcttgcactgcttaaaaagagcggtcagggcggcaccatcgccgtcggcagcggcacgccattcaagatccagcgcacgaatacagcaactgtctcaccggcttctacggtcgaggatattttgaccatcggcacggataagaaaaccacgcttgccggagcgcttgccgctggtggagatgtaacggcgagcgggaacattgacaacacgacaggcgggaaggtgtattctcaggcgcttgagctatcatttagcatgccatacatcgacttccattttaactacagcacagacgactttaccgggcggattatagccactgcctccgatcaaattagtgtgcagggtagccatttgcgagttgacagggatcttcgtgtttttggcatggcagatattaaagggtggacgcaatgcggagtcgacctttcgtccaacagaacagacttcggttcccctgctattggttcgttggtttcaggagggcgtattcgatccagaatgctggggcgcggcggtaacgttgacccctccggtgcgtggggcgggttctatgttgaggagtacgtaggaaccgaacacaggattgtcatgtatatggacggcttcgggagaacagacgcatggtcattccgctcgggggggacaatctccacacccaaaggcgacgttctaactaccggttcagacgtgcgcctgaaaacagacttcacccaagcgcctgagaacgcctcagagcgcattgaacgcttgggggtgtgtgagtaccggttgaagggagaaacgcgcgtgaggcgtggttttatcgcacagcaggcggagaccgtagacgaggtctacacctatcaggacgtcgagcaggagatcgacggcgagaggttccgggtgatgaacgttgactatgtggcaatcatcgctgatcttgtttcgtcagtgcaggagttaacaaaacaagtgcgtgatttgaacaagctggttcaaactacagacgtacattcagtaacttcagaaggttgccatgtcacctag

SEQ ID NO: 240488 - DNA, 186 bp, Klebsiella pneumoniae; identical to SEQ ID NO: 203965

SEQ ID NO: 240489 - DNA, 225 bp, Klebsiella pneumoniae
atgattaatacataccgcactaaaagcgatcttctgacattggctcaagagatcgccgcgcttctgtcatgtgcttcttatttggcaacgatcagaggggatgaagagcgtatccatgtaatgagtttaactggtattgcttatcggcttgctgatgaactggcaagtgagctggatatctcggatctcgaccagattaagtcttgcaaggatggcgcccaatga

SEQ ID NO: 240490 - DNA, 273 bp, Klebsiella pneumoniae
atggctgatcaacagcatacccaaactcacccaaaatttacatggctctttctggcaacccctaagagccatccagactgttcgccggtagttctgcgttttgatactgataccgaagagaatgcacgcgccgcattcccgggctgggaaatggtattcgccgccaaaattcgggcagaagcaccatgtcgggtcgcgttctttgactacaacacccgccgcggttgggcttttgatagcgcctcagacagagaggtggttggccatgattaa

SEQ ID NO: 240491 - DNA, 177 bp, Klebsiella pneumoniae
atgtcaacagatgacaacaaaaaagaaagattttccgtacagctcagattggatgctgatctattcgaaaggttaaatatcgctatgaaagaagatggtgacgacaatcgctcgggttggataaagcgcttgcttcggcgcgaactggataaacgcggcatcgagccgaaaggctga

SEQ ID NO: 240492 - DNA, 801 bp, Klebsiella pneumoniae
atgaaatttataccagcagacaaggccattgatgtaatgttagaaaatatgagccatgatgaaaaaaaagagtattttaagatgctgatggagaggaactataagaaattggactctattcatcgccatcatggttttttgcttcctattcctatcgatggattaatgagtgatagtgaggccaaaaaagtttccgaggagatgcttaattcatctataaccaataatgatattgttgaaatgttatttgatgattttaccccaaggaagattagcgaagtttcctctgataaccctgatatgatattgaaagccttgcgcgaaatagataataaatcagttaaatcaaatcctgtaaatgaatttctttcacaatcaatgggtgatgaagcgcttacagttatgaaggcttgcatttgcgctgatattgcagggtgtgagaatctaaaaaaagatttaatgaaggtatatactaatataataattaactcatataatcttaaagcatcaataattactgagagaaaaaaggttatcagcgaagatagaagtaaggcaaagaaaggtaaaactaataagcaccaatctgctgcactagcgatagcaagaaaaacatgggagcaatatcctactgctagcttagccgggttatctgaggagatatattcatatttgcgcaataaatataatggtgttcctgttgctggcactgtaaaaatctggctaaaagagtccgggttaaatccaaatgtaaagccaaaaaacagagagtttaaactcgttattcctgagggggtgtaa

SEQ ID NO: 240493 - DNA, 1458 bp, Klebsiella pneumoniae
atgcaggatacccggatcgcttggtatggggtgtttgtggaaacattcaaatttacgaaagctaagcttgaaagcctgccaccggccgagcgtggtcaggttgagtacggcgacaccattgttaatggcctgcgcatccgtgtcggtatcagtggcgtgaaaagcttctgtatatcacgtaagcggaacggcaaatttatccgcgccacccttgggcgattcccggatctcaccattgataatgcaagggcaaaagctcttgaactgctgggcggtgttgcgacgacaggtaagaacccgaacgaagtaaagcgtatcaacgaaaaggccgctgtgacgcttcatgacgcgctggagacatacatcaaaagccgcgctcatcgtctgagcgatgattcagccaaacagtatcgttctatcttggctaatttctccggcgactggatgaagcagcctattagctcaatttcccgagaacgtgttgagcagcggcataaggccgttacggatggtgttgtgtggttcggtgccgataaatctactctccgtgctggtgttggctcaggcagtaaggcccaggctgatttatgggctcgtgtgctgcgggctatataccgttttgctcatgaccattaccgtgatgaagagggaaaaactcttctgccggatcccccgactcaggtactgagtacaaaacgacagtggcatggaacagtcaggaaaaccgatcgcatccgtaccaatgagcttgctcgctggttcaatgcgctggtcgccgtcaggagtaaagcggaagaggggcgggatgatatcgctgcggctgtttgtgatgctgtagaaatggatctttttaccgggctgcgtaaatctgaaatcttgggattaacgtgggatcgagtgaatttaggcgctcgttacttctggatcgataccacgaagaatggcgatccgcttgagctgccaataactgaaactctgctcgagctgttccgccggcgccttaaaatgaaggctggggatgaggtttttgtgttccccggcgtacatggtgagataaaagaatatcgccatattatcgaccgtatcagcgcggccacggttcctgatcctaatccagatatgataaagccaattcctttcaagtggcatgatggccgccgtacattcggtacggtcgcagagctggtgggcgttggtaactacatcctgaaacgtctgctaaaccatagaacgatgagaagcgcagacgttacacagggctatctgcatttcagcgccgatgagctgatggaaccagcttcaagaatagaacgggaaatacttgagcatgcagggttggtggaaagcaaaaagggattggacaagcagcttgtatctgcgctgggtggtctcagtgatgaagataagcgaaaattattattttcattgttacaaaattctgaggtatctaataaatga

SEQ ID NO: 240494 - DNA, 144 bp, Klebsiella pneumoniae
atggcaaagattaaaggtcaagttaagtggttcaacgagtctaaaggttttggtttcattactccggctgaaggccagaacgttgagttcgaaattcaggacggccagaaaggtccggctgcagttaacgtaactgctatctga

SEQ ID NO: 240495 - DNA, 522 bp, Klebsiella pneumoniae
atggataaaaattcttctgatggcgtgccgttgccgcaacgctatggcgccattctgaccatcgtgcttgggctgaccatggccgtgcttgacggggctatcgccaacgtcgcgctgccgactatcgccagcgatctcaacgcctcaccggcggcttcaatctggatcgttaacgcctaccaaatcgccattgtcatcgccctgctgccgctctccttcctcggcgacatggtcggctatcggcgtatctataagataggcctggtggtgtttatctttacctcgctggcctgcgcgctgtcgcgtagcctcgaaatgctaaccttcgcccgcgtcgcgcagggattgggcggcgccgcgctgatgagcgtcaacaccgcgctgatccgtctgatttatccgcagcgctttcttggtcgcggcatgggcattaactcctttgtcgtgccgtctcttcggcggcaggcccgactatcgccgcagcgatcctctccctcgcctcatggcaatggctgtttttaa

SEQ ID NO: 240496 - DNA, 1320 bp, Klebsiella pneumoniae
atggattcaacaataagcgtgcagcccggcgaggcgccagattcactacatcgggcccggcgggtggcctggggtagttttgccggcgcggtggtcgactggtacgattttcttctctatggcattaccgccgcgctggtgttcaaccgcgaatttttcccgcaaatcggcccggcgatgggaacgcttgccgcctttgccaccttcggcgttgggtttctttttcgcccgctcggcggaattatttttggccacttcggcgatcgcctcgggcggaaacggatgctgatgatgaccgtctggatgatgggtatcgccactgcctgcatcggcctgctcccctcgttcaaccagatcggctggtgggcgccggtgctgctggtgttcctgcgagcggttcagggattcgccgtcggcggcgaatggggcggcgcggcgctgctctcggtggagaatgccccgcaggggaaaaaagccttttacagcagcggggtgcaggtgggctacggcgtcggcctcctgctctctaccgggctggtatcgctgattagcagcctgaccagcgaccagcagttcctcagttggggctggcgcgtaccgttcctgttcagcgtggtgctggtccttattgcgctgtggatccgtaacggcatggcggaatcgcaggagtttgaagcgcagcagagccaggacaacgcgccgcagatgaaaaagcggctaccggtagtggaagcgctgcttcgccatccgggagcatttttactgattatcgccctgcggctgtgtgaactgctgacgatgtatatcgtcaccgccttcgccctcaactactccacgcaaaacctcggcctgccgcgcgagctgtttctcaacattggcctgctggtgggcggtcttagctgcctgactatcccctgcttcgcctggctggcagaccgctttggccgtcgacggatctatatcaccggggcgctgatcggcactttgagcggtttcccgttctttatggcgctggagagtcagtccgttttctggatcctgttcttcgccctgatgctggccaatatcgcccatgatatggtggtctgcgtccagcagccgatgtttaccgagctgttcggcgccagctatcgctatagcggcgccggcgtcggctaccaggtggcgagcgtggtcggcggcggctttaccccgtttattgccgcggcgctggtcactttctccggcggatcgtggcacagcgtggccctctatctgaccgcaggatgcctgctgtcagcgctcaccgcgctgctgatgaaaaagcaccccgtcgactga

SEQ ID NO: 240497 - DNA, 207 bp, Klebsiella pneumoniae
gtggtgctggcccatgcggtgatccttattgacgccgatctgagcgcggcgcatcaggcggcgaacgccttcgaagcgcagctcggcagcgagcgggtctattgcgctgacaagaccgttactctcgcgcagctgcttcccggcgagcgccatctgctgccccgctttagcgaggcgctggcgcaggagctggacgcgtctcgctga

SEQ ID NO: 240498 - DNA, 771 bp, Klebsiella pneumoniae
atgaacttacacggtaaaacggcgctggtcaccggctccaccagcggcatcggtttagggatcgccaaagtgcttgcgcaggcaggcgcccagctggtgctcaatggcttcggcgacagcagccacgcccgggctgaagtcgccgcgctgggcaagatccccggctatcacgacgccgacctgcgcgacgtcgggcagatcgaggcgatgatgcgctatgccgaaagcaccttcggcggcgtcgatatcgtgatcaataacgccggcatccagcacgtggccccggtggagcagttcccggtggacaaatggaacgatattctcgccatcaatctctccagcgtcttccacaccacccgcctggcgctgccgggtatgcgccagcgcaactgggggcgcatcatcaacattgcctcagtgcatggcctggtggcgtcgaaagagaaatcggcctacgtcgccgccaagcacgcggtggtcgggctgaccaaaaccgtggccctggaaaccgcgcgcagcggcatcacctgcaacgccatctgccctggctgggtgctaaccccgctggtgcagcagcagatcgacaaacgcatcgccgagggggtcgacccggagcaggccagcgcccagctgctggcggaaaaacagccctccggggagtttgtcaccccgcagcagctgggcgaaatggcgctgtttctgtgcagcgatgccgccgcccaggtgcgcggcgccgcatggaacatggatggcggctgggtggcgcagtaa

SEQ ID NO: 240499 - DNA, 1176 bp, Klebsiella pneumoniae
atggctggcgagaacaagttaagcgacaaggcgctaaaagccttacatggtaaaccgcagccgcgtcaaaagatgttggccgatgatcggggactgtctgccagagtgagcaagactggcactgtaagctttgtttatttctttagacattctggccgacaaagtgctcctgtctggatgacgttaggcaagtatccagatatgacacttaaacaggccagggagaaaagggatgagtgccgggcatggctatcacagggactggatccacggatagagaacaaactcaccaaagagcgtctgttcactcctgtgacggttaagaacgctgtcgattactggtttgataattatgccagggaaaaacgcaaggagacggtgcgtatctatcgtcgttatgagagatacatcttcccctacattggggattttcctgtcgaaaaatgcagcctgtcagactggataaaatgctttgatcgcgtgaagaaaatcgcgccggttcagtctgccgcgatgctgattgagttaaagcagatctttaaatactgccgggtgcgccagtatgtgcgatgtaatgtgctggatgacttgagccccggtgatattggcaagtatcaaaacaagagagaaaggttgcttgaagaaagctatgttgctgacctgtggggtgtttactttcatggcaagggcaaaacccgcgtaatgaattacaaaaaacggatggcgattttgtgccttgtgtttggatgccgactcagtgaggttcgtctatccacatgggatgaatgggacttcgataaatggctttggacggtgcctaaagggcacagtaaaaacggcgaagagattattcgtcctgttcctcaaaagatgcgccaatggcttgtaaaccttcgtgaagagactaaacggcgtaaatatataatgggtgaacttaaatctaactcaacagtgagtgctatgggatgttcaaacttcacttccctcaaacatgaaaaacgctggtcattacatgatttgagacgaacgttctcgacaagtcttaacgatatgggcgttgattttattgtggtagaacagctgctggggcacaccataaagggcgtggccggaatctataatcgcagcaagtatattcctcaaaagcaagaagcgctggaccgatgggttgattaa

SEQ ID NO: 240500 - DNA, 228 bp, Klebsiella pneumoniae
atggctatgttgtctgttgtgaaaaaagaagatctccagtatatgcctgaacttgaccgaatgatccgtgagcctgagtgccgcgctatgaccacgctgtctaactcaacgcgctggcgtatggaacaggaaggaaagtttccaaagcgcataaaaataggcccgtcagctgttgcatatcggctgtctgaagtgcaggtgtggattcgaggtgaatggaaagcataa

SEQ ID NO: 240501 - DNA, 630 bp, Klebsiella pneumoniae
atgtctttattgagtcaattcaatttcaagttagaagagatagtggtatttcatagatttacactcgctactttcaataataataaaaaagtaatcgccgataggcacaatgaatttcggcaactagatgaggatgaaatgataaaacgctcccctgatgaattggagttgtatcaacttaggtttatgagacacatggaatatataaatcatcaagatgatattaacaacaaagcatcttatattgcgaatgatagcgttgttatcaacacttgggcaatgaatgaacaatacatgagtcggggtctagcacaattaatatcaataaaagaaaacaaagacattaacacaataaaacctccacatacctgggataaaataaaagataaattcctaaactatggaatcgattttgagacattaccatcatacgatgactttaatgagtgtcgagtcttaaacaataaaataaaacatttaaataccgtagattcggctctagagtcctttcctagtttttctggaaaactcaatgaaacgctttcagggatgaaattcccattacaaaaatatattctagcctcacaccatttcattggaatgctgttagaagaagcatctataaaataa

SEQ ID NO: 240502 - DNA, 873 bp, Klebsiella pneumoniae
atgatacgcgttattctatcccgcagagccaattataatactgtcttagtaacagaacgttgcaataacttgtgtatgttttgttcgcagccaccaaagaaatcaaatgatgactggctacttacccaatcagctcttgctatagcttcatttggtttggatggagttgttggggttagcggtggtgaacctttgctatatggagatgatttccttcacttcattgattttatcatcgagaattcaccagatactgctttgcatgttttaacaaacggacgcaaatttgctgatatcaactttactcaggaagtggcaaagcgaggcaaaaagatcaaaatcacctttggtatcccgctctactcatcaagaccacttgtgcatgatcatctggtagggagtgatggcgcatttaatgaaacggttaaggggttaattaatgcagggaactcagggattaatatcgagcttagagttattccgactctggctaactatacagaattggatgatattgtagagttcgttggccgtgtgttctccaacatcaatcagatttcccttatggggttggaatctatcggttgggcacgaaagaactggtcaacaatctttattgagcacagcagttatagtgagaaaataatgtccgccatcgacgttgcacacaagtcaggtatacctttgacaatttttaattatcccttgtgtcatcttcctgaaagagcttgggagcttgctgctcagtcgatctctgattggaaaaattactatcctaaagaatgtgatgaatgcactcagaagtcttcctgtactggttatttcagttcgtcaacaggccgttttcttcaaccaccgagaccaattttatga

SEQ ID NO: 240503 - DNA, 1017 bp, Klebsiella pneumoniae
atgaaacttaaaagaatgcttcagatgaattttattaaagagtttcaggaaaacctggataatgatttcgaggagcagctcttcatcgcttgcctcagaaattattgttctcacggcaatccgttgaggtttagcaattttgcttatgctttacgtgagcttattaaccacgtcctatcccgaatggctccagatgaaagggtgataacagccccatggttcaccgccaataaaaacaatgtgaaagtaactcgtaaacaacaggctaagtacattgctcaaaaacatatacctgacggactcttagatgctgcagcacttaagaagttggatgacggtattggctggttcaataaaaattatcagtcattaaattattatacccatattactgaagagtcgcttaaaagccagtcaaaggatttttttgaaaaagcgaaactgctgattgagctttgtaataagatatttgataactttggtgatctggaacgcatactaactcattctattattgataaagtcagcgaccatgtaaatgaggttacgagagataatactcctaatgaagttgatatactatcgtcgcagacgattgtagaaacttgcattgttgaatccatagaacctctcagtcttacagaggattatgtttacctattagttaggggaacacttgaaattacccgtcaatacgggcgaggtgatgattacttagctcaaggggactattatccctttacattcgctgtgtctgtacgtgctagcgattttgaagatattagacctcttgttagaaccgctattgttgatacgggttcatggtatgacgatggtaatggctcggcaatggctgataaaatttacagtacacggcggtttcttgaaatgatcgcacaagttcacataaaacctgcaagattacgaagcctcttcccagagttgagttatgtaatacctgatgatgaacctgatgaaatggttcagggtctcaattacacagaaattgaattttaa

SEQ ID NO: 240504 - DNA, 1017 bp, Klebsiella pneumoniae
atgtactattttaaatacttcagaaatgatgcgaacttcgataaatcaatacgttacaacgaacttttttttgccgccaatagttcgttaaatgatccaatggacttatggttcaaccccattttttgggatgatataaagttatggaaacaatttattcgccgttatggcaatgacttattttatttaactgattatatttccgagccaaaagacgatgatttctatatttcaataaataacctatttaagggaaaaagtctcacagaagtagtcgaaaatagagacgcatacaagcaaaatataatagacattataaaaagaaatgaactagctacaggaacggatgttacctcagcagcctcatttttaatggataaattcactcaaaccaagaatgatgcaaatttcatttccgtatccttcagcagggacccatttaattatcttatgtggtcccattatgctaatggttttaaaggatgcatattaatatataattttgaagacaataagatcaaacttaagacacatattctcggaaagactgagcatgatgttaagatgatggatgttagatattcgaacagcccagaaaaaatagacctttggaaacttatctccgaaaatattatcgacaacggtaattattttttcactaaaaataaccactgggaatacgaaaaagaaagtcgccttgttttccactccccacgcaaatccaatggtgagatatttcaccacaatccttcactagttagaggggtcatcttcggttctagaagcgatgcctactttaaacaaagaacaatacacacattaaaagaaaatagagaaatctgtggtatcgaagattttttatccttcgataccattcttaatgataaaaatgagatagagttgagatcaggtatcaaacatactacaaagaattttttcaaccccccattagggaaagatgcgattgatgagtggaataagctacttaaatttaaggaagctaagacgactaaatga

SEQ ID NO: 240505 - DNA, 597 bp, Klebsiella pneumoniae
atgcaaagtaaagaagtgatgacccgtattgaacttagtggtgtattggctaagacgttcggccgtgttcaccaccgagttatcagaacgactcaggaagcaggcgtggcattagcggcgacaattccgggttttgagcgattcatgattgatagcaaagataaggggctgacctttgctgttttcagagggaagacaaatattggcgccgatgaattgggttatccggtaacgggtgaggtcattcgcattgtcccggttattgccggcagcaaaaaatccggtttacttcagacaataatgggggccgtgctcgtcgccgcgggagctattgcaacctttgttttcgatcagccatggggtgttaacctggtggtcgctggtggctctatgatggctggcggtgttatccagttgctttctcctcaacccggaggtttagcccgtaaagagtcctccgataataaagccagctatgcctttggcggtgtcactaatacaacttcgcagggttatcccgttggtttgctttatggtaagcgccgtatcggtggcgctattatttctgcggggatctacgtgggagataagatgtaa

SEQ ID NO: 240506 - DNA, 1026 bp, Klebsiella pneumoniae
gtgggcaacggtaacatcgtgggtgacggtattcgacaggggttaaatgcccgtctgggccatgaacgcgcggagcgtggcatcagcatcagcggatttggcaaccgctcacagattgtgaatctggcctttacgcacagtaccagcgacttttcccaaatcctagctggtggggctgaaaagtccgtactcacgggctggcagaacagcggtgagactttccagcggtggactaaaaaaggttccctgtctaacttccatgaagcaaaacgtgtgggcctgaatggcttttctgagctgaaaaaggttcctgagggagctgaatacaaatatgtcactaccagtgacagcggcgtacccatcgctcttgcgacctatggcaatatcttttctattacccgccaggccattatcaatgatgacctgagtcagctgacaactatccaacaggctatggggcgtgctgctgcgcgtactgtaggaaatctggtctatctgaaactgacgacgaacagcaagtttacagacggtaagccgctgttccatgccgaccataaaaacctcattgctaaagggatggataccgaggggctcaatgaagcccgtaagtttatgcgcttgcagcaggatgcgaacggcgaccctatcaacgttattcctgcctacattcttgtgccggcggcgctggaagggctggcaaaccgcgctgtgctgtccacatcttctttgttccctgttgatcaggacggcgcgctgaaccagaaccccggcatcatcaacgtggtgaaggatatggcgcaggcggtggttgagccgcgtctggacaaggccaacaacaaggaatggtatgtaaccgcagcacaaggcacagataccattgaggtggcttacctggacggtatggacgtgccttatctggaacagcaggaaggcttcaccgttgatgggatcgcctggaaggtgcgcatcgatgcaggtgtggccgcgctggattaccgcgggctggttaagtcgagtggggcataa

SEQ ID NO: 240507 - DNA, 786 bp, Klebsiella pneumoniae
atgaaatgctggtacaccatcaaagcagccagcgatgccactagcgccaatatcagtatttacgaggagatcggcggctggggcatcactgctcagcagttctctgaggatctggaagccctgggcgatatttcccatatcagccttcacgtccactcacccggcggtgacgtattcgacggcatcgctatctacaacctcctgaataaacacccggcaaaaatcacggtgtatatcgatgggctggcagcttctatggcatccgttattgcaatggcgggtgatcgtatcgtcatgccggaaaatgccctcatgatgattcacaagccgtggggcatttccggtggaaatgccaatgacatgcgtgattattccaagttgctggacaaggtggaaaacgtcctgatccccgcctacgcacgtaaaacaggtaagtctgctgaggtgctggcgtctctgctggaggaggagacctggatggatggtagagaatgtgtggcgcagggatttgcggatgagttactgccggccgtcagtgcgatggctcgcatcgaatcaaaacgaattgaggattttgaacatatgcccgaaaacatcaaagggatgatcacccagcctaaaggctctactggttcagttgtgccggaacagaaccgtatcaacggtattaaagatttgtttgccatgtttggcggcaagcatgatgcgctgaaaatgcaatgcctggaagatgccgactgtacaccggataaagcaaaagacctgctgctggctgaaatagggtga

SEQ ID NO: 240508 - DNA, 714 bp, Klebsiella pneumoniae
atggaactctcttatgatcaaaaggttttgctgaacaatgccgcaaaaaggtctttcagagacatggccgatcaagattatctaaccgcacgtgtctgctttaaaaataatcttccattccaatttttatggatgtctcaacaagcaattgagaaatatataaaatgcattcttcttttcaacaaagttccagtcttaaaaatcggacataatcttgttaaagggatagaagctattaatgccattccgtatctgaaactagatttaagtgataaaagtatcgatttcataaaatacctaaatgaccaaggcccaaatagatatttccaaaaagtcatgtacacaaggggattagaaatcatcaccttagatagagccgtatgggaattgcggcgatactgtcgcttgttggactaccaattaaaaacacctaaaggtgaagtgatagatatgcttgaagtagaattacggacaattcggcacacaaggaacgttccgccacataaacacaaaattgtcggtggatatttagagaaacgattacaagacaataaatacaatcatggtagtattttaacctggaaaaatttctttttcggaaagactaaaaaaaatacaataaaaattggtcgttctatgcgaacgaacttccctacccaacacttacatcctgaaagcctggaattttttggtaaattttttaaggttacttaa

SEQ ID NO: 240509 - DNA, 459 bp, Klebsiella pneumoniae
atgggagatgtgcttctctatcgccacgcgcagcagccagtagtaccggatgagagctatcagcaactaagcgagttgtatcacgcacaggaaaaacgactgttcaaaattgcacagcgcatcaaaggtccggccttcgacaaatactctcattcgccatcgcaggctatcgacgtgctggaagttgcaatattcggcgatgatgaattctgccgcgccgccatgctcaacgctcaaccacaaaacgcaccacaaaatattcctgaaattattccggatggttggattccggtaagcgagcacctaccaaaggagaagggtgtataccaggtgtggaatggaaagtatgtagacaacgtacccttctggtttggctcgttccagtcccttcattcagagctgataacccactggatgccgctgccagcagagccgcaggaggtgaagagtgagtcatga

SEQ ID NO: 240510 - DNA, 2622 bp, Klebsiella pneumoniae
atgccaaccgttccgcaatatcaacgccagagccaaacgcaaaccgcgccggtgatgacgagcaatcttcgtgtcccggaaaatccgctggtgcagggcatccagcaggctgctgatacgtcgattaatattatggctgatgcaaagcgcaaggctgatttagctaatatccagaatggattacttcaggtcagccaatttaatgatgatcaaattaacaatccgcagactgggcttataacaaagcagggcaaggatgcacttggacaatctgatttagttgtttctaatgcgactcagaaagtgcaggacattgcttctaccctgccagatggagaagtgcgcgataatttcatgcgacaggctcaggttcagttacttgcgctgaaaagccagtcaacccgatacgaggttgggcagcatcgacaatatgaagccggccagcaagatgggtacttacgcctccagcagcagcaggctttgaacccgcaggaatttaatcaatctgcgatgaatgcctaccactccataattgcttatgggcaagctcatggacaaagccctgaagagatagaatcaaattgggcgcagtggcgtgagcaggcagcgaaccgagctagcgaagcctggtatacgccaatgtatcagcaactacttggtccgaacgggaaagttgaggtcactgatacccccagtgaatcgcaacttttttccgcgatgatctggcaggagtctggcggcaaccagtacggaaaagatggtgctccactggtatcgcctaaaggcgcggttggtgtggcgcaggtcatggaagataccggtccggaagctgcacggcttgctggcgtgccgtgggaccgtgataagtggctgaatgatcctcgctataacgctaagcttgggcaggcgtacttcggcgcacagatgaagaagtacgacaataacccggtgctggcggtggcagcgtacaacgccgggccaggctcagtagatggctggatcaaacagtttggcgacccgcgcactggcgctgtcagtaatgagcagttcgttgcggcgatcccttacgatgaaacccgcaattatgtggcgaaagtaaccggcagtgccccggccatccctggaacagcgacaatgcaaaatctcatcaatcagccgttctgggatgcgatgagtccacagaacaaatctgcgatgatgagtaaggttgctggaatgtacgacatgcaggccgccgcaggacgagtatcattgcagagtcgtatgcaggatgacatggcgaagctggaatccggtaagccagtcaatcctgtctctgagcgggaatggctggcggttatgccgttgcaagctagtccagcagaacgcattcagatgcgcgagtcattccagcagtatcagcaggcgatgacgctgcaaccggtttatcaatccatcgtgcaaggttccgcacagcagggtatcgctgcggtgcagtctatggtgccgcaggaaaatgatcctgacttcaaatttaagcagagcctatacgcaactgcgcaagccaaactgaatcaggtaattaaagcgcgcgagtccgacccgggtgcgtggctacaatcaaactcgcaagtggtgaaaaatgcctttgagcaatatcagaacaatcaggcatctggtgaatatctggtttcccgcctgcaggcagagaaagaccgtcttgggatcaacagtaagaaggtgctcccggaatccatggtcaacaacctcatttctcagatcgacaataacaaggaatcaagcgttactgccattcagtcggtggcgcagtcattcgggaaatactctgatcaggtaatgcagcaggtgcagaaaagcgcgtacccggcgttgcaggtcataatggcgaccaataacccgcgagccgcaaacgccctctggcaaaaccgcagtgttaaaacctctgacctccgtggaagttttgagaagactgatgccgacagcgcagattcatcttggaatgaccaggccaaagactttgccgggacgatggttgtacagcctggcgggtcagccgtgtggaacaatttcaacgagcagggaaagcgcctgacctatatctatatgcaacgtggcatgtcgtctggcgatgctgcgaaaaaggcctatcaggacgttctcggagaacagtatcagaccagcggaacatggcgtattccgaacactgctgggcaggatatacgcgacgtgagagacggcgccaatgtgtacctgaaaaacctgtcagcggatcaaatcatgccgcttatcggtgattcccgcctgccggatgaggttaaccgcgagcagagcatttcacgcattcgtgataacgctcagtgggtgactaacagcgacgaaactgggcttactctgatgatgaacggtctgctggtcaacaatgctcagggacagccgatcaccgtgccgtttgctgatctggcgaaacttggcgctggcaaccgcaccacctggaacagcctgaccaaattcgtgcagacgccggttaagtacacgcctggccagtcgaagaattacacggcggaaagtcagcgcgacaacctgatcaacattatccagaacggccagcagacgggacgataa

SEQ ID NO: 240511 - DNA, 405 bp, Klebsiella pneumoniae
atggataatattttgttttttaaaatttttattctggttgctttgttttcctctgctgtggtcgaagcgtcaacctgtgaaaaagaaaatggtgaatttaatattgccataaaagaatcattcgaatgtggcaatgagaatctctctaagttttacgataataaaatggacccaacagatcttgctgagtttgttgtatataaatgtaatttgtatgttaataatcttgcaaagaaacaatatgaaagcactatctgtgactattctcttaaaaaaggaatttcaatagaatcagcaaagatagaacacaatgaaatctctactatttatgatttaaaaaaagaaattaatggtatattagttaggcattataagatggaaataataaaatcaagaaaggaatga

SEQ ID NO: 240512 - DNA, 180 bp, Klebsiella pneumoniae; identical to SEQ ID NO: 139583

SEQ ID NO: 240513 - DNA, 1542 bp, Klebsiella pneumoniae
atgcgccgtcatccattaaaaggcgaccgcgggttttacgcggagttgacccagttcatcacttttagcgacgatcacttcgtcccatggtgggtaaccctggcgcgccataatcttgagaaagaggcaccggacggcgtcgccaccgagatgctcgacgaggggctgacgcgccgcgacctaaccgccctcgacttcgtcaccattgacagcgccagcaccgaagatatggacgatgcgttgtatgccgagtccactgctgatggcaaactgctgctgacggtcgccattgccgacccgaccgcctggattgccgaaggcagcaagctggataacgccgcaaaagtgcgcgcctttaccaactatctgccgggcttcaacattccaatgctgccacgcgagctgtcggacgatctctgctccctgcgcgctaacgaagtgcgcccggtgctggcctgccggatgactctggcggccgatggcaccatcgaagacaatatcgagttctttgccgccaccatcgaatcgaaagccaagctggcctatgacgacgtctctgactggctggaaggccgcggcagctggcagccggacagcgaggcgatcgcgcagcaaattacgctgctgaaggacgtgtgccagcgtcgtagcgaatggcgtcagacccatgcgctggtgttcaaagaccgtccggactaccgtttcgttctcggcgaaaaaggcgaagtgctggatatcgtcgcggaaccgcgtcgcattgccaaccgcattgtcgaagagtcgatgatcgccgccaacatctgtgccgcccgcgttctgcgcgacaagctcggcttcggcgtttataacgttcataccggtttcgacccggcgaataccgagcagttggccgccctgctgaaaacccatgatgtgcacgtcgacccgacggaagtgctcaccctggaagggttctgcaagctgcgccgggaactggacgctcagccgaccggtttcctcgacagccgcattcgccgcttccagtcgtttgcggaaatcagcaccgagccgggcccacactttggtcttgggcttgaagcctatgccacctggacctcgccgatccgtaagtatggcgacatgatcaaccaccgtctgctgaaagccatcattaaaggcgagaccattgcgcgtccccaggatgaagccaccgtgcagatggcggagcgccgtcgtctcaaccggatggccgagcgcgacgtcgccgactggctgtacgcccgtttcctcaacgataaagccgggaccgatacccgcttcgcggcggagatcatcgacgtcagccgcggcgggatgcgcgtgcgtctggtggacaatggcgcggtcgcctttattccggccccgttcctccacgccgtgcgcgacgaactggtgtgcagccaggagaacggtaccgtgcagatcaaaggtgaagtagtctataaagtgactgacgttatcgatgtcactatcgctgaagttcgcatggaaacccgcagcattattgcgcgtccggcggtctga

SEQ ID NO: 240514 - DNA, 381 bp, Klebsiella pneumoniae
atgtttcaggataacccgctgctagcgcagcttaaacagcaactgcattcccagacgccgcgcgcggaaggggtcgttaagggcacggaaaagggttttggcttcctcgaagtggacgctcagaagagctacttcattccgccgccgcagatgaaaaaagtgatgcatggcgaccgtatcgtcgcggtgatccattctgaaaaagaacgcgaaagcgccgagccggaatcgctggttgagcccttcctgactcgttttgtcggtaaagtccagaagaaagacgatcgcctcgctatcgttcctgaccatccgctgctgaaagacgccattccctgccgcgccgcccgcggcgttgaacacgattttaaacagggtgactga

SEQ ID NO: 240515 - DNA, 138 bp, Klebsiella pneumoniae
atggcaaatgaattgtcagatattcgaatcaggattgaggatgaggtttatagtcacaggattgattttccgaaactttcaacgaaaagtatcgatgctaaatatctatgtaataaaagcattgaagggctttgttga

SEQ ID NO: 240516 - DNA, 318 bp, Klebsiella pneumoniae; identical to SEQ ID NO: 199048

SEQ ID NO: 240517 - DNA, 303 bp, Klebsiella pneumoniae
atgaagaaggaagaagcgctctccagcttcatctggtgtggggccgtggttcaggtctacgcacagacggtgacgtttgccgggacggttatacagcggcacttgctaccgaagaacctgaggcaggcagtagaaatggaagtacagggggcatttaacaaagaagtggcacagggtggcatccgccaagaagacaccccgcgccatattcaacaaaaccaacggagagtcaggaatgtcgaacagcagcattatggggttagcgctcgcgcttcgcaacgtcgaagccggtcaggcggttaa

SEQ ID NO: 240518 - DNA, 225 bp, Klebsiella pneumoniae
atgaaaaaacgtacagtgtcagttttaacgttgttggccctgctggcgtgtcagcctttggcagcacacgcgggccgcatcaccatgcaactaacagcacaggaggagaccgaaaacggcaaaacactgtgccgctatgaaaattccatttactcattcagctatgtgacgcggagcaagcattgccccagcgtgaaaaccttctccacggaggattcagattaa

SEQ ID NO: 240519 - DNA, 567 bp, Klebsiella pneumoniae
atggagaaacaaatcatggcaaaaaccaacgcgccaacgctggaagaggcagcagcaattgagaaggttttaaggtatcgcaatgagacctacgcagacgcctgggcgctcaatctcaacctggcgttacgcattagcgatctgttggcactgacctataaagacgttgccgggacggagatccgcatcacagagggcaagacgaaaaaagcgcgggttatcccgattaacgaaaaggcacgggacatcatcaaccgccgccgggctgcgtatcccgaggatatcttcctgtttcagtcccgatcaaaccgggtgaagaatcaggctgcaaggccagtcaccagagagtcagccagcagggcattcagtgaggctggggaaatggtcacggataaaaacatcgggacacacagcgcccgcaagtgtcgcgggcgtgcgttgtgggaacgtggcgtacctatcgagacaatatccaaaatgctgaaccacagcagcccggcggtcaccatgacgtacctcgatattactcaagacgaagtgaatcagacctacgatctgaacatttaa

SEQ ID NO: 240520 - DNA, 906 bp, Klebsiella pneumoniae
gtgaccacagagacagaaaaatacatcacggtttttaaacgcctccagtatgcaacacacgttgtgcgccgtgataccggggaggagataaaaaaccgcatcgaagtcgccagcttctacggctacatgcgtgatcagtacacgagctactccgcaaaggacttggagttcttcgagtcgatggagagcatgggactgaaatttcagaatactgatcgccggacagttaaaaaatggctggatgtgttaaacgctatcgggctggttatttcagacaagagggggaaggatgagcgcggctatgatcgctattaccacacagtgattcccctggaggagatcgcggacaacctacttttctacggttcagcatcaatcagcggtgggctactggctgagggaatgttgatccgctcgttggagaagaagaagccacgcgggaaaccgaaacaaaaatccggggataaacagggagatgggaattgtcataaagagggcgcagaggccgcaaaaacgcaggcagcaaccgctgatcagagtgttaacctggcccctgagcctgctctggatgattctgaacagcgctctggcgtggaatctgacactgagcgcggcagcgatgctggcaccgatggtaatcatgcagagagccaggaagtgcaggaagatgatccgacgtttccaccaaagaaaccagcgtcagattatgccccctggcagggcatggcctttgaggggggcgggcgtttatccgaagctgcctataagtgggcgctcactgccggcgcgactgactggcgtcatgcctgccgcatggtgtgggaaaaggtcggagtgacaccgccagatgaaattaacgaggatcgcaaacccaaatttttaatgcagagtacaaatgacgaatga

SEQ ID NO: 240521 - DNA, 573 bp, Klebsiella pneumoniae
atgacgaatgatgatcgcaacagcctgatggcttaccagaatacagaccagctcgaacctgaacaaaaaccagacctgacccttctctacaaacggcgttgccgctccgatgatattatccagaaggccaaacaccttttgattgctggctacacaccaggccgcgtggcttgcctgctgcgtttacctctggatcgtgtcatggaactgtacgaaaactcgtataacgcaaaatgcaggcgattcgccaaacagaacgaacacaccaatacccgtttggcgctgacctcattcaatgaaggtgcaccgctcgccgatatcgcagcggcgctgggattgtctctgtactgggtggtgatgtctctccggcagaatggcgttgccgaatccgcgatcaattcacgtctgccgccagcagatgacccgctctatgtggagtatcggaaagtctgtgaccggaaggccgcaagccgttttaaaccgatccagataaacccggtgcgacacgttagaaaagccgcaggccaaaaggcgagccagaccgaagccacaggcacgacagctacagcctga

SEQ ID NO: 240522 - DNA, 342 bp, Klebsiella pneumoniae
atgaaaattggtgaaacccaacgcacgtataacgacgtgattacgtaccacgcagacggcaattttgatcggcgcgaattgaatattccaaccctcgccgttgaagtgcaaccaggcagcgtgatcaagtctgatggcaccgcgtatgtctccggttctgatgcattactggttctgagccatcaccgcgccggaactgatgcaaacatcatcgttgctgaccgtggcgtgtacattcgcgctgaaacagtgatcgctgttatgggtgagactgtaggcgctgctgctattgctgcactgaccgcatccggcaatattcgtgttgccctcgtcgacaaataa

SEQ ID NO: 240523 - DNA, 1035 bp, Klebsiella pneumoniae
atggatctttcttgcaatttcgaatacgtagattattctgcgtcatttaccaacatcccagcgcgtaaccgcatcctgacaaacctcgggattttccagcgtgatactaccgaccagtttaaaaccagcgtggatattctggctcagatgggcgacacctgcgcacctgcgggtatgcgtttcggctctcagtggggcagcacgccgaagcctaatgcatctaaccatctgatcgaactgccgttattcccaacgcaggacatcatcacggcggcagacgtgcaaccataccgtaaaattagctctccgctacaggccagcatgctggatgctgtgaccgctaaaggtctggcgcactatgagcgcttcgctgcgactcgtgaaaagatgttcgccgaaagtctcttccgtcaccgcgtgatcgatatgcagtacacccaggacggcccaaccctcgattggtctgatgagttcggcattgaacagagtaccggaacaatttttacgggtgttgctgccgatccgttagagtcattatctgatgaggttagtataatgaagcgtcgtgcaggtggcctggcttctcagctcaagggaatttacctgtttgcgggttccaacctgttcaaaaagctgcgattcaatccatcggtgcgccagctcgtgcaatatggtgttctcgatcctgatggtctggtgttcaaccgcgagattaacccggcgttcagctatttcgtgctggattccgtcaccgtggttgagatgagcgacaccgatttttacggcgtgggcgcggatgcgggctatctggtgccagtgtttgataagccgctgagtggtcaatctggagcctggacaaacattgtcgggccaaccagccgcaatctggaactggccttcgctgatgtggttgatttccgcatctactccaacaccgatgcgtataaaaacatcacgctctcaagtgagttctctatgctccctgtggcgtttcgccccgacctggtgaccgccatcaccaacgatgcgtcgtaa

SEQ ID NO: 240524 - DNA, 297 bp, Klebsiella pneumoniae
atgcaattgaagattctgggtgtgggcaacgcgccgttgctgtctgtcagcgtcaaaacgcttgatgatgcaggaattttaaatatcagcggcctctgccgtaagctgaatgtgaaacgctcaacatttctctcgcgagtggcgaattcgggactcgaagctgcgattctgcatttcgctgcgctcaaaaagcagcgggatgtgctcgccactctgtcagagaaagatgcagccgcgtttttagcagcctgtaacgcaggtaatagcgcaagcaagaccagcagcaccaaacactaa

SEQ ID NO: 240525 - DNA, 621 bp, Klebsiella pneumoniae
atgtcagtctcacaaaagcagaagtcaattgactctctccatgaagcagcaaagacaagcctgcccaatgttgacaagatccttgagatttccagcaagtcccgtgacaccctcggcgttgcattgagtgctttcaacctttcgttcaccacactgaaacagcaacggacattaactatcgaatgtgcatttcagggaagcaaagtcttccagcgtggcgggccatatgctgatatgtttgaaatgacgcctcgggaggctaaaaaagacaagcgccttctgacctctggtcgtctgataggcttcaaattttttggtaaggaatgggagttagagcctcagaccgctttttacgactggctttatatcagcgcgttaaggaaacagcaggaactggctgaacagattgttgaatatgacgcgttcactgatattgagtttaaccctgaacgctcgatcaactgccaggcttactccgctgctctttatgtttctctgtttaagcaaagtcttcttgatcaagccatctcctcaaaggaaagtttcttagatacgatcaagaatatgtctatcagtaacgcccgacaaaatgaaactaatcaacctggtttcggattctga

SEQ ID NO: 240526 - DNA, 642 bp, Klebsiella pneumoniae
atgactcagcgaattcagcagatccaacgtatcgtgcaacagcaaggaattactcaactggtgcatttcactaaggccgaaaatcttccaagtataatgaaacatgggatcgtcccaatttctcggactaaagagttcaatatcacgccagctactaacgatcaacttcgccttgatggtcatttagatggtacttctctctctattacctttccaaatcacagaatgttctacaaatataggcaggaaaatcaagacgttgattgggtggtgttaggtataaaaccatcgatcctctggacaaaggattgcgcgttttgtcgccataatgctgcggatgctcgaataagtgtcaaggcattggatgatttgaagctgcacgaatcactcgctggaatgtttagcgagatagatggatatgaaacacgagatagtcaaaaacttttaacttccgacccaacagacgaacaagcagaagtgttagtttttgatgtaattgaacatgaactgatctcaggggcagccttcaatagcggaaaagcaagagcactttaccaggatctcttcggagaaaaaaagattatacttaatgccgctaccaaaggtctatttggttcccgttcatttaagcgtaagtggtaa

SEQ ID NO: 240527 - DNA, 1098 bp, Klebsiella pneumoniae
atgcgttcaactggcacgacagatatcagagaagcccgtgtcattcgtgaccggataatgtatgagtttttcaccatccgtgatcggctgagaccaaaaccgcagggaggttatgttgatcgcgttctgaacgaactacgccaagttgaccaatacgtcacccaaaatgcggggatcgacttcgccactgctcgtgtgtgtccttcccttatccaactgcgggatgaattcattgtccaacacagtgacaggcgcaagctgtctactctgagcaagtacatcaaggccgtggaggtgttcacggcacatttcaggtgcaaagatttccgcctgcacgagatcaatagaacgatggtgactgactggctcgacaacgccaaacttgaacgggcgacacagacactggcaaattatttgggctgcttgtctcaactggtggcgctggcccagaaccgctaccacgacgcgccaaaggagaacgtcttcacggctcataaactggatgtgcgacatgatcgcgagagttacgaaccattcagcggtgatgaactggctcgggttgtgggactgcttgatcaggaaatgaaggccgtcgcgttggtggggatgtatacaggcatgagattgaacgaaatctgttcgctacaaatcgacaatatcaaaacggtagaggggatttggtgtttcgaagtgacagagggtaagacgcgcaatgcggcccgactggttcccattcatagcaagttacggactctcgttaaacagcttatccagaacaatcacagcggtttcctgttctaccatgccagcataactgaacgtgccgacggcaagcgctctacctggcacacacagcgtttcacacgggctaaacgtaaggctttgggagaggaagggactgaacggaaggtattccacagcttgcgagggatgttcatcagccaacttgatcgtggtggcgtccccgaagacaggatcgcgctgattgtgggccatgaacggggcaaaacggagagtttcaggacgtacagccagggggccagcatgaaggagttggcgggttatgttgagattattgaatataccgtaataaagtga

SEQ ID NO: 240528 - DNA, 2700 bp, Klebsiella pneumoniae
atggatacctcttcaataattaccggcaccacccttaaccgttaccagctggatattccttcatgtgccgcatcgctggatgtggaagaattcagtggggcagaaaaactgagtgaactttattattacactattacgtttaccagcgcagagaaaaatattgatgccgcacagctcctgagcaaacccgccatgctgacgatgggcggcggcgcactgcagcagttggcggactgcaaacgcgtccatggtgtgattaccaccttccggcgcgtcaatcgttctgaagatcagtcgacctatcagataaccctccagccgtttctctccctgctggataaacagtttcgcagccaccgttttttcgtcaacaaatcggtgccggaggtggtggagcaggtattgcaggaacatcacctgcatgactgggagtatgagtttaatctcaagcaacactatccgcggcgcgagcaaattaatcagtatcaggagagcgacctggcatttatccagcgcctgctggcagaggtggggatattttatttcttcaccctgcaggaagaggcgcagagcgaagtggttcacttcgccgacgcgcagcgggcgctgatgttcgataagacacttcctgtaaacagcccgtccgggatgagcgacagcggtgcggaatcgatatggggtctgagcatcacccacaacgtcgtagaggcgaacgtcactacccgggattataacccccgcgatgcgcagagcgttctccagtcggcaacagcggatatgacccggggaaatggtgaaggcatcacttacggtgaggtataccactataagcttcgccaccgggagcgtggcgataaaatcgagccgcagacggagaccgccaacttttatgcccgcctcgaccatgagcgttttctggctcaccagacgcttattaccgcgagcagtactgcagcctggctggcgccggcccaggtgctgaccgttaccgacagcctgccgtcgaccctgcctgcgcccgtacaggatccgctgttaatcaccggcaccggttttaccgccagccgccgggaggcgctgcgggtgtccctgctggcggtgccctacagcgaaacattgtgctggcgtccgccgctgctgccgcgcccgaaggtgactggcaccatgacggcgcgggtgaccagcgcgaaagcgaatgatatctacgcctggcaggatgcgtccggcctgtaccgggtgaaatttgacgctgacagagatgagaaagggcagggtcaggaaagcatgccggtgcgtctcgccaaaccctacggcggcgacgtgtacggctttcacttcccgctgatccagggcacggaggtggcgattgctttccacgaaggcgaccctgaccggccgtatattgcgcatgcgctgcacgactcgcggcatgtcgatcctgtgacggagaaaaacagcacccgcaatgtgattcgtactccggccaataataagctgcgaatggaggacaagcgcggcgaggagcatatcaagctcagcaccgattacggcggcaagacgcagctgaacctggggcataacgtgaatgcgcaaagggagttgcggggcgaggggtttgagctccggacggataaatggggggcgatacgggcggggaaagggatctttatcaccgcagataaacagtcaaccgccagcggcaagatacttgcaatgcaggataccctggacaggcttaagcaggcaggtgatgagatggactcgctatcgcgtgatgcccagtcggctaaagccgacccagcccaggttgaacaacagttagcttttatgcgtgagcaaattgatcagctacgggaggcggttgccgtgctcagcgcaccaaatggtgtggctctcgccagtggcaagcatctgcaactaaccgcacgtcgcaatctgatgctcaatgccggggcagatgccgatatgggcgtaatgaaacggctgtttattggcgtgggggaagggctgagcctgtttgtccgcaagctggggatgaaattaatcgccaatcaggggcccgtggcgattcaggcgcaaaacgatcagttgcagctcctggcgcgcaaggagctggagattgtcagtactgatagcgaaattcacattgtggcaaagaaaaaaatcatcattaacgctggaggaagctatatcaccctcgatccctatcggattgagctcggtactggcggtgatgtcgacgtcaaagccgcggatttttcctatagcggacccgccagcatgaaggccgatcatccggattatccgccacttcagtccaccgtaaggcaatcgctgaaactgaacgtggcacagtcgccaaatgcgtcggacagcagctgggccggaatgccatataccctgtatgccgacggcgcattgttgaaacaaggggtgctggatgaaagaggtcagatatcagtcgatcaccaggtcgtgaccagaagttacaagctggagatggctaatggcgtcagctatcagatacccgttgccgaagcgtacagtcgccctgagcagggggaactcgctaatcgcggctttcaccaccatacctcgcaggctgcatctgatattaaccccccctcctcacatacggagcaccgtaatacttacgcggatttgctcgatggccatattgaacaggacgaaagtcaatga

SEQ ID NO: 240529 - DNA, 8043 bp, Klebsiella pneumoniae
atgcatcagccttccgtacgcttgtcatcgcgtctgctaagttacctgattagcgtcctgctggccgggcagccgctcctgcctgcccttggcgcagcgatcgcaccccagggcgccaccggtgtggatagcgccgccaatggcgtgccggttgttaatattgccaccccgaacggccgcgggatttcacataaccagtttaaggattatcacgtcggtcaggagggggtaatcctcaacaatgcgaccgggaagcttaatcagacccagctcggtggcctgatccagaacaacccgaatctgcaggccgggagggaagcgaagggcatcattaacgaagtgaccggtggccaccgctcgcaattgaacgggtataccgaagtcgcaggcaaggcggcgaacgtgatggttgccaacccttatggcatcacctgtaacggctgtggatttattaataccccccgggcaaccttgactaccggtaagcccgtctttgatgctgctggcaatttacaggcgctggatgtcactaaaggttccataaccattgaaggcaaaggcattgacgccagcagtagcgaagcgttgtcgattatctcccgggcgacggaagtcaacgcggcggttcatgccagggacttatcggtgattgccggagctaaccgggtggatagccatggcactgtcaccccaatgagcggagaaggtcaggccccgacgctggcggtggataccggggcgctgggcggtatgtacgccaatcgtattcgtctggtgtcgagcgaaaacggcgtgggggtgaacctcggcgacctgaacgcgcgtcagggcgatatcacccttgaagcgaatggcaggcttgctttgcgtcactcactggccagcggcgcgatcgccgttcgcggacagcatattgcgcttaccggcgatcacaaggccgggggcgcaatcacattgcatagtcagagcgatctggtattgagcaaagggtccctgaccagcgataccgatctgcggctgaccgcgggcggttcaatcacgcaaagcagtgaaaaactgaccgccggacgggatgtctcattaacggccagcgccatccgccaggatagcgacagtcaaatcgatgcgggtcgccagatcgcgctgcgggccggcgacagcgtgacgaatgagggaagaatgacggccactgacgatctttcggtgaccgcgaagacgctggcccatcatggcgccctgatcgctggcaacgctatctcccttgatgccgcccgccagacgttgaatggcgcgataaacgccaccggcgatatcacggtatcgggggagacaatcgccaccagcgcggcatcgcaaatccagggaaaacacctgcatattgcggcgaaacaggttgatttaaaagggactcaggcggcgaaatccgctctcaccgtgcgcgccagcgaaaaactgacccacagtggtaaaagcagtgctgataccctgtcattgcaagccccgcaactcagcaatagcggtgtggccatcgcctccaggctgaccacgcaatcgcagtctctcaccaacaatggcttgctacagggcgaggctcaactttctgttaccagccaaacgttgaataaccagcaggacggtacgctctatagcgcggcaaatctgacgctcgctatcccggatatccgcaatcgcgggcttatcaccagcgaccacgcgctcaccctggccagcacgaccctgatcaatccaggtgccatcatcgccgatacgttaacggttaaaaccgtcactttatccgatgacggtctgcttcagggtaatcaggcactcacgctcaccggcgattcgctggctcagggggccacaggacgttggctgaccgcaggggatatgtcgctcaccgcgacgacgctaaacgccgcaggcgccatacaagggcagcaactgcgtattaatactcaggactggcggcaaagcggttctctcctggcgacaggcaatctggatgccaccgtcagcggcgcattgctcaatgatggcgacatcatgagccagcgagatttcatccttcaaaccccctccctgacaaacagcggcaagctccttgccgccggcgatatgtcgttaacgggagccctgttcaacaacaatggttcgctgcaggcaaaccggatcgcactgacgcaggagacgatcgacaatcaagggaccgttatcgggcttgacgcgctcacgcttagcagcaacggaaccgtggataaccgcggcgatctgctaagccagggcgacctgacactctccgctggcgatatcgctaaccacggacgggtgcaggggaaaaccatcgttattgagggcgcgaacctcagtaatagcggcgcgatccagagcgcggtcgatctggcgttaacgctcagcggcgatctgcaggcgattaacagcagtaaaatgactgccctgagggatgtccatatcagcggccacgcgctcagcaatgaggggatggtgagcgccagcacgctgacgatggaaggtgactcgctgagcaacagcggagagattagcggggtaagccatcttgacgtattgctgaatggcgatctgcagcagcagggcaaattgctgaccgggggatcgcttgtcctccatgcgcaagacctgaacaacagcggtcagttgcagggggcgaatacgcagattagcgtggcttcgttcagcaacagcggacgcctgcagggggaccgcaatctgacgctgatcttgctaaaagcgctcaacaaccaggccaacgggaccatcctcagtcagggggagctgtcgctgagggcgtctgcgctcagcaatcacggcacgatccaaagccatgacgcaaccagcctcaacagtaccttatatgcccgcaacgccggcaacattgtctctggtggagacctgacgctttccactccagactacagcggcagcggctggttgcaggcaacccatctccttctggacgcggcgaagatcgccaacgcaggcacgatgctggcggcaaatcaggccacgctgacggggagcacgctattaaacagcggcaccgttcaggccgcacagttaagtgccgacacccggacactggccaacagcggcaccttgttcggcaagcagaacctgttgctttacagcgacagcgtaaacaacgacgcgggcaaactcttcagcggcggcgatcttctggcgaacgtcgcctccctcagcggtgcgggtcagatagtcgccctgggtaatctgacgctggcgctggtcaacagctggatcgctcagggaactgtggcagcaaacaaacagcttgtcatcagcagccagagcgatatcaccaacgctggagccttacagggcaatggcgtaacgctgaccgccgccgggcagctcatcaataacggtcaactggtagctggcaacggcaatacggcattgaccgggcaacagattgcgatgaatggggaaggttccctgcaggcgggtggggacgtgagcctgaccagccttggccatatcacgcttgatggctttaccggtacggcgggaaacctggtgttaacggccaccggaacgatcctcaacaccgccttgctgtatgcgggccataatctctcgctgtttgccaaccgcattcataacctgcacggcgacatactggcgggtaatgacctggtgatgcaaaaaaacgccagcggtgataccaacactgaagtgattaacacctctggaacgattgaaaccacgcagggtgacatgaccatcagcaccgggtacttgctcaatcagcgtgatgggctggaggtgaagatttcgcagactagcggcgagcaggccattcctggtctcggagaggcgataatcgatgtcgatatcagccagctggctgacgggacgtacggcctgagcagctatttggcgtcaagcgagtcaggggcatgtaacggtcatggcgcctgcagctatcacaactggaaccagctctattatgcaatgtacgccgaatcagcacagcagaagtttatcggcagccagacgcggacggaggtcaccagccggggcggggcagcacgccttgccgcggggaaaaatctacatattagcgccagcacgctggagaacgttgccagccatattctggcaacgggcgatatcgcgttaacgggaaatacgctcaacaatcagagctggcaggccggtaccgtcactgactggtatatctatcagtacgacccgcaccgctatggctacaacattggctttggcaagggcgccggttacgccgttgcgccgggggcgccttatcccacggatgacaataactatgaggatgcgcagcccgaacgctctaccattggttttaccctggccgggcatgaatccacggccgaacaggaagaaatttaccgttcggtgatccaggctggcggcaacgtcagcgccagtttcgccagcgacatcagcaacaccaacagcatcgctaatgcggataaaataagcaacacgcttgtcgcgcctgacctgaacacaccttcagcgcaactcactgacgacagtgagagcctgcagtccctcgccggggctgataccgccgcgatgactcgcccggactggaacgacacaaccggtagcggcagccagaccatcggcaacggtacggcgctcgttcaggaaccgctgggcgataactatccgctgccgtccggcatcaacggctattttgtcacgtccgacgatccgggcagcccatatctgatcacggtcaatccgaagctcaacggcctgggccagctcgatccgtcgctgtttggcgatctgtataagctggcgggcatgaatccaggcggcgcgccacgcgagacgggtagccagtacaccgatggcgactcgttccttggctcgtcatatatgctggatcgcctggggcttaaccctgacagcgattatcgttttctgggcgatgcggcgtttgatactcggtatgtcagcaacgtggtgctgaaccagaccgggtcacgctatcttgatggcctcggctctgatctcgatcagatgcgttatctgatggacaacgcggccgacgtgcagaccacgcttggcctgacgtttggcgtggcgctcaccgccgcacaggtggcggcgctcaatcgcagcattctgtggtgggagcccgcaacgcttaatggtcggaccgtgatggtgccgaaagtttacctgtcgccgaaggacgttagcgtccggaacggtagcgtaatcagcggcaataccgtgcaactggcagggggcaatatcagcaacagcggcagtacgttgctggcgcgagacggccttgccattgacagcagtaatagcttcagcaaccttaacgccggacttatccgcgcggatggccgtcttgacctgagcgcgtcgggcgatatcaataacattggttcgacgatatcggcgaaaacgctgcagctggtaagcaccggcggtagcatcaataacgtcacccgcactgagcagtggcgtgttggcgatgacaaccgctggggcaatattcagttcagcggtaccgatagcgagcaaacggctgccattactgccagcgacggcctgtatatggccgcggcgaacacgatcaatataaccggagcgacggtgagcgccggcggcgatctggcgatggaaaccgggagcaacatcaatattgccgccaaccagttcaccgagagtcgcagccagtctggcttctggggccagaaacacagtcgttcctcatccacaacgtatcagagcagcagcattacggcgggcggtaacgcgataaagcgggcgggtagcgatctgaacgtgacggccagcgccatcaatgcgggtcacaccgcgcagctggtggcggccaatgacctgaacctgaacgcggcgggtaacgaacagagcagccgcacgggcggcagcgaaagccatcagagcggcgcagaccgcagcacggtgaccgcaggcgacaaggtaacgctggtggccgggcgggatgtgaccagtcaggcggcgggcatcgcagcggaagggaatgtcggtattcaggccggacgcgatgtgaatctgcaggcggaagccaccaccgcaggcagtagcagtcatagcggtaagaaaaccgttatcgatgaatccgtgcgccagcagggtaccgacattgccagcggcggcagcactacgattattgctggacgcgacgtcaacgccgaagcggcgcaggtgactgccagcgggaatatcggcctggcggcgggccgtgatgtgaacctgaccacggcgacggaaagtgattaccactacaaagaagagacgaagaccaaaaaggggttcctgagtaagaaaaccacgcataccatcgaagaggagagcgccacccgtgaagccggtacgctgttaagcggagatcaggttcaggtgctggcagagaataatcttctgctgcagggctcggcggtggtgggtgagggtgatgttcagctccacgcaggtaataatgtcgagatcacggcggcgaccaataccgataccgcctggcgatttaaagaagagaaaaaatccggcctgacgggaaccggggggatcgggttctccataggcagcagtaaaaccacgcacgagctgcgtgaagcaggcaccacccagagccagagtgcttccacgacgggaagtacgggcggtagcgtggtgatttctgccggtaagcaggcgcatatcgatggttcagatgtggttgcgggccgggatatccgcatcaccggagacagcgtggtgattgaccccgggcacgacacccggacggtcgacgagaagtttgagcagaaatccagcgggctgacggtggccctgtcaggcagcgcaggcggtgcggtgaacaacgcggtttccgccacgcagaaggcgaaggaaagcagtgacagtcgcctgagtgcgcttcagggaacaaaagcggcgctttccggtatccaggccgcccaggccgtcgcgctggatggggccagaggcggcagcgataaggacaataacaatacgattggtatcagcgcgtcgctgggttcgcagtcctcttcctcccggtcacattcggagcaggtgatgaccagcggcagcaccctgaatgccggaaataacctcgctgttacggcaacgggcggcgacatcacggtcgcgggcggccagatgaaagccggtaaggatgtcacgctggatgcgttcagggatgtgaacctgagagcgtcacaggacacacagcagactaccggcagcaacaaaagcagcggcggcagtatcggggtgggtattggcgctggcgcaggtggcgccggtatcagcatctcggcaaacgccagcagcagcaaagggcatgagagcggcaacggcacctggcagaatgaaaccacggtggatgccggtcatcaggtcatcatcagcagcggacgggataccacgctggccggcgcacaggtcagcggccatcaggtgacggctgatgtcggccgcgacctgacgataaccagtctgcgggacagcgaccattacgacagcacgcagagcagtctcagcggtggcctgggttacaccttcggcgccgggtcgtggtcgggaagcctgaatgccagtcgtgacaaaatgaccagtgactggtcttcggtgcaggagcagagcgggatatttgctggtcagggcggctttgatgtctctgtgggcagccacacgcagctgaatggcggggtgattgctgccacaggaagcgcagataaaaacagcctcaataccggcacgctgggcttcagcgatatccacaaccaggcggattataagacgcagcatcagggcggcggtatcagcaccgggggcagcattggctctcagttcgccgggaacatgaccagcgccctgctggcgggtggcggcagcaaaggccatgcggaaggtacgacgcagtctgcggtatccgagggcactatctccgacaaggagaaagcgcagcggcgcctgatataa

SEQ ID NO: 240530 - DNA, 1662 bp, Klebsiella pneumoniae
atgaaatctctgtatttggctctgggactaatgacgctgagtctgaccacctacgccgcttttttatcgccagccgatcgcgacagcgttgagcaacagcagcaacaattactgcgtcagaaccagcagcaacgtgaatcgctggagcgcgccacgccaagccttcacgcggcgatgcctgcgcagcctgaagcctctgatggtccctgtttttcaatccatcgcatcgcgttagatggcgcgacgcttattgatccgcgtcagcagcaaaaaatagaccggccctggcttgggcagtgcatggatattgcgcgtattactaaactcgtaaatattatttccgactggtatatcagtcggggatatattaccagccgcgcttttctgaccgagcaggatttacgttccggggtattacatctggctattcttgaaggaaagctcgaaaaaatcaccatggaaggggcggctaaacgtgagttaacaatggcgtttccagggctggaaggccatattcttaacctgcgtgatatcgaacaggggatggagcagattaaccgcacgcgcgcgacgcctgtgcaaattgaaatccagccgggcgaaaaacctggcggttccatcgttaacctgacggcgacagcagagcgcccacttttgttgtcgatgagcgtcgacaacagcggccagaagagtacaggtagcggacaaatcaacgcgggtttaacaggcaacaatcttttagggctggccgatcgctggtttgtcagcggcgggcgcagcagcgcgttttcgaatgccaaagatgcgcaaaatgttgccgcaggggtcagcattccttacggttatacgctgtttgactacagctacagctggaataattacctgagtacactcgataaccacggctggatctggcgttccagcggtggcaccgaaacccaccggctaaacttctcacaggttctctttcgcaatggcgacctgaaaacgggtctctccgccggactgagttatcggaccaaccacaattatctcgacgatgttttgctgcaaagcagtagccgtaagttgacgacactgctgtttggcctcaaccacacgcaaaaaatgtttgccgggattaccaccttcaaccccacgttttcccgcggaatgccgtggtttggtgccgaaagtgacggtaataaaccgggcgatttgccaaaagcggaattcagaaaatggagtctgagcgccagctttcagcgcccgttgctcaacgatctctggtggcttagcagcctttacggccagtggtctccggaccgcttatatggcagcgagcgcctgaccttaggcggggaaagctcagtacgtggttttaaagaacagtacatttcaggggacaacggtggctactggcgtaatgaactgaactacgcgctttttacgctccccggcattgggcaggtcggcgctctggccgcactggatggcggctggttgcatgctgaccgactcgatcccagagccgccggaactttgtggggcgccgcggtagggttgaccacggcaaatcgctggttatccacctcttttaccgcaggcagtcctctggcgtatccggactggcttgggcccgatcacctcaatctctattaccgcgttgctgtggcattttaa

SEQ ID NO: 240531 - DNA, 795 bp, Klebsiella pneumoniae
gtgatttgctccaccagcattgaacgtattgtcacaggccggaatgctgcactgacacggattgagagccttatccgtgaacttgatgatatctccattctgacccgcgatatcggcggtggtacagcacaagagtggggaatgcgggagggccatcgctacgattgctggtttacggaaaaaaccgataaagcgatgaaagcgattacccgcaatattgatcgccgcatctggcgagagctgatgaataaatcaggcatgctgagcctgatggatgctcaggcgcgtgacgagtggcacaaaagcctggataaagacgatatccccgcgatatctgaagacaatatcctcagtactttccggcaactgcaccagattaaagaggaggtatttgaacggggagttatcaacgtcttcaaaaatctcagttgggattacaaaaccaataatccctgttattttggcaagaagattatcgttaacaatctggtgaagtacgacaaatggggttatagcctgagctggggctggcggcgtgaccagttggccgatctggagcgcatgttgtttctgctggatggtaaaaccattcccgataatcggcatgatgtgactatacggctgatggacttcatacgcgataatccacgacagcaggtatttgaagatgaactcttcactgttcactttttccaaaagggcagtggtcatatcacgtttaagtgtatggatctggtagagaagatgaacagcatcgtagcgaagcactatccggggatgctggcagcacagtga

SEQ ID NO: 240532 - DNA, 651 bp, Klebsiella pneumoniae
gtgtcggtgagcggttcagcggccgagggggtcagcagccgcacggcgatggcggccatggagcagattttgcaggcccatctaccgccgggatatgactatgcctggagcgggatctcctggcaggagcagcagaccggtaatcaggcggtgtggatcgtgctggcggcggtggcgatggcgtggctgttcctggtggcgcagcatgagagctggacgctgccggcgagcgtcatgctctcggtgctgttcgccatcggcggagcgctgctctggctgtggaccgcgggctatgccaacgatgtgtatgttcagatagggctggtgctgctgatcgccctggcggcgaagaatgcgattctgatcgttgagttcgcccgcagccggcgcgaggaggggctgtcgatagtcgacgctgcgcgcgagggggctacccgccgcttccgcgcggtaatgatgaccgcggtgtcatttattatcggcatcatgccgatgatgctcgccaccggcgccggggcgcagagccggcggatcatcggcaccacggtattcagcgggatgctggtggcgacgatggttggcatcctgtttatcccctcgctgtatgtactgtttcaacgtatgcgcgagtgggcgcatcggcgggggtaa

SEQ ID NO: 240533 - DNA, 237 bp, Klebsiella pneumoniae
atgaccacgtcagacattcaactcatttcgttagtcgttggatttgttggctctcttatctctgccgcatctacttatgggtatgagccttcccctctcgcacaatgcggtagcggcagtgacgaaggaatagttaataaacgaaacgggagacgccgtaagggacagataggaggactgctcctgatcgctctgagcttttttatccaaataatttctttgatttacacacagtaa

SEQ ID NO: 240534 - DNA, 492 bp, Klebsiella pneumoniae
atgataaaatgtagcctaaaaaataccatgcttgcatgtgcgttgttgctgccaaccatttcttccgctgaaaatcttgctgaatggtcatttccaagcaacaacactccaattttatatccaaaagaagtaaaagatttgccaatagggctggctctcataaacagcaaaacttggctgttttcctttctagacatgagaaagccaaatgtccctggctctacttgttatggcgggggcgtgtcagaaagtgtcgacgagggatcgccaataatgattaatggtacatacttaaggtttaagtatgcttgcatgggtgattttggggtaatgcagccagttacggagtatggcaaagtatatctcaatgagcttgcctcctctgggaatgaaataaatgttgtgattagcgataatgaaaaactgacattccctaaatctgatatcacagcgatgaagagccgtatagaaaagacaaaaaatgcaatgtga

SEQ ID NO: 240535 - DNA, 1206 bp, Klebsiella pneumoniae
atgagtcaggactatctcgcccgtatcgctgcgctggaagacgcgcttcgccagaaagacagccagctcagtctcgttgctgagactgagtcgttcctgcgttcggcgctggcccgcgcagaagagaaaatagagaacgaagagcgtgaaatagaacatctgcgggctcagatagaaaaactgcgccgaatgctgttcggtacccgttcagaaaagctacgccggcaggtcgaagaagccgaaaccctgctgaaacagcaggagcagcaaagcgatcgttacaacggccgggacaatgatcagcaggttccgcgtcagttgcgccagtcccgtcatcgtcgcccgttaccggaacatcttccccgcgaaataaacagactggagccagctgaaaccagctgtcctggttgcggtagtgatatggcctatctcagcgaagtcagcgcggagcaactggagctggtctccagcgccctgaaagtgatccgcacggtcagagtgaaaaaggcctgtacccgatgcgactgcgtcgttgaagcgccagcgccctcacgtcctatcgaccggggcatcgccgggccgggtctgctggcccgcgtgttaacggccaaatactgtgaacacctgccgctgtatcgccagtgcgaaatctttgcccgtcagggtgtggatctgagtcgtgcgctgctctccaactgggtggatgcgtgctgccggttaatggccccgctggatgaagccctctaccactacgtgatggactgccgcaaactgcatacggatgacactccggtgcccgtgctggcgccgggcagaaagaagacgaaaaccgggcgtatctggacatatgtccgtgataacagaagcgcgggttcatcagatccgccagcggcatggttcgccttctcaccggaccgacaggggaaacaccctcagcaacatcttcggcactatcatggcgtgctgcaggcagatgccttcgcagggtacgacaggttgttcagcgcagagcgtgaaggtggcccgttgacagaagcggcatgctgggctcatgcgcggcgcaaaatccatgacgtctatatcagcacccggacggccacagcagaggaggctctgaagcgcatcagtgagttatacgcgatagaagaggaaatacgcggccttccggcatctcagcggctggccgccagacggtcccgaagttaa

SEQ ID NO: 240536 - DNA, 1407 bp, Klebsiella pneumoniae; identical to SEQ ID NO: 206360

SEQ ID NO: 240537 - DNA, 1359 bp, Klebsiella pneumoniae; identical to SEQ ID NO: 206361

SEQ ID NO: 240538 - DNA, 624 bp, Klebsiella pneumoniae
atgatttataaagatttctaccatttaatgttggagcacttcgcccagcctgttgagttgtatacaggctcgagaaaattaccttttattttttatgctgaagagcaaaaactgattatcaaaaacgggaaagataatataagtcgaattaactcaagtgaagtcgcggcgttcattgagcggtttgaagaaagtgagagtctacaacctaaggactaccaggatgtgacttttaaagcttcctatttattggcggcaatgcaatatatctctgagaaaaattcgacctgcgcatcaatcgtccgcttccatagcggggaacaacaagacagcgagaaaaaatataaaaactggttagcggaaaatacagaaggctatgtcttaaatttactcaaacaaagtgaagtaagtgacagattagcactctctacttcaacttgtttacattctgctaggtgtttagctgtaaataatgagcgtaattatcgtcaatcaagtccatttactggcggtgattattttaaaatatgctcaacggatctatatgatcttgaaaaagaagctatcagaatcacaaagctgggcagtgtgaaaaaacattcttgtgtaagtacaagggagtaa

SEQ ID NO: 240539 - DNA, 480 bp, Klebsiella pneumoniae
atgagatttttaaagaaactgaaatatgtaatcactctgggggtaataaccgcctcctgttcagtaatggcatcaccttatggagattcagatgttctgttcgggtgtatcataaaaggtaaaaccactaaagaagtagctgtgttgaggaataataatgaggtcacttatttattcggtaagtcggatattaacggagggggggtgattcctgaaatcactttggtaaaaaatgtgatccagctaagtcaggcctggaattacagtagggctgagggtgtgtcgatacatacattgaacataccagaaaacgagtatacttactctgtttcctatatcgatgatggaaaaaatactgatggggaaataactgttttaaaacagggaaaagaaatcagtacgataaaatgcgatgatgtctgggaacaacatctgggtgacagcaatatgatgcatggtatccccgatgagtcagattga

SEQ ID NO: 240540 - DNA, 810 bp, Klebsiella pneumoniae
atgattaaccgcgatacgctgctgtgcatctccctggcgggtcgccccggcaacttcggcacccgctttcataactatctgtatgacaagctgggattgaactacctctacaaagcctttacgactaaggatattgaggcggcggtaaaaggggttcgcgcattgggtatccgcggctgtgcggtctccatgccgtttaaagagagctgcataccgtttcttgacgcgatcgatccgtcagcaaaagtcatcgactccgtcaacaccatcgtcaacgacgacgggaagttaaccgggctaaacaccgattacatcgcggttaaaagtctgatcgccagccatcggctcgataccaacgccagagtgatgattcagggtagcggcggcatggggaaagccgtcattgccgccttccgtgatgccggttttcgcgatgtgatcattgcggcccgcaatcgccagcgcggcctggcgctggcaaaacagtatggctttcagtggcagcccctgccggaagggatcgcagccgagattctggtcaatgttacaccgctgggcatggcggggggagcggaaagcaacacgctggcgttcagcgaggccatggtggcccaggccagcgtcgtgtttgacgtggtcgcgttgccggcggaaactccgctgattcgcctggcgcaacaacggggtaagcaaaccatcagcggtgcggaagttattgccctgcaagccgtcgagcagtttgccctttataccggcgtacggccggatagcgcgctggtggcagaggcctcggcgtttgccagaagctag

SEQ ID NO: 240541 - DNA, 345 bp, Klebsiella pneumoniae; identical to SEQ ID NO: 206362

SEQ ID NO: 240542 - DNA, 624 bp, Klebsiella pneumoniae; identical to SEQ ID NO: 206363

SEQ ID NO: 240543 - DNA, 690 bp, Klebsiella pneumoniae
atgctgaaccttaccgattacgcggtttcctacggccagagccagattatacaggggctgaatctgtcgattgcaccgggtgagattgtggcgctggtgggccgcaacggcatgggcaagactacgctgatgaagtcactgattggcatgatcgaaagccgtgtgggaaaagtgttatttgacggcagcgatattatttcgctggccagccatgagcgcgtgcatcgcggattaggttttgttccgcaggggcgtatggtttttgccaccatgacggttgaggaaaatatcagaaccggcatgaaatccgccagagacacccgcgtacccgaccatctgtatgactattttccggcgctgtgggatttacgtaaacgcatggccggaaatttatccggcggccagcagcagcagctggttatggcccgcgcgctggccgggcaacccaaattactgttgctggatgaaccaacggagggaatacaaccctccattattaaagagatggcgaaaatacttcgccgcattcgtgaccaggaaggtctgactattttggtctctgaacaggtattaagttttgttctggatgtatccgacaggatcgtagtgatggaaaaaggacacatcgtacatcaggaacaacgtgaacatgccgatcgcgaaaagatcgcatcttatcttgccgtttaa

SEQ ID NO: 240544 - DNA, 3354 bp, Klebsiella pneumoniae; identical to SEQ ID NO: 206367

SEQ ID NO: 240545 - DNA, 906 bp, Klebsiella pneumoniae; identical to SEQ ID NO: 206368

SEQ ID NO: 240546 - DNA, 585 bp, Klebsiella pneumoniae; identical to SEQ ID NO: 206369

SEQ ID NO: 240547 - DNA, 360 bp, Klebsiella pneumoniae; identical to SEQ ID NO: 234836

SEQ ID NO: 240548 - DNA, 843 bp, Klebsiella pneumoniae; identical to SEQ ID NO: 161848

SEQ ID NO: 240549 - DNA, 789 bp, Klebsiella pneumoniae
atggctggcaacgcatccccaaaaactgaaccgcgtaatcaacgaaacgctgtaaataaccttcctttagggatggtcatttcaaaattaaagccactttcaagtgatttctatacacactttcataaaaaaaacagagcctgcctgcgccagtttaacgccatctccaatgccatttataatattttccgcctggtagaaggtgaccaggcgacaagcactaaagttcagaaatggctctccggtgtttacgatgaactgtcgggtaatgtaaataccctcaatgagcagattgacaaaaatgtcgccagactacttctggatgattcatcatacgaagggtttgactatggtatatttgaaattcgctggaaccacccattgttctataaattgctggatattatccagaccgccaacgtcctgactcgtcaggcacaccagttgtggttatgcggtcagatattacaacaggttcatgaccgaattatcttgcaactcctgagctcactgcaggttgctatggacaagattactaaaatactgaacgttgaaaatcgtgtgaatggaaaatacgacatattaccattcatccagagtattaagcggtttaaatcggtggaactttatattgccagtctcgaaccgaaggcccttgctcagtccggttacattgacatttcagctgatactggcagtgagcagacattaaaaccagaggaagtggcaggctctggcaagccatctgacaaaacacaatcttctgccactcctgtttcggcacaataa

SEQ ID NO: 240550 - DNA, 996 bp, Klebsiella pneumoniae
atgtttccagtcggcattgacgtaagtaaaaacaccctggatctttgcatgctttatgacggtatcaaaggacgcataaaaacccgtaacatccagaataacagacattcagttgaaaatattcttcgctggctcaggcttcaacattgcagtccggaagatgttcatgtggtaatggaagctaccggtgtttatcacgaacggctggccactgaattacatgatgccggtttccgggtttctctggccaaccctcaccgtagtcgggagtttgcgcgtggcatgggaatcatgacaaaaacggataaggtggatgcgtatatgctggcctgttacgcattccttaagaagccacaccgctgggagccgccggcacccgaaatcagatatctcggtgcactcctgcgacggcgggatgttctgctgggtgatgccctgcgtgaggagaacaggctggaaaaatacctgtcgacagacacacctgcagatattatcagttcctgcaggcgtatggcgcagctgatgcgcgaggaggtaagtaatatcgagcggcagattaaagcacatatcaaagccagccctgcactgaggcgtgattatacactgctgacctcaattaaatcggttggtcccctgctggggatgcatatgctggtcgtgcttcgcagccataactttgcatcagcagagcaggctgccgcctttctgggcgtggtgccgatcgagaaacgctcaggcacatcggtccggcgccggccgcggatgtcgaaaatcggcccccctcagttgagagcgaagctttacatgtccgccctgtgcggaaaaatctacaataagcgaatgcgtaatatttacgatgagatgtgcctgcggggtaaccctaaaatggtggccattggcgcgctgatgcggaaactggtgcactggtgttatggcgtcctgaagaccggaaccgtttttaatgacgaaagcctgaaacaagtaatgtcaacctga

SEQ ID NO: 240551 - DNA, 1350 bp, Klebsiella pneumoniae
atgaattccattgcagcaacgttaaaagtaggtaacaaccaactggatagttacttaccggtgcgtaataaaaacaataatattaattggcagattgtcaccggcctagtactgagttatgccctgaagcgtaaaatcgactcctacaatattgagcaatttcgtgaggactgtaaagttcacctgcaaacattaattgatgagccagctttctggcccgtgttggagcgaatgtatttttccagtcaggacatctttcgggtctctccactttttttgctgtttcatgctcagtttgattctgaaaagataaacgcaggctccatggcagataaacgtcttggaacgctgtttgctaacctgatgagggggttcagcctaaattacccgatacaggacaagcttaacttcatcgaacagcaaatgctgaataagctcaatgacaaagtaaaagtgctggaggaaggtccgtttgccgaagagcaaccttacctgccctatatggtaacttgcttccagtccgatctgacatttctggctgatcatccgcaatatcttttgcaggagttgaccaataccctgcgtttgtatgcctttagctggtgtgctcaactggcgctcaacctagacaattggagggacggcgagccacaaagtaaatcgctgttttttatacttgataccgaaaaagctagctctgagcgcgaccagataaaacgcttcggctataagtggtttgccagccaaagtgaaaaacttttcccgatactatccgcgctggaggttttgcaatggggtaaaggtacgaaaaagcgcccactgtggcaggtttaccaagatgcactgaatgaatccgatcctacttcacagacattgaataaccttaacaattacttgcaggattttgttgaggatcgccaacttacctctcgtgatcgcgcgacaaacctagaagatgcctttaaacagctattatctgttgccgttgaacaatttcagggtaagaaatccgaacgcgctacggtaaatcgcaaatacattaacgaactggaaagccagatttgtaccgactttatccaggttcgtggccgggcggggaaagtactggtgctgaatcaagatcggttgttgttactgaccaaccttaccataggtaaaaacaaaaaactccggttgcacgaactgctgcgcggttttgagcaacgcggattttatctggataaccagtctgcacaaatgctggtagcgttttatgagcgcatggggaatgtggagcgaatgagtgacagtggagacgccgtatatgtccgaaaaacagtggctttgttgaataaatcagatttcgggtaa

SEQ ID NO: 240552 - DNA, 1650 bp, Klebsiella pneumoniae
atgagcgcaatcacattacgtaaggcgttgggtgtacttgcgaagtcatcttcgttttccgtaaccacggagagtcatcggcaaagggatgttttcgataaactaaaagaacaactctttgttaaacaagaaattgaagaagagttacagcgttatctggataccgctactcccggtgagatcatttttctatgcggaagtagtggggatggaaaatccgaaattttaactcgctgtaagtcagatcaacgatatcagcagaagtttactttccatctggatgcgacgcacagctttgcacctcaacaatcagctattgatgcattgaatgatttatttgaaaatcatcatcctcaatcatacccgctccttatcggtatcaacacagggatgcttgccaactttgccagagaaggttctaagtcccatgaggctatccgtgctgctattgactcattcttgtcagagcaacaggaaggtaaccgcccttaccgcagagagtattatacattttttgatttcgaacattacccaaagttccagtttgatgaaaagcagaaatattccccttttatcgaaaaattattaaatcacttaacgggtaatgatgacaagaacctgttttacacaatttatcaacgtgatgaatcaataggaaatgatttaaaaatcgttgctaactttaaactactgtgcatgcctggtgttcaggatgttttaataacccagctatttaaagcacgattaataaaagatcagtttgttactacaagagcattactggattttttatatcacttactgactgggcctggatacctttttgataatctttttaatagtgtagaaaacgatttaattaaaaaagtttctgatttcgatcctgctaggttacatacatacgaaattgatcaatttattttgcgttatgagcttggattagttgatcctgaactggatgacttcctgggaacacttacgcatttacatcttacgtttgatcgccaaagtgttaagccgggggatgctgcctcattaatacgactcttctggcttttacaacatgagtcgttggggaataattatcaccataaatttttggcgttttttaaagagtcactgttcgaaaattactcaaagatttggcatctgcataaaaactacaccgcagacttggaacagaaaagattgctgaaccggttttattctttagaacttatagcgggtatccagcgctatgcgaaccgcagagcacctgagttgagcacgcaaaaagacgagttctttttaggcgaatttggcggcgttaaaatcactgcaccagtcgcacttaaaccggattgggatgctattctcaagaaaaatacggcccatccaacctgttttgacgttcatttaaaggtggggcaaaactcactggagcctgttcgtatcgggcttaatttatttgagttattgcgtaaactgaataacggttatcgtccgaataaatatgataaaagcgcaattgtattactggatgaaatcgttgaactgattgcagaacaggccaaatccagcagtgaaatcaaattttatgatggcgcacagcgggtttatagcgcgagggcggacgacgacatgatcaccattagtggcatggagggataa

SEQ ID NO: 240553 - DNA, 186 bp, Klebsiella pneumoniae
atgggactgaggttaagtcgtacctttatctctttgaaaataggcggtaattttgaatcattacacccttgcctatcaacaaaacaacttggtttactcaaacggatcctgtgggaatgtgtggtcgttaataaaggtgggctgggctttaacagagaaagtctcaatcttcggggatacgaatag

SEQ ID NO: 240554 - DNA, 888 bp, Klebsiella pneumoniae
atgaggtttttaaatagaattaaatatgtgactgctctgggagtaattactatctcctgttcagtaatggcatcaccttatggagattcagatgtcttgttcgggtgtgtcataaaaggtaaaaccactaaagaggtggctgtgttaaggaataataatgaggtcacttatttattcggtaaatcggacattaacggaggtggtggagttattcctgaaatcactttggtaaaaaatgtgagccagttaagtcagacctggaattacagtaggactgagggtgtgtcgatacatacattgaacataccagaaaacgagtatacttactctgtttcttatatagatgatggaaaaaatactgatggggaaataactgttttaaaacagggaaaagaaatcagtacgataaaatgcgatgatgtctgggaacaacatctgggtgacagcaatatgatgcatggtatccccgatgaacattcagataatattaacgaacatgaaagtaataaatccaactcagaatcagagaagataccatctcaatcacctgttaagatcaaaatagaagataccacttataacttcaaaggtaatgtcagtgctgagcacactataagaagacatgtttatgtttatggtttgaaggatagtgtaacgattactggtttaagtatagaccgtggtagttgttatcggtggaatacccgaccagtaactctgggctatggtaaaggtacagatttctctcttgttatcagtcaaaaggttgcctatgcaaactccgggtggaattgggttgagatgaataatagatactcaaaatgtatgtggtcagaaattgaaattaaaaccgatagcggtacttataattttaatctgtcaaggtaa

SEQ ID NO: 240555 - DNA, 1344 bp, Klebsiella pneumoniae
atgacaaaagagaccattagcatgagccttaaagaacttgaccgtctccagataattcgggattcagtcagccgccagatcacccaggagcaggctgcggaccgtataggcatatcaatccggcaggtgaaacgtctcgttcagcgctaccggattgaaggtcctcagggactggtttctcgtcgccgaggacaacgtcccaataatgcttttacgtcggaatttcggactctcgtcatctcacttgtcagagataaatatccggatttcggccccacttttgcctgtgagaaattacgggagctccatgagctggctttgtcggccgaaactttgcgcaagtggatggttgaggaaggtttatggcgtgagcgccgccgaaaaactgcccgcatttatcagcgtcggcaacggcgcccatgctatggcgaacttatccagattgatggttctccgcatgactggtttgaagagcgagggcctcgctgtacattaattgtctttattgatgacgccaccagtgcgcttatggtgctccgcttcgctcctgcagaaacgccccgcgcttacatggaaacgttacgtgattatctcgacaaatatgggcgtccccttgccctgtattctgacagacacagtattttccgcgtgaataatccggaacgtgaaggcgagctgacgcaatttacccgtgcaattaaaactcttgggatcgagccaattcacgctaacagccctcaggctaaaggccgggttgagcgtgccaatcagacgttacaggacagactggttaaagaattacgtcttcgcaatatcagtgatatcgaaacagctaacctgtggttgtctgagtttgtgaaagattacaactctcgcttcgcttcgatcccccgtgaaaatggtaacgcccacagggagattcttcattctccggaagaacttaactacatacttagttatcagtcccctcgtgtgctttccaagaatctgacctttcagtataaaacgagtgcatatcagatccgttcagaagggcaggtataccgtctcaggcatgcgattgtcacggtttgcgagaactttaacggtgaaataacggtgcttcatgaaagtcggtcgttgggttacgagaaatatgtcgatgggcctgaaccaataccgcttgatgatgaaaagagcgtacatgagcgtgtggataatgcgaggtttggtttacgatcaaaatattacgtaaaacctgctgctgaccatccctggatgacacggagaacgcagagtaaagatgatgtgaagccgccaacgttacccagaaagaaagtaggcccggatacgaccccaaaatag

SEQ ID NO: 240556 - DNA, 189 bp, Klebsiella pneumoniae; identical to SEQ ID NO: 161836

SEQ ID NO: 240557 - DNA, 297 bp, Klebsiella pneumoniae; identical to SEQ ID NO: 189847

SEQ ID NO: 240558 - DNA, 192 bp, Klebsiella pneumoniae
gtgagcaagatggaattgattttgattctttcttttatgcatatcctaatgcatctccatttagtggtgaaaggacatttagcgcagaaagcaaaaaacctacgatctatttttggagaatccctgattcatcaggacttccaccaccgggaaaatactgccttaatagttatcttggcgatatttatctag

SEQ ID NO: 240559 - DNA, 1311 bp, Klebsiella pneumoniae
  misc_feature (1295)..(1304): n is a, c, g, or t
atggcttcatacactcccacaaacgtcaaagggatctaccggttaaagccgatgccgtcactcgaaacaaacaaagtccatactttgacggttgttgctgagaatgttaacggtatatccaaaacctattcaatcgattttacctatatgccgatgactttcactctgaagtccatcgaatcagcgtctacgatttacggttacgtccgtccttacacttcgctggttactcagcaatcagggaatacctgtaagattttctctactgaagaagacgctcaggcgtttcttagccagttcggaactgcggtttatggaacggcctgttatgttcagtggaacaacgttccatctggtctcgaattttactcgaagtctaaagttcctggcctgacgggttacttctctaaagttggcgataacgtccttgactacaacgtctatgtgattaatacaaaaggctctaaagccattgccactcataaccgtaaaaccgttaaagccgttgaaccgtttgcacctgaaatttcatacaagatgagtaaaacggtagagactcttggtaaggatacagcactggtttatatcactggtggggacgcagctaaggtgcttgcaaaatcagtaccggctaacgttgtccttacaactaaggttgaaggccaggacgctgaaactaaaacctacaagaataaatcaggtggtgatacgccggtaacttattctgagcgtataaaagtacctgcagcgccattgtggacgcaaacgaatgtaaacatcgaagcttcctacgaaaatgaagccagtataaagtcatccagtgtgctcaaagtttatactgttccaaacttcagtattcgtgcctatatgaaagttgcagagcgtaaatcagcaacgagtttgaaagtaccggtatcggtaaacatcggccaatggaataacagctgtaactgtacattgtacgatgcctccacaatggggcagtgggatgtggtggtttacaaagttacctctaaatgggttacggatgaagaaaccggtaaagatgtttcggtaactgagcgaactcctctgaccggtgatctgcccgttaactctgaggggattgcgaccggtgagctcaacatggacgatctgactctgggtagtcaccgcatcatcgcagtagctacggtacgcagtccgtttaaagattttgtactcaaacgtgagacatcaacaacaagtatcagggtgtataaaggggccaacctcgaaggtgggctgtctaaatcgcttattgtaggccgagttcnnnnnnnnnnggcctga

SEQ ID NO: 240560 - DNA, 681 bp, Klebsiella pneumoniae
atgggtaggaaaagtagagagaaaaaagaaaggcatattaaagatagagccagcccccttaaagtatataggttttttaaagagaagagtcatgctgaggcattgtgcaatggcgatgtttggctgagcactattgaaacgtgtagacgatacgaagaccccctacagggagatccgaatgaagcaattcaaacctatagctcgggttttatctcagggggcagtgatgacagccgttttgtctctgctgcagctcatgccggaatccatattggacctggctgtagtggaataacgatacaaaattgtcgctcttttaataagatgcccgacgcctttgttttatgtacgacactggaatttcagccagaaaacttgaacgatacctttggaaattactgtgtggaaatatcaaatgttgaagagttttttggtcttattactaaaaagttaaaggggttattacctataaaattaggtgctatgggggaggtcagatatgggagtcattctttttatggttaccagcctccaccgggaccgattgggtttgtaaaaaatcgagataaatattcttcgcagaaagaattcagatttctttgggtgccagaaacatttgatattcaacccaggttagtcaaatgccctgagctttcatattgttgccgaatgatatcttag

SEQ ID NO: 240561 - DNA, 450 bp, Klebsiella pneumoniae; identical to SEQ ID NO: 220716

SEQ ID NO: 240562 - DNA, 270 bp, Klebsiella pneumoniae; identical to SEQ ID NO: 161844

SEQ ID NO: 240563 - DNA, 519 bp, Klebsiella pneumoniae
atggaaattagcgttactcccaaatactctaacaagttcatgagggccccgctggacctgtccttgaggtccagtgttaagctggcccactcggcagactcaattgacaatgtgacgtttaagctgaatggtaagcctgtcgatggtggcaaaaattactggtcacagacgtttgagaacatcatggaaggtagttataaactggaaatggacgttgtcagtacgcagggtcagagaggggttgttgtggttgattttgacgtgataccgaacacgcctcctacatgtaacctgacatacactgaaacgcaactgagctgggcatttactgcaaaatgcagtgatcctgacggcaagatttccagttatgtttggaaggtgaatgatcaggttcgtggtgtgttcggaagtactgcaacactgtccaaagctcaaaataagggtaagctggtggtgtctataactgcttacgatgacagcggtgattcagcgacaagtttcattacgttgaataactga

SEQ ID NO: 240564 - DNA, 126 bp, Klebsiella pneumoniae
atgctcgggcttttttttattaagttatggatgaatttgaatctatattactttggtgaaaatccgttattcctcgaagcatatatctattcttctgaggttaagccgtttggtgcaaagagataa

SEQ ID NO: 240565 - DNA, 141 bp, Klebsiella pneumoniae
atgtgtagccagttaaaccccttgttcgcagacgcatacctgaagccacagcagactcatgatgtgcagccggtgaaacaaccccgttgttcgcagtcggatacctccagcctcattagactcccgatgcatagcaagtaa

SEQ ID NO: 240566 - DNA, 333 bp, Klebsiella pneumoniae; identical to SEQ ID NO: 237908

SEQ ID NO: 240567 - DNA, 402 bp, Klebsiella pneumoniae
atggcgctgttcgataccggcaaatcggcgctgaaaccgggttcgacaaagctgctggtgaactcgctgctgggcattaaggccaaacccggctggctgatcgtggtggcaggccataccgacagcatcggcaacgataaatccaatcaacaactctccctgaagcgtgccgaggcggtccgcgactggatgcgcgataccggcgatgtgccggagagctgttttgcggtgcagggctacggcgcaagccgtcctgtcgccagcaacgagacgccagaggggcgggcgcaaaatcgccgggtggagatcagtctggtcccgcagaaggacgcctgtctgacgccgggcacggccaatacctcaggagcagagactaacggattaaaaagcgaaaccgagtaa

SEQ ID NO: 240568 - DNA, 279 bp, Klebsiella pneumoniae
atggtgtggagcggtcagtcattatatgcatggcacgtcaaccgactgattgctcctaacgaacgaaccaccgatgagcagaagaaaagggttggttatttcgtcttccataatgaccagtggtggctggttaacgaggggcttagcgggctcatatcacttcccgatcggaaaacggtcggcattggtgaaaagttgctgcttgaggacaacacccagttcatcctttcttcagaggatggtgggcggctggtagtggtacaactcgtggtgaattaa

SEQ ID NO: 240569 - DNA, 471 bp, Klebsiella pneumoniae
gtgatcctctacaggctgacgaaaacaaagaatctttctacggcctggaccggatatggtgcgaaagaggctggtgggcgctggaatagcgtgggggtgtcaatggtctatgtctccgaaacggcatcactaacgatgctggagacgctggtacacctgcatgcggcacagataatggactctttcacgctactgagtatcgatgtgcctgatgaattgatccaaagcgcaaatatggatgaattaccggccaactgggctgatgaggatgcgcctcaggaactggctgattacggagatgcctggtcatttaccaggagctcggttgcactgcgtgttccctcagccttatctccggtagagttcaattatctgttaaatcctgagcactctgatttttacgggatcgtgcagatggctcaacagataccgttccggtttgatagtcgtcttaaacctgacaggaagtga

SEQ ID NO: 240570 - DNA, 576 bp, Klebsiella pneumoniae
atggattcagtttggatattaaataatgacacaattgtcaatgaaaatagtttgtctttaatgagggcaacattagaaaacgatcagaacattggagtttgtggctccagactagtatattttgatgatagagaaaaactgcaaggcctcggcggattattcaatccagttctatgtacttccaaacattataaagcatatgagcgtgctgataagatattcgataatgaaaacgtttcgagtaacattgattatgttattggtgcatcaatgctaattaaaagggctgtattagagagcattggcggtttatgtgaagactattttctctattacgaagagatagattattgtatacgcgcgaagaaattaggatataaagtttttgtttgcactgaaagtgttgtgtatcataaagaaggggcatcaaccaaaaaaaatcaaaagggtattttagctgattattattcagtaaggaatcggctgctaatttcgaagaaattttatcccaaatattatgcgctagtatatttatccatttggttggtcttgcttaatcgtgtgagaagaaaatag

SEQ ID NO: 240571 - DNA, 177 bp, Klebsiella pneumoniae
atggatttcctttgtttcgctattgaaaccacgaagataacgcccatagttctcaaggttccgaagcccgtcatcaagctgtccgagagttacactgatgcagactggagtagcggaattcatgagataaaaatccgcatcactgaatgtgtacgatcttcgcgctccgagtactag

SEQ ID NO: 240572 - DNA, 162 bp, Klebsiella pneumoniae; identical to SEQ ID NO: 189562

SEQ ID NO: 240573 - DNA, 225 bp, Klebsiella pneumoniae
atggctccggaagagagtgacggtctatggtatctgtttaatgtactgaatggtaacagcgctgaaatgagtgctgaagctgcggggattgcggcctgtctgatggcttacagtcaccatgcctgccgcacggagtgcgatgccatgacggagcattattaccgtctgcgcgactatgcgctgaaccatcctgaacgcaacgccattatttacatcatcgactga

SEQ ID NO: 240574 - DNA, 225 bp, Klebsiella pneumoniae
atggctccggaagagagtgacggtccctggtcgctgtttaatacccttaatggtaacggcgctgaaatgagtgctgaagctgcgggtattgccgtctgtctgatggcttacagccaccatgcctgccgcgcggagtgcgatgccatgacggaacactattaccgtctgcgggattacgcgctgaaccatcctgagtgcaacgccattatgcacatcatcgactga

SEQ ID NO: 240575 - DNA, 747 bp, Klebsiella pneumoniae
atggattaccgtggtgaaatgcaactcacagattactcagaaaaatcgattgaaagattcagaaattacttatttgataaatatagaaatataaaatcactcaatgatacacttggttcagaatatagatcatttaatgaaatcaacccaccatcaaaaaatataaacactgtgcatctgaataacttttttgagcaccttgattatgcttcatcgggaaggttagcaatatatggttgggcagcaggaaacggtcaaggtccagcaaaagtcaggatttttatagatggaaaagatgtggggtatgcagaaagcgggctcagtcgaatggatgtatatcaggccatcccaacattgggcacttcagctggagggtatcgatattatcttgattttcgaaagatgagtaaaggaattcatgttgtagatgtcgtccatgacgataatgggaaattgacattgatgaaaagcatagatgtgccggtaatagatcgacaacaaacaaaacctgttcgtgtcggagaaggcataaagttgcccgaagagaaaagcatgaagttctggaatgattatcctgagacattacaaccagtgtattacaatccattgtccgtggaattttataactttagaaaaaaagaggtagcaagagagatacaaaaatatgcagatattgtaagctcatcatgcattgggagggatagaaccttttctcaccaaatagcgccaatgtttaatgcagactag

SEQ ID NO: 240576 - DNA, 939 bp, Klebsiella pneumoniae
atgagcaaaaaagaagaccacggcagtattaaaatcccacctatggaatactttacgctcgacagggcggccagtattttgcaatgcgatacagatgatttacttcactatggagttattggggctataccgttatgcgtaatgatgaggggttttccctctgccttgatttttgtgggcggtaaagatatacaagacacaattgagttttatcacgaacacaaaggaaactcatcatttctttttcgtgagaataactacatatctcattttaattcctttctcaccgagcatgacgtatacaaaacagatggtgggtttattttatttaggggattggcgcatgggctatggtgtctgggacatggtgaaatagaaagcctcctttattctgagagggcaagggtgatagatacgacaattttcaggccgttcggatgggatactttccgcgagaagactggcctttcgtgtcatataattagcgatagatattttaatcagagctggctaccgacgctaaacagacaactagccgaaagcgcagggtttcagttaagagagagccgaaagcccgcgattaatgagattttgacaacttccgatctatttattgccagagataccatcttaaaactaaaagacgcaatagacacaggcgagccaatgaaaagcatgattaacggaggcgttaccatcccgccagaacccagcgagcaaaagcaaatagcgccaacagtgaacagcaataaggttggtgagtttattgaaatgctaatccgatgcgtacctgagctgggtgaagatgtaataaccgcaaatcccaataaacgctatgaaattctaataaaatttctggaggataagaagagagaaggcaagctcgccggcatgagtatgccttcctctgcaaccattgagaaatacttcaaaatttga

SEQ ID NO: 240577 - DNA, 1275 bp, Klebsiella pneumoniae
atgcatttgaaagctgttatattttcaatagcagatgttgttttgcccacaacatcaaatccgcaatctcagcaacttaagtcacgaatcgatgttgagttgaggaagttattcgcttttttattatctaaaaatattaaggtcctttttctaacaaataataataggaatgttaggactaataatgggaacattgcacttgatgattatcttaagcaaaaattcccagactcaatccattattgccgtgagcttaacaatgaaatacctgcaaaacaaacaggaagagccaccgatttcatcatgaatgatttagatataaatcgtaatgagataatttatgttggccgttcagaagaagacttacaggccgcgacaaatggaaaaactttatttattaatgccacttggtatcaaccggtcactgagtatggttttcagttctctgaaccaaaagagattgcgagatttatcgatgtgttttgtttaagagaggaattatggggatggcagggccacttaaaccaagatgtccactattatgccttagctccctttagtactcataatcctgagtttacaatgtactctgccaatgcacgaaacttagctaagttatccattgggagccctgatttttggattagatatcttggtgctagtatttacttttctggtttaagtgaaggtgcaagctttatcacaacttatgttggacataatgctaatgacccttataagttggcaaatataatggagcatgacctcaaagggttggcagtatcatttaaaggtaaatatctcaaagatctctttataagacatactacagctgtaaaatctcagcaggaaagaatagagcgccgacaagttataataacatcgcaaactaatactgtgaatttaaacgcctctcctatcaaaaatcttaacaccggagaacgatatgttaacaggccagtattgcgtggaaagaaagtactagttattgatgacttctgcactgagggaaatgctcatgaaaccgctaggatgtatttaaaggctgcaggagcggaagttataaatatttcatggttaaaatttgtcaatcgagatgtagccgtttgcgaacccaattgtagaataagaccatgggaggcaaacatcctcacttctgaaaatattaattatatcggacgaatcggttatgcagaaaaccttactcatggcggtgcgcctcaagagttggcagagaaaattagacaatatgatcattgggattggccgcaatag

SEQ ID NO: 240578 - DNA, 984 bp, Klebsiella pneumoniae
atgactgatactgatacagctcgatggaacactgaaagcgctgctttgctagttctatcagaaatacgtggcgtaagttattggtccctatataaggttgctcaaaaagggatccgcttcagagatgttgtaacttgctcaacattatcaaaattcgaatcaattctcggagtgagactacatcgtgcaccatattctttgactgagaataattggtcgacttttcgtgatggaatgatttctgccgcgaaaagccttttaacacactatcatagtaacggttataaattaatacatcatggttctccagattatccggagaaattgaatgatttaaatgagcgaccttactggatttttgctcagggcgatacttcgttgcttagtaaaaaatgtgttggtgttgttggtacgagaaatccaactactcttggaatttatttaacacaagcagttgtttcgcagtttattgcatcagattatgtaactgtaagtgggttagcttatggtattgaccaagttgctcatgaatcatctattttatttaaaatacccacaatagccgttctaggaacaggtttaaattctaactatccaaaaaacagtgttggacttagggagggtattgtaaatgctggtggacttatactcacggagtatctcccacatcaaaaaccatcacaagaaaactttgtacgtagaaacagaatacaggctgctttaagtgatattttaattcctgtcgaatggaacttgaaaagcggaacgtcgcacacggttcgaaatgctgctcaactgaagagaacgatattgtgtccattactaagaggtgaatctgttcgggaggagattaaatactgtcaggacgaatactctgcaataatactggagactcctttgacgggatttaaagatgtgttggagttaattaaaacaaaatccagtaataaattacaacaactgtcacttctgggggatgaataa

SEQ ID NO: 240579 - DNA, 678 bp, Klebsiella pneumoniae
atgtgcggacgatttgcccaatcacagacacgcgaagaatatctggcttaccttgccgaagaagctgagcgtgacatcgcctatgatccagaaccaatcggccggtacaacgtggcgccagggactaaagttttgctcctgagcgaacgcgacgagcaattgcacctcgacccggttcactgggggtacgcgccagggtggtgggataaaccgcccttgattaatgccagggttgagaccgcagccaacagcaggatgtttaaacccctgtggcagaacggtcgagcgatctgctttgcggatggatggtttgaatggaagcgagaaggagacaagaagcagccctatttcattcatcgtgctgatggcctgccaatattcatggcagcgatcggcagcgtgccttttgagcgcggcgacgaagccgaagggtttttgatagtgaccgctgcggccgatcaggggttggtcgatattcacgaccgccggccgctggttctgacgccggaagccgcccgtgattggatgaggcaggatgttggagggaaagaggcagagaaaataattgcagatggcgctctgtcagcagaccatttcacatggcacccagtttcacgcgcggtgggtaacgtgaagaatcagggacctgaattgattgaggctatcaaaagcttgtag

SEQ ID NO: 240580 - DNA, 762 bp, Klebsiella pneumoniae
atggataagaatttattacagatctgctatgaaggtgaaagtggagagagttacatccgtagcatcaatgagaaaggtcaattctatgtttcgctatctgatgtactaaagacgctctcaactgaaaacagaaaaatggatggtaagactcctcagagcttattacctgttataaaagcggttattcaaacacttgatcctgatgagattaagaacttccccattatcgaaaacggaatcacaacttctgaagcatttttagctgaacctgggctgtatagggttttagctcaagatacatcagcagctggaaaaaaatttcaacggtggctgtttcataaggttttgccctccattcgtgaatttggtgtttttccccctcctccaaagcatgaacaatctgagatacgtgcttttgctacaagccttcaacagacagtaaatgctttagttatggaaattgctaaacgtgaggagctcgagagccgtgttaatgacgtagagttaaaagttaactcattagaaagtttacgagatctttcaaaattccggagtgtcccacaacgcttaatggacttaggcttggaggttttgtcaattgaggagttgtggcattggtgtgaaaaattacgcagcgaaagaggggctgaaaaaataaaatgtccgtcagggatcggaatcaacaccttatacccccttggtttggtagatgaagctatcgctttgtatcaaaaaaacgttgaggcaagacagagaaggtaa

SEQ ID NO: 240581 - DNA, 615 bp, Klebsiella pneumoniae
atgaatactgatgtaataatactgtccagaacaaaaatgtctgagggaaaaatttgtgttggcggtttagatcttaatagtggaaaaatgttgagattgttagataatagagcaagcgctttgacatcagatttcccatataaaatcggtgaaacttatgccataacatttgaacaaagatatcaattaatcgcacctcatcttgaggacgttgcggtctacaactacgaactaaaaagcaactgtaataatgtagctctaaataaaatcgcccatggcaactctaacacttataacaatctcagtgagttattctccggaaaactgcattggcaaaacaacagggggtatgttttagcatcagatcctcctgactttagtgtgcagatagcaaagatcaataaaaaacttgtgaaagtcgggcttgattataaagagttcggtttttccagatctagaacggttaagtatgttggtgatcttgacataagcaaaatgcctggagtaatcaatgaaggaactcctattagattttctcttgcaagaccatgggataaagataaaaatggcattaaagtctgctacttacagatgtctggggtttacttactataa

SEQ ID NO: 240582 - DNA, 564 bp, Klebsiella pneumoniae
atgaatactcaaaaccagacaattttcagcattgggcatggtgctcgcaggttggaagaatttatagctttacttaaaaaatatcatattagatatgttatagacgttcgctcaaaacctagatcgaggtttcacccacattttaatcgtgaagctttaactcttcatttgaaagaagttggtattcgatatgtttttatgggagagcaattaggcggcattcctaaagatgaacaatgttatgatgaagatggtcgagtcgattacgagaaaataaaacacaaaactttcttccatgaaggtatagagagaataaaaacagcatattctaaaaatctaaaagttgtttgcatgtgcagcgaactttctccttgtgattgccatagaagtaaactaataggtgactatctgcaatcactaggtatagaaatgcaacatataaataaaaaaggagatataatttcacaaaatgatgtcatgaaagaagttttaggttcaaatggagagcttgaccttttttcggaaaatacaagaaaattaaaatcgagaaaatcgtatcgttga

SEQ ID NO: 240583 - DNA, 1779 bp, Klebsiella pneumoniae
atgtcgtttgaaaataaagatatttccgcaaatgaaaaactaagaaggcctcaggttgaagcatttaataaaataagagaacattacagtaatcaagggggaagtgagattggtctaatacttcctgttggatgtggaaaatcgggattaatatctatcactccatatgcaactacctccagtcgtgtgttgataatagcgccaggtagaaagataagagatcaattggcaaaagatatgaaatttagcgaacctgataacttctatctcaagtgcggtttttttaatgcgatcgatgaatatcctgaagtgtcaattattgaaggtggaggtaagtcgaatattcatgatatcatggccagtgatattgttgtttcaaatattcaacagatagcaggcgatgataataagtggcttgaacaacttagtgaagatttttttgatctaattattgttgatgaggctcatcataataaagcaagtacatgggttaaggttaaggaaaaattccctctggctaaagttataaattacagcgcaacccccatgagaagtgatggtcagttaatgagtggtgaggttatatatagcttccctgttgttgaagctatcagagaaggatatataaaacgcctgcacgcaaagatgataagcccttcgaagttagtttatatagataataaagggaatgaaataacgcttacaagtgctgaagatattaagcgactgggtgaggaagaggcatcttttcggcgcggagttttaatgtctgatgaaactctcagtacattagttgagctttctattaaagaacttcaccgattgaggctagagtctggagaaagccgattaaagataattgcctcagcacttaactattctcattgcatacaaatcaaagaagcattcctagctagaggattaagagctgattatgttcactcaaatgaagatggaactgtaaatgagagggtattcgcgaaactcgaaaaccacgagcttgatgttattatccaatctaaaatgcttggagagggctttgaccataagtttctttctgtggctatggttggtagcatctttgctaatcttagtccatttgttcagtttgttgggcgagtgatgcgagtagtcaaacaaaacgcccctaacgatttagttaataggggggtggttgtatttcatgttggtgctaatattgcaaatagatggagtgactttagaaactttagtcaagccgatcaggaattctttgcggacttgttaccagaaatagacgatgtggaatttggcccggatgggactagtgatagagatccagatggaactggtggggatcataagcttgttcctgtaaaaattacaagttccgatggtgtaattgcatcggaattagatccgattggcgatgtgcaagagttaaagaaagagcttctagctttgggtattactactactgaagctatagatatcttacgaaaatctcgtttgagtaaacaagaccaaagacgagcaggaaggcaagcgattaatgatttagtcaatcatcatgcaggtttattacttgcccagttgggctttaaagctaaaggaagaaatttcaatagatctcaagacaactattcgtggcttgtgaaaacgcttcatacaaaaattaatgttcatataggatgtgaaagtggagacagagaaaatcttagtttagagcaggttgaagaagctaagagaattattcccttgattacggatgaattgctgaaggagttgggcaatgcctaa

SEQ ID NO: 240584 - DNA, 171 bp, Klebsiella pneumoniae
atgcctaaaattaaatcacttgttgtgagctctaagattgaggttgcgtccagaaaaacatgctgtaaacacaataagcaacatgtgatttctaaaggagagtttcgtcttagtgtgaaaaaccccactcaaggtgacctgcccccagagttagatacaaccttcagttag

SEQ ID NO: 240585 - DNA, 1173 bp, Klebsiella pneumoniae
gtgagctcaggtgcaaaagtagtagccgcgtttattcgcgagacaacaccaggaatcacgcctacagcaggggcgtggaacctgctgcgtcgttcttcatttggtctgaaaccaacgcagaacacaaatgataatgacgaaatcgctggtgaccgcatggcgcaaggtgtttcacgcggcacagtggatgtcggcggcgatgtcggcacgcggtttcgctggaaccagcatgatgattttcttgccagctgcttcggttccgaatggctaaataacgtgctaacgatgggtaatggtcgcattacgttctccgtggcgacttttgccagtgatgtggggatcgcccagattgcccgcggttgccaggttggcaccttccagatggaaatcccggccgatggtgatatcactgcaaccattacgtttgcagggctggactgggagacgaagggggacgataccagctatttcaccacgccggttgatttggcgggggccctgcgttactccttcaaagaggtcacgaacatccagctgaatggtgttgatggcgggacaggcttctgcgtcgacacctttaacattcagttcaacaacaatatgcagactcagcgctgcatcggtaccggctcggcgttcgccggcgcaaacattccgacaacctttaccccgtcaggtcaaatcacgctgtcatggtcaaaggctgcctgggaggtttacaaaagaacgttcaccggcgaaacggtgccgtttagcttcacgctggagaatgctgaaggcgcctataccttcgatttcccggaagtgcagatctccggcgactggccggatgcggggagcactgacattgttcaggttcagctggatatcaccgcggccaatacgccgccgacgattacgcgcgtgcctaaagtgccggcgacggcaatcagtgttgcgccagccacttcaactggggccgtgggatccacggtgacgttaaccgtcacgcttacgccagctgattcaactgataccgtccagtggacgtcatcggatccgactatcgccagcgtggtttctaccgggcagaaaacagcaacagtcaccagaaatgctgctggtactgcaatcatcactggtaaggcccgcacctataccgcaacgtctgaaatcaccgttaccgcgccttaa

SEQ ID NO: 240586 - DNA, 141 bp, Klebsiella pneumoniae
atgaacaaagaaatcgctcgctccctcgctatttctgccgagacggtcaaatggcatatcaaaaacatctacgcgaagcttaaagtgaatagtcgcactcaagcgatgagcagggcgctggagatgaaattactggattaa

SEQ ID NO: 240587 - DNA, 999 bp, Klebsiella pneumoniae
atgaaagtaactttttcgcagttaaaagaggccttcaatcaggtactgcttaaacgcggcgtggcggcagaaaccgccgaggcctgcgcggacatgttcgcccgcaccacggaatccggcgtctattcacacggcgtgaaccgctttccccgctttattcagcaactggacaatggcgatatcatccctgaagccaaaccacagcggattaccagcctcggcgcgattgagcagtgggacgcccagcgctccatcggcaatctgacggcgaaaaagatgatggaccgggccattgagctggcatccgatcacggcattgggctggtggcgctgcgtaacgccaaccactggatgcgcgggggcagctacggctggcaggcagcggaaaaaggctacattggcatctgctggaccaactccatcgcggtgatgccgccgtggggcgccaaagagtgccgcatcggcaccaacccgctgatcgtcgccatcccgtccacgccgatcaccatggtggatatgtcgatgtcgatgttctcctacggcatgctggaggtgaaccgcctggcgggtcgccagctccccgtcgacgggggattcgacgatgaaggcaatctgaccaaagaaccgggcgtgattgagaaaaatcgccgcattttacccatgggctactggaaaggatccggcctgtcgatcgtgctggatatgattgccaccctgctttccaatggatcttctgtggccgaagtgacccaggaaaacagcgatgaatatggtgtttcgcagattttcatcgccattgaggttgataagctcatcgacggtgcgacccgcgatgccaagctgcagcggattatggatttcatcaccagcgccgaacgggccgatgaaaacgtggccatccgtttaccgggacatgaatttacccgcctgctggaagagaatcgtcgcaacggcatcaccgttgatgacagcgtctgggcgaaaattcaggcgctgtaa

SEQ ID NO: 240588 - DNA, 930 bp, Klebsiella pneumoniae
atgaaaaataataccggttatattatcggtgcgtatccctgtgcaccctcttttcaccaaaaaagtgaagacgaagaaaaagcattctggcgacaactggctgataccccggatattcgcgggctggagcaaccctgccttgaacatctccatccactgggcgacgagtggttaatgcgccataccccagcagactggcagattgtcgtcacggcaattatggaaaccatgcgccgccgcgggggtaacggcggctttggcctggcatcgagcgatgaggaacagcgtaaagcctgcgtggcctactaccgccacctttaccagaaaattaatgcgatcaatgcggcaaatgccggaaaaatcgtggcgctggaactccatgccgcgccctgcgccagcaaccctaacgtcgcccaggctaccgatgcctttgcccgctcactgaaggaggtggccagctgggactggtcgtgcagtctggtgctggaacattgcgatgccatgaccggccccgcgccgcgcaaaggatttctgcctttagagaatgtgctggaaacgcttgccggttatgagatcagcgttgccataaactgggcccgctccgcgattgaaggccaggacactactctgccgttgacccatacccggcaggccaggcaggcaggtaagcttggcgcgttaatgttttccggcaccacgctcaatggcgaatatggcgaatggcaggatttacacgcgcccttctctccgttctgtgcgcaaagtttaatgacccacacgcatgtgcgggaattattagcctgcgcgggcagcgacgccctgcaatttctgggtattaaattactggaaattaacccggatgcggacgtcaatcaccgcatagcgatattacgcgacggcatcgctgccttaaataaagcacaacaataa

SEQ ID NO: 240589 - DNA, 138 bp, Klebsiella pneumoniae
atgaatatgacctctagaccaggactaaatgaagtcccacgtcagcgttggctgcgaattattccacccattctgatcgcctgtattatctcttatatggaccgcgtcaatattgcttttgcaatgccgggcgggtaa

SEQ ID NO: 240590 - DNA, 1461 bp, Klebsiella pneumoniae
atggatttttatttttcccgttttgaacatcgccgaccgcctgaaccgctcagcaccccgcgctgggtgagaatgatttggcaggtattagctgtggccgccctggtgcttggtgccaattatatttactggcgctggaccgcgtccttaaacactgacgccctgtggtatgcgatccctctggtgctggcggaaaccctggcgtggattggcacagttctgttcaccattaatttatggcaggaaaaagatcctccgccaggggtccccccgacggagatcaacgactgtctgcgcgcggatgaagcggtggagtcgaggccgattaaagtcgatctgtttatcgccacctattccgaagacgtggagctggtcaggctgtcgatccgtgacgctatgcagatgacctatcctggtccgctcgattataaagtgcatgtccttgacgacgggcgtcgcccggagatgaaggcggtctgcgagcaggagggggcgaactatatcacccgtcagagcaatatcggctacaaggccggtaacctgcgcaacgggctggaacataccgatggcgactttctgatcatctgtgatgccgatacccgcgttttcccgaccctgctgagccacacgctcggctattttcgcgatccggacgtcgcctgggtgcagaccccacaatggtttttcgatctcccggaaggagaggatctggcgagctggctgcggcgtaaagcaggcggtgcaggctatggcgtgggctggctggcgcagaaaatcgtcggtccggtgaccattggtcgcgatccttttttcaacgatccgcgcatgttttacgacgtgattttacggcgccgcaactgggctaacgccgcgttctgctgtggcgccgcctccgttcaccgacgggaagcggtgatgcaggcggcgctgcgcagctacgtctggagcgttgacgccgaaatcgcgcgtcatacgcgggatattcgtgacccggcaacgcgggaagcgctgcaggacgccatgcgcccccacgttgccttcgatactgaactgacgccctataagttccacgtctcggaagatatttatacctccatcctgctgcacggcgacgctgcccgccgctggcgctcggtaatgcacccgcggattgagtcgaaaatgctctctccgcaggatatgctgacgtggatgatccagcgctttaagtacgccgccggatcgctggatatcctgttccatgacaacatcttcaaccgacgccgctttaaactctcgctgccgcaaacgctgatgtacgcgaccaccttctggtcgtatctggcctgcgtgtggaacaccgtattcctgatctcgcctgttatctatctcttcaccggcattccgccggtgtcggcgtggtctacccctttctatctgcactttttacccttttttattgtctccgaacggctttgttga

SEQ ID NO: 240591 - DNA, 885 bp, Klebsiella pneumoniae
gtggatactctctttaccattaacgcctgtaaaacctttggctgccgcaatttaggtttaccgtctgcggctgagtatcatttcccgaattttcgactgggctacccggcgctctactgcgcagcctgcggcagctatcccctgtttaacgaacgggaattccgcccctggctggcggcttatctggcggatcatgcccgccgctacggctatttttgcccggtatgctatcagcgggatattattcgctacggccgcaatccgcagggtacgcaacgccttcagtgccgccactgtaaaaaggtctggacgccaaaattcccacacatcgccccaattgaagccccacgacgtatttgcagcgtaccgttgatagcgccattccagggtaatgccgccgggcaaaagctctattttttattaagctttgatgccgtgcgcggtaatgttattcatcttacctctaatttcactcctttcgcggtaggcgaatcattacgctatcgctggcgcggcggacaagccgacagggaggagactgacgatattattcaacgtatttctctcactgaaatgcgctttttacaacgcagtcagttcgatgaaatccagtacggcagcgcaatgcaaaagcgccatgcccgcggcaatatattgcgccctgttatcgccgcgcacggtcatttcaaactgcttagccagcggtttccagaggtgaaaacgcacgttattgcgcatgaatgctttttacgcggcgcggcgatcgttgcctgggcgccgctttttcgtcagcggcaaggcgatctatggtatgtggaagaagagataaggaacccagccagcccggctccgtggcagggtgatgctgccaacttactgatttag

SEQ ID NO: 240592 - DNA, 3567 bp, Klebsiella pneumoniae
atgattggcatttatttacccgcatttccgttccggggtgtaaaagctccttatttgtggtttttatataaagccatgacggctattaaagagccgttggcattgattacgacacaagattatttgttaccctgtacaaagtggcaggaagaggggcgctgggaggttactgatgacggacagaaacgtttaggatacgaacttcctaatttttcagttcgccaaaaagacaacgtctatattgttaatgaagaatcattatctgaagcattaactgagtgtggcgataacagtaatctcctttttaagaaatttctgacggaaatcattcctgattttaaaaatgctctaatcgctgcattacaaaaacaaaacgacattgaatgtattctgaccatatgcaattgtccatcactgaatgctgcagcagaaaaatataatattccagttataaatcttgaattaggtccgctgcgttctccgacgtatctttttactggttatttcgatttttctggtgtcaatggcaacactgaagcggagaagagatactttgctgctaaacaacaaggtgttgtctttaataaaaaaaatcgcatttcagcgttacgtgatttttttattaacagtcgaaacgatgatgactacattgaaccagaatatgatgttggtatagttttgcaagttgagaacgattccaatatccttgcatttagtaatagtttcgataatcaagccttattggactatgctgaaggttcatttattggaaaaaaaatagtacgaccgcacccaggaagccattttagattaattgagaatcctggatatgaaattgataataacaatctgtcaatcatcgattttcttaagaaatgtcgaaaaattctaactattaattccagtgtcggtctggaagcaatgctaatgaatattcctgtgaagattttgggggattgttcttatgcattttgtaatgttgatgatgttgatgagcgagttgaacgtctaaccttctatttattttcttatctagttccatttgatttgttatttaacgctgaatatatccgctttcgattgacctttccatccgaacatgaaattttaagtaagcatatcctatattatctatcgtcacgagaaaaacagagcattattgatatgaaaacatctactacagatgtcgtagaaaatggaatgtatgagcgaggtctcttgaaagagctcgaagagttgaagataaaaaatattgagttgaatgatattgtgagccgactagagttagagttacagcaagagaaattgttacaagctgagaatgataataatgacatactggttgatgttatcgtacccgtttatggtggtttacaggaaactcaggaatgtatagagtcagcaatatcaaccctcccctcatgggctgaattaattgttattaatgatgcttcacctgaacctgaattgacagattggctacgtaaacgtgcacaagacaatagtttcaagttactcgagaacgaaaataatttaggtttcgttgcaaccgtcaaccgtggcatgaaactgcattcgaaacgggatgttcttctcttaaatagcgatgttgaagtcgctaataaatggctggaacgtatctatgatgcagcttatagtcgtgagcgtgtagggagcgtaactccattttcaaataatgcgacgatttgtagtttcccaaatttctgtgaagataatgaattattttccggaatggatgtccaggctctcgatgatgaatttgaaacttatggcaaagaaaataatcttgtcgagataccaacaggtgttggtttttgtatgtacattcgtcgtgactgcttaaaccaggttggatattttgacgaagagacttttggtcgtggttatggtgaggaaaatgactggtgtcaacgtgctgcaaaagccggttggcctaactttcatcaattgaatgtctttgtttatcacaaaggcggagttagtttcgctggcgagcaaagcccgcgcaaaatacgcgcgatggaactccttaatgaattacatccaaactatacccgtgatgtaatggagtttatttcaagagatcctgctaagcaagctcgccagcgaatgctactgcgcattctggcgaaagcaaatcttcagaaaatactgctggtttctcatcatatggggggcgggacaacctatcatctcgaagagttgtctaatttttacaaaggaagagcatacttctttattttaaagcctaatgcagacaacagtagcgtagtgatctctttgagtgcagacggacgcacatgcaaagaaagtatctctgttgatattgaaaatggctatgatgatctgctgagattattacgctttttgggtatatcgcatatccatttccatcatttgatgggaatccctgagaagatcaaaaaactgcatttagatttaaaatgctcctatgacgtcacaattcatgactactttgcaataaatggaaacccatcgctaaccgacaaaaatggtctttttattggcgataatacaacaaacatggacgaattatgcgcggaaacatatccgttacctgttggaatgtcagctgccacatggcgttcaaatatgaatgcgtggttatttggggctgagcgagttattttcccgtcggcagatactaaatttcggtttacaagatattttcccgatatttctgagaaggctgtcatcgcatggcatcctgattacgaaaaaaatgctccatatcctgatgtcaggaaaacttacacgggtgatcggaaactgaaagtccttgtccttggcgctatcagtcgtgaaaagggcgctttcatgctggatgaggtggcgcatgcacttaaaagagaaaacattgagttccatcttcttggctacgcttgtagtacgctaaatgatgcggttatttgccatggtgcgtattctaatcaggatttagagaaaaaactcaatgatattgctccggatgtaatgtggttccctgcgcaatggcctgagacatatagttatacgttgagtgcagcacttcaatatgggttaccggttgttgtaccaaatattggtgcctttggcgaacgactcatcggacgaaaatttagccgtattattaattgggatatatctttccaaagaatgagtgagttatggcgacaagctattgcagatttcgatggctttttccagcaacagaatgttgatcctatgccggatgtttcgtcagaaacacgtgttgatcatttctatcaagattattatattcgtgattcatggtggcgtgaaagcgagcttggcagaattgattttaaaactttgatagatagtttctattcttcagagaacatcacaatagctgaagaaaaaatatctcaacctcatggaaggaaggaaaaattattggctgtattatggatgttgcggcaaaatcctgcattatcttgggcaaccaaacttatcccctaccgtttgcaacgatatgtgaaacgacaactatcgcgtcgtgcattacatgaaattgttcgataa

SEQ ID NO: 240593 - DNA, 207 bp, Klebsiella pneumoniae
atggttgaaaacgaagaaatcatctatgatgcattggaacatcatcataacaatggtgcaatattcattagcccttactatttagaaatcaaatcagaaagttttggcgtcgataaagaacacaaaaaattcagtatcaatgaaaataacacaaattattattcatcaagtttctatcatgccctaagcagaatcatgaaagaatag

SEQ ID NO: 240594 - DNA, 351 bp, Klebsiella pneumoniae; identical to SEQ ID NO: 146911

SEQ ID NO: 240595 - DNA, 195 bp, Klebsiella pneumoniae
atgactggacagcgcattgggtatatcagggtcagcaccttcgaccagaacccggaacggcaactggaaggcgtcaaggttgatcgcgcttttagcgacaaggcatccggcaaggatgtcaagcgtccgcaactggaagcgctgataagcttcgcccgcaccggcgacggcactgttgcaaatagtcggtggtga

SEQ ID NO: 240596 - DNA, 2967 bp, Klebsiella pneumoniae; identical to SEQ ID NO: 59353

SEQ ID NO: 240597 - DNA, 423 bp, Klebsiella pneumoniae
gtgaaatcgtatgaaaagatgaaagaacatgagatggacggcgctgattacccgttgtcactggcaagtgatatggtgctgccgtggccttggagcctacaacgctttatcaataacgtttcacgtattggaagctataaggggaagccgtggaagcaggataatagcaatcattatgttgagctatggttgccctggcgtattggctttgtgggtggcggaaatcattcaataacggctggcattctggccggagaagggacgctaatccctgagcacgtttacgatatgtcctggctgtttgagctggtccgaacggacggtaatcactggtttgttgacgatcataaagtcgaagcggttaagtcggggcgttcagctgcggtgtttgagatagggcggctattagtggaaggagcttaa

SEQ ID NO: 240598 - DNA, 2211 bp, Klebsiella pneumoniae
atgatgcaatctgaacacactgcgccttgtccgacaacatcactcagtcttcctgacctcctttgggatacccgaccggagatctctgaaagcgagcttgcggcactggatacattggtcgaccacttccagcaaggaggtaaaaactggtcacctgatatacaaaaacggctttcccgccttcttttaccactacgcgacacgctaacaaaaatgcatgcggccaaggccccctacaattcatctattcacgatatagtcctggagatgcagcgcatccggaaaacatactgggcctggacacaagaagagtggttagaagttatttgcaacagcgaagaggaatttcgtcgacggtttggagccagcggcaactgtcggcaatatgttatggcgttggcatggttgctatgtgggtttgagcggctggaacactgtggcatattctatcaatatcggctctgtcttaaggtttttggccgacagagcaccgattttgccgtcagccagcttgacaatatgatgcaggttctgggatatgtgcctcgtgatggtcggaacaacggcatcagaaatgccatgtgtatggcaatgcttctgcaaagggatgctcaactagaccatatcaccgtgaccacattgcaacagattgctgcaacgtgcccggattacctccgggaagcctccgctactctatcgcgtatactggctgcatcagggactattgaggaagggtttgatcaccggataacacaacgtcgccgtcctccccgagaatataatgcaacagccgatgtaccaactgaatggctggtatggtgcaaacggtggcgtgctacctcagtacttcgcccctcatctattttgtccggttggtacgttttgctgaagtgtggtcgctggttagctgagtgctatccaacctgtctgtcaccatctgattggacacgggacaccgcgatcgcttgggtgaccgccgcttgtagaatgaaagttggtgaatgggcaaaccctgggggcatgtatcgtgaccgtcgtggcaaaatgatgatgcctgcagcgagggccaggatgttgggtcatattagaactttctttcatgacctgcaggaatggggatggatacctgtacgattcagcccagaaagagttttcagggcaccgcgtagcttgacttccctgattggaccagagcctcgcattgtggccgatgatatgtggtgtaaattacttcacgccggacagaacttgcaggagtcggatttaccaaactgtgttgcatatccttatttttatccactggagatggtcagagcactcagcgttctctggctatttggaggcctcagacgtgatgaaattctacgtatgcagtgtggatgtatccgctggcaacagccagaagaaaataatgtatcccgtatctgtctgatagatgtacccgttagcaagacttacgcggcattcacaaagccagttgaccctattatcggggaatatatcgaacaatgggaacttgttcgtaacactcaacccctccaggaagattctaaaacaggtgaaagtgttcattttttgttcatgcacagggggaaacgggtacacagtagttatattaataattcgctaatccctttgttatgcagaaaggctggtatacctgagcaggatgccagaggtaagatcaccagccatcgggcaagagccactatagccagtcagctttacaacgccagggaaccacttgatatttttgagctacagaaatggttggggcattcttcaccagaatccacccgacattatgtcgaaattacaccgacgaggttggctggatcactggataaagcaggttactttgaacgtaatcgccgcatggtttcagttctcattgatcaagacgcgatagctgaagggctggtagaatccgggaagccatggcgttattatgatcttggacacggtttctgtacttatgacttttttgagcaatgcccccatcggatggcatgtgcaaaatgctcattttatatgccaaaatcttcatctgaagcacaatacttgggaggtcgccagaatctactcaagctgatgcaggaaatccctttgactgatgacgaacaagccgctgtagaaaacgatatacaggcagtggacaaacttttgaataaactcactggggtcgcaaccccgggaaataagagaaagtaa

SEQ ID NO: 240599 - DNA, 231 bp, Klebsiella pneumoniae
atgagccgtcgcggtaactgtcacgataatgcggttgcagaaagctttctacagttgctgaaacgcgaacggataaagaaaaagatctacggaacgcgggaagaagcccgcagcgatatctttggttacatcgaaatgttttataacagtaagcgtcggcatggttcgagcaatcagatgtcaccgacagaatatgaaaaccagtattatcaacgactcggaagtgtctag

SEQ ID NO: 240600 - DNA, 402 bp, Klebsiella pneumoniae
atgctgcggctatgctggtataaggacaaggtcatgaatacaatctatgaacgtggtgcatcccctttcattcctggctttgaactcagggatgttgtcctggaaaatggtatcatgctccgggttgcgatagggggcagcggagctcctctggtgatgctgcatgggcacccgcaaaaccatgttacctggcgtaaggttgcgccggaactggcaaaatattatacggttatccttcccgacctgcgcggatatggtgacagttcaaaacccgccagcgatgagacacaccgcccgtattcaaaacgtgtcatggcaaatgacattgtcatgctaatgaatgcactccagatccagactttttcctttattggtcatgatctgtctcttatacacatctga

SEQ ID NO: 240601 - DNA, 618 bp, Klebsiella pneumoniae
atggaagttaaaatagcaggtgttttagttctctataatcccacacacgaagttattgataatataaatacttatattacccatgtcgataagttatacttaatcgataattcatctaacagcgattttggtttacttttagctaatatatccgatcctcataaaataagttacatatctaataaaaaaaatgaaggagtagcggtagctattaatcgaggtgcagtcttagcccaaaaagatggatatgattggctgctcacaatggatcaagatagtagcttcactaatattaatgaaatgctggttcatatctctcaagaccaagaatcacatttagttggtttgtattctccatttcatgatacaggcacaagggtaatcccagaggaaaacatttcgtatgtttcatctataatgacctcaggcaatatcatcaatttgagagcttttttaaaaattggtatggcagatgaaagattttttatcgactgtattgatcacgacctgtgtgcaaagtttattcaagagcattactttataaaacgccttaatttttgtctgttaaaacatgaattaggtaacgacataaagattattaagataattgctatataa

SEQ ID NO: 240602 - DNA, 303 bp, Klebsiella pneumoniae
atgattgaattagaagatgcggtaatggaaattatcgttaatgcgggacagtcacgctcattatgttttgaagcgctgcatgcggcccgaaccggaaatatcgacgaagcgcgcttactcttaaacgaggccgacggttacgcccgccgggcgcatcagatgcagacccagctcatcgggcaggatgccggtgaagcgcgtcagcccatgacgctgattatggtacatgcccaggatcatttgatgaattcgctgctggcccgcgagttctcagaagaattaatccatctgtaccagcgttaa

SEQ ID NO: 240603 - DNA, 468 bp, Klebsiella pneumoniae; identical to SEQ ID NO: 203374

SEQ ID NO: 240604 - DNA, 141 bp, Klebsiella pneumoniae; identical to SEQ ID NO: 232101

SEQ ID NO: 240605 - DNA, 1134 bp, Klebsiella pneumoniae
atgaagaaaaaacttgttagattttcggcattagcgttggcaattgggttattatcgggttgtaccattatccccggtcaggggctaaatagcctgcgaaagaacgtggttgagcttccggatagcgattacgatctggataagctggtgaacgtgtatccgatgactcctggactgatcgatcagctccgaccagaaactgttctggctcgtccaaatccgcagctggataatttgttgcgtagttatgaatatcgcattggggtcggtgacgtactgatggttacggtatgggatcatcccgaactgactacgcctgcaggccagtatcgtagcgccagcgataccggtaactgggttaactccgacggaacgatattctatccatatataggcaaagttcaggttgtaggtaaaacaatcagccaggtccgtcaggatattgccagccgtttaacaacatatattgaaagcccacaggttgatgtcagtattgctgcctttaggtcgcagaaaacttacgttacgggcgaagttatgaagtcaggccagcaaccaattacgaatattcctctgaccgtgatggatgcgataaataatgctggcggactggcgcctgatgccgactggcgcaacgttgtgttaacgcataatgggaaagatacaaaaatatcactgtatgcattaatgcaaaagggtgatttatcacaaaatcaccttttatacccaggtgatattttgtttgtgccgcgcaatgatgatctgaaagtgtttgtcatgggggaagtaggtaagcaagcaaccatgaagatggatcgcagtggaatgacattagctgaagcgttaggaaatgctgaaggtatgtctcaagcatttagtgacgctacaggtgtttttgttatccgacaattaaaaagtgataaacaaggaaagattgcaaacatttatcaactgaatgcgcaggatgcgtccgctatggtacttggtacagaattccaactccagccatacgatatagtttatgtgactacagcaccattggtgcgttggaatcgagttatctcgcagctagtaccgacgattacaggtgtccatgatatgacggaaaccgtcaaattcgtcaaggatatgtga

SEQ ID NO: 240606 - DNA, 261 bp, Klebsiella pneumoniae; identical to SEQ ID NO: 220389

SEQ ID NO: 240607 - DNA, 2475 bp, Klebsiella pneumoniae
ttgactaatataataaaagtttggctaatttctcaaacattgttctggaaagttagaactaatttaatgagaattgtttttttaattgaacgtagttcatataaaaataaaacggctctttccaaggttagtaatggtacccacatcttaatatcaataacattaattggcatcaaaagtttattgtttgttgtttttttgttattagctcttgggtttttagagaattatattcgaagtaacacggactttcttcatcatctgagctccgacgacaaaaagttcaatatcgaccaactgaggctatatgcacagctgcttacagctattttttcgatatacttcgctacaattggtatcattgttagttctggatatacgagacttcggcgagacataatacagatacttactaccgaacaagttggtagcgtatattcgcgtgttatggttacttctgccgtattctgcctaagtgcaacagccttacagttgttcggatttgagcccggacttttcatttatgcggcaggaacgctattaacacttataagctcgttggctctttttccattaggtcaaagattatttaatttttttgatctcaatcagttagctcgtagcgagatactccccagaattgctcgccacatagagggggcatcaaattctaaaaattctatatctttagccaatcatcactccaaagccgcacattcagcatttgagcaactaaactatattgacgatcgcatgaggttagaaaaagtaggactttgtgacaatctaccagctataaacgatgattactctgcattacttttgcattatcttaatcagaaacacaaaatcaaccatcaaagttactggtatcctaggcgacaaaaacacaagcaatggttttttgccggagacagtgcaacgactatggcgttgcaaacccgcagccaattaacggccgatgaagaggttaattatgattggctggagagtgagatcataaatagattgataggccatattgaattagcgttaaatgttggcgatttcaagcttgggttggatctcatcagccgattctcttctcgagtgtatacttatgcgcgacagtttcatttcgatataggtatgagtgaacttcggagaatgaagatacttatcgaagaatatttttcttcatcggatatccttgatagcaatgaagcaatagttatgagagttggaattgcggatacgtgggccgcgttaggtagtaatctctgccttgaaacgttgcgccgcataattacttttgagcaagaactcagagagttctttcaaaaagatatttggacagagagaactctactttctcttcctgcttttttgcaaattgatctggcttttatcattgaacgtattgaattcgaaaaagagatcgaagggcagcgcttatccaagccaaggtatgttcaacagttagtagttcagaaactactgcagaaatacgcaaaaatactaccagaaatatgtgattttcacgcaagtttggttccggattttgttagttcaatgataaaaatgaagatgccagaagctgcaacacaagttattcttggaagcctacataatcattggaaacttccccgttggtttaaagatatctctttggttttggatagatatagagagttcgagcactaccctgaaaaacagtatgctctaccagagattaacattgctgatatactaggaaggctaacctctacgcagaatgaagcagtagcctttctaggtcggagtgatattgttaggcatatcctagagcaagaacaaaatgaagagttgccagatcattttggacaaatatattttgaattggctgaagcatgtattcaagcactggaacagaatgatgaaaataagcttagcaaggttttccctatgttcatgttcttatctctgcaagcatcagaaaccaaatttgtggatccaaaacttgatgttaatgatgagtttcggttacaccttcgttcatccgttatcaatgacctgatgtctgttttaggtttcgctattctatacagtgcttattttgataacgaaaagttgtctgaggcggtacttaatagtttcagagcattaatcgaacgtattcccgataaacaagaatatttcaaaaggatgatgattctttcaaatccgtacaatttcagcttccgtgcctctccaagagatttgatccgcaacaagtggaaaatgacatttgaacatcgtgcaagacatgatggtttcagtgaccaaatgggaaggagtagaggggtacaccacaaaaacaaggttgtaagagagtttcttagttcccattctgatgcttctcacctattttgcgcactcgagattcttccacaactgaatccaattgatttcaagattgactatcatgttacttctcttgcccgcaggctagatgtgaaatatgaagggggattataa

SEQ ID NO: 240608 - DNA, 990 bp, Klebsiella pneumoniae
atgaagattttaaagggcgcccctttttactgctatcatgattatgactatctgagttttattgaaaggcttttaataaagcctaaatatgagcgaccaggtttctaccaagggatgtttaatgaagattttcctagactttttcactcagcaagacgacaagttaacaatatgtttaacattgaatctaacgatgaggggcttacacaaaaactgcttggaaatgtacacactaggaataggcaacattcagtcgatgacacaatacgggaattgatagaggaaatagctcaatcgttagtatggtttggaaggacatactacttcgttcacaacatttgcgaacaagataaagtctttatcagatctttaaaccctaatgggttatttcgatttttttctgtcttttttcagtttgtgccaaaaaggatcgaaagtcatatagacagagaaaatgagatgctccctagggagttaagaatattggataaaaccaaattgatgtgttttgaaatgcccagatctttgaggataatgctgtctaaacagaatcggattttagctgttttagataagcaccaattcgatagtactaaattttttgctcaagtaacgcacgaaaatccttatccaaaaaactactttgattttcacatttggaaaaatatacaagaacgaacattgtatagcgcaacgcggaaaactgggtggaatgctagaaattatgattcgaataaacgttcggactttttcctatgttatcaacttatccgattcagacggaatcagttagttttacgtgactatatattgcttcaattgggtaaagagctcacgaaagcaggccgcgaactgaatctggatttctacgtctcgatttcacctggaagtgatctacctcagattgatgaacttgacgatcttgaatctaaactttctaaggaagaaattagtttcactgaggtgttagattactgttacgaacgctag

SEQ ID NO: 240609 - DNA, 726 bp, Klebsiella pneumoniae
atgagcattttacaaaatttggttgccgccagtcagttggatgaaagcgcactgcgccagcaggcccggtcacgccaggcgcagtggcagtcctggcttgcgccagtcagtgacgccaaaccaaccggggacgatccgggctatgacgatgattttcagcgtatccgcgaggaggtcaataagatctccggtgtcgataccgtactgatttgccagttggctggacagttactggcaacaacaaaagatatccggattgttacctattactgctgggcccgtttgcaccaggacggggaagctggcttggccgatgggctggagctgctggcaggcttgctgcaacgatatggtatgcagctttatccgcagcgcgaccgtagccgcaaagcagccctcgagtggctggcgggtactcgtatcttagacagtctttcactttttccagaagttgtgcgggaggacgcaaggcgtaccgtcggcgcgctgcttctcattgatgattgtctgacgacagaaccagaaacatcacggccagatctgcaagcactctggggtgctctggagtctcgtttgataaagggcgggggagtcgatgcggtggtgccgcagaacgtcggaaaccggggctggctcaaaccgcttcacgcatggctgaatacgaagcgccggttctcagtaacatcacctccggtcaggatctgctggcccaggcgcgaaccctga

SEQ ID NO: 240610 - DNA, 261 bp, Klebsiella pneumoniae
atgaacgccctggaaaccctgaatcaatctgtttttctcgccctgaatgcgcagcctggcgccgcggaaggcttactgttgctggcccgtttttgcgccactggcatcgtgtttatgatgccggcgatcgcgctcggcctgtggttcctcggtggccgtgaggggcatcgccaggcgctgtttatgaccctggccgtggtgatttccctcgggctggggatggtgtgcggacgctctggttccatccgcggccgtttatga

SEQ ID NO: 240611 - DNA, 234 bp, Klebsiella pneumoniae
gtggcgcagctcatcgttgcttacgcctttaccttcaacggaagtacccggcagattgcgctgatcgtcggcgacggcttcaaggcgggtaatttcaacttcaagcgcatcagcctgggcgcggagttcgtcgaactgcttgccctcttcatcgttcaggctgcgcttttcggtgtcggctttatccagcatggaacgcatctgggttttgagtgcggctttctgctggcgtaa

SEQ ID NO: 240612 - DNA, 327 bp, Klebsiella pneumoniae
atgcatgatatctatcatctgcttgctaaaagctaccctgaatttaaacacctatcagatgaagaattggatgaatctgctgatacatattccggcgcgagttttgctatcaattgtgcactcacattgatcggtaatctggctcttgacgctcaggaatcggaagggtatggcggcgacgattccctcagagatatgaaccttattagcaatgcattaagacacctcccaaggatgatgatggcgctcaaccattgcagccagtctgctgaatatgtccgcatggatcgcaaaaaaaaagcggaggttaaaaatgatagatcctga

SEQ ID NO: 240613 - DNA, 744 bp, Klebsiella pneumoniae
gtgctaaataaaacaaaggcagctttgcagagctgccaatgtcactaccaaatgtttaagcaagaacagaataccagggttagcgctggtggtcaaagtctgagcgagttgcaaaatagtaactcagtgctgaaggacttttcctcaaatcgaggagaagtgtctaaaacatacatccgccaatggcggacgttggaccataccgctaaaaacaacccaaatattgagtggtatcagccttttggctcgatgccgcgcttgtccaattctctgcgcagtagccgcttaatccatccagacttattgtcgtcaccatcttctttcattgctatcgcaagtcgctctgacagttctttatcaagcctaagctgcacaacatggcgttctttgctttcattggttgacattgtcaactcctgtgatctagtctgtagtggagttgacaatgtactacattgcatgacttcaagtaaagcaaagcccgctggtgctaccaacaccaacgggcctctaaccaaaccgttaagtgaggtaacagttatggctgatcaacagcatacccaaactcgccccaaatatacatggcgttttcttgccttgaaccgtctcgacaaaaacgcgaagccttgccgtatatccgtagaagctgagacagagcttgaggctcgttgcattctggcccagcacttcattctttcgctttccgctcgtctgcctattcagggagtttattatcatgactaa

SEQ ID NO: 240614 - DNA, 348 bp, Klebsiella pneumoniae
atgtcatcggtagccaggtggtcctacaacaagccgtgcacattctggaagagtctcggggttgatgaatatggtgatcctttgggatatgaaccaccagtcatcattatgtgcgattacatcggcggtatgtccgcgaaactaggccagatgggaaaagaggtggttgtaaaaaacacttattttacagctttcgcacttgctgatgagggtgattacatcctcatcggtgccaccactgaacctaaccctttaaataccaaagccgatgaaatccgcgcatctacccgctggaatgacacgctttatggacaggaagatgactgggcaatcattacaggggggtga

SEQ ID NO: 240615 - DNA, 399 bp, Klebsiella pneumoniae
atgattaccacagcacaggctaaggaatatctggactcagtcggtatcaagctgcctgatttcattcttgccgcactagttgagcaggtgaacagcattcaggagtgtctggatgcgcattactcaccggcaactgcattactgattcagtcttatctgctggggcttatggccctggggcagggtgacaaatatatatccagccatacggcgcctagtggcgcctctgagtcgttccgctatcagtcattcgccgaccggtggaaaggcacgctaaatctcttgcggggcctggacaaatacggatgcgcgacgtcacttattcctcccgacccaaccaacacagcattcgctgggatctggataggtcgaggcggttgcatgtgcgggagtaagtga

SEQ ID NO: 240616 - DNA, 651 bp, Klebsiella pneumoniae
atgagttctgaagatgaaaaaatttcatatgatagatttaagagtaaactcgctgaacaagtctcatttcttgtgagttcatgtgaaagatatgaccaaggacacacagccgaggcgttaagaatatcacttagcttgcgaatcattttttattctaacaagggcagcacttccattctaaaacacatgggcatcacaaatttaaatttacttagtactggtggcatttccaaggaagaagccaaaaactgtgcatattattttggaatgggtagattacgcgtttcaagtttaggcgattctggatttcaaccacatttagaagatggccctcaataccgatataagtatttaccgcttagtgattggtggcaagaatgtgtttacgtgttagagcatggaaaaccgataacaagatttgctattatgattgccgccgccaacaacgatggcggtgctcatgtagatgcatctcttgagccattatatgcttcactggcagaacaaggttccttaggttcttttggtacgatggatgacgacgacaacttcaccaaggtagaacccatatctcgcgcccatcatgttgcattgagacaaactgcttatgaagtgctaaatagcccagaattcatgaagctaattgagtag

SEQ ID NO: 240617 - DNA, 531 bp, Klebsiella pneumoniae
gtgagccgggcggacgcagccattgcggcagtattcattctgctgatgattggcctgagtggtgcagcgatttactaccacagccagtacagcgagcagcaggcgactaaccagcggctgcagcgagacaacgaccgacagggcgcagtcatctccttgcaggcattccagttcaaccgcttcaaccagatagctgccgaccagctgcagtacgctgtcacgctcgctgtcaggaagcaggagaaagaaattgaataccggacgatactcaaaactgagccgacctgtgctctcgctgtgcctgctggcgtttctggccggttgctcgactacgcgaacagtttacgtgccagcgcaatgtacgccgattcccgcgtcactgacagcgccggtactgacaccgctaccaccggcaccctgacgtattgtcaggcggtgttgtggatagacccgctactgacagccattgaccaggctaacagccaactggctggcatacgagatatcgaacaaacccgacaaggtaagtaa

SEQ ID NO: 240618 - DNA, 438 bp, Klebsiella pneumoniae
atgcgaatcagcagtaatggcgttgtccggctcaaaggcgaagaaggcgagcgcctcattgcttatctggatagtcgcggcatcccaaccataggcgttggccacactggaacagtcgacggcaagccagtggtgatcggtatggttatcagccagaacaaatcgactgagctgctgctgcaggatatccagtgggtagagaaggcgatcaacagctcggtgaaaaccccgcttacgcagaaccagtacgatgcgctgtgcagcctggtatttaacatcggggctacagcattctacggttctacggtcctgaagcgagtgaaccagaaagactacaccgccgctgctgatgcgttcctgatgtggaagaaagccggcaaagacccggaaattctactaccccggaggcggcgcgagcgtgcgctgttcctgtcgtga

SEQ ID NO: 240619 - DNA, 324 bp, Klebsiella pneumoniae
atgcgaatgccctataaacaagatttcattgccgctctgctggctgctaaagagcagggcgttggtgccgcgctggcgttcctgatggcttatctgcgtggccggtacaacggcggcaagttctggaagacgattattgacgccgccatgtgcgcgatgatcgcctggttcgttcgtgacctgctggacttcctcggactcagtaccaacctcgcttacatcgccagcgtgttcattggctatgtcggcactgattccattggcgcgctgattaagcgcttcgttgccaaaaaggcaggggtggaagatgcgaatcagcagtaa

SEQ ID NO: 240620 - DNA, 201 bp, Klebsiella pneumoniae
atgtcggtgatgaccgaaaataccctggctgggtctggcggcctgtggcgcttttgcagcaacgcccctgatgtattggattatgagcccgtcatcaggtcaggccattatcttgtgctggttgaaccaacaatctggctcaggactctcgcgtatgagtgtcaacgtgtcgtgcagcacgcattaactcaaaagtcctga

SEQ ID NO: 240621 - DNA, 519 bp, Klebsiella pneumoniae
atgggtgtgcgtgaacttaacctgaccaaagaccagcatgactggcttaacggatggctggaattgtggggagcgtgggtatattcagggcgactggaaaaacggatgagcagtgtaatcgctcagtttatggaaagggtcgagccttcccggataatgaccaggccaatgtgcaatgacgatgacggaatgttgatttctcaggtcgtagattccgttatgcgcatcgacacaaaggcctttggcattctgctgagctactactctcacggctcatcaaagagagcaattgcatcgtactatcacgccaccgcaaagccacgcaaaatggccggaagaagcggggagggctggcggagaccgtcacttgcaacatgcaggaacgaaatcgacgacatcctcaaagcttcactctttgttttgtaccagccgatgcaagatgcttttaaaagtcgcaaacgtgttgagaaggttaaacatattgccgttaaaaagcttgacattgcattatccatttag

SEQ ID NO: 240622 - DNA, 288 bp, Klebsiella pneumoniae
atggctaaatcaacagacgtacatgacctgttaactgcttaccagaaacaggcacggaaaattcctgcaaagggtgtttatgcctcaaaacagcgccgtgatgaagtgcaggcggcgcacacgaggaaagtaatgcgccagcgtaagcgctctgttggcaagtccaataaattgggatttcgtcgtcgggcagaaattacagccgcgctaatttgcgaaatgaacttttgggcgctggtatgccgctctaaccgcaagcaggtaaatacaacgggagccaaccaatga

SEQ ID NO: 240623 - DNA, 540 bp, Klebsiella pneumoniae
atgaacatcgaaacagtaaacgagctcatcgccgctctggagagcgcaggcgagctgtcgatcagagagcagaagttcctgaagttggcgaaagcgtatcagcagctggctgcggagaatgtggcgctgaaaaaatcagcgccggcaccgttcagtaagctgatgatggaagcgcttgatacttatcattcgaaagctgacgacgtgcctgagttagccatgctgagcgcatacgtaaaactgcgcgatgggctaaaaacccccgccaccgatcgcatcgtagccggctttaaggctgatggtgtagcagaacgggaaaagaccatcacattcacggcagctaaaaagcgcacgcaggatggagtagcgttaatcgctatcggcaagccttataaaattcacaacgatgatgtgatcggcgaattcttcatcggtgagcgtggtcgttacggcgtaatcaccatggacagactcaattacttcgcaacgtctgatgaatacgcatgggctttttcgctgcgcgaggaggccggcaaatga

SEQ ID NO: 240624 - DNA, 216 bp, Klebsiella pneumoniae
atgcaaactctgtctgaccgcctcaaaaagaaacgacttgcgatgaagatgacgcagaccgaacttgccgccaaagctggcgtgaagcaacagtctatccagcttatcgaagctggagtcactaagcgacctcgttttttgtttgagatagcaatggctcttaactgcgatccggcttggctgcagtacggaaccaaaaacggcaaagccgcttaa

SEQ ID NO: 240625 - DNA, 633 bp, Klebsiella pneumoniae
atgagcattgctaacagggttaaatctcagcgggaagctctagggttgactcagacggagcttgccattagatcaaaaacatcccagcaagctattgagcagcttgaaaatgggaaaacaaaaaggccaaggtatctgcctgagcttgctaatgccttaaacgtaacaattgagtggttattagaaggcggtgaagaggcaagcgttacttttattggtgaaaataaaaaacaaggaagataccctttagtaagccttgttagtgctggcgcatgggcagaagcgtgtgaaccatacaatattaaagatattgaagaatggtatgattcagatgccaaaatatatggtgatggattctggcttagagttgaaggagaatcgatgacatctccaactggtttaagcataccagccggccaccttatattagtcgacaccggtagagagcctgtaaatggaagcctggttatagcaaaactagtagatcaaaatgaagtaacattcaaaaagcttctgctggaagatggaaagaaaatccttaaagggctaaacccaacctggccgataatagaaataaacgggaattgcaaaatacttggagtagttgtcgaggcaagggttaagtttgtatga

SEQ ID NO: 240626 - DNA, 195 bp, Klebsiella pneumoniae
atgtttaaagtatggaatggcgggcgctgcccggttaatcgcggtgagcttgttgatgttatccaccgtgacggtgagattttctataagcaggacccgtatgaggcagggtcaaaggctactgactggactgttgcagagctggaaagctactgcgacatcatcgcctggagaccatccgaagacacagagtaa

SEQ ID NO: 240627 - DNA, 666 bp, Klebsiella pneumoniae
atgaccaaatcaaccataaccagagagcgcctgcaggaattagctgaaggtcaaagcgatttcaatcttcgaactgccacacacgaagagtctcaggagttggcccgcatggcgctggccgcaatggacgatgcctatgacattacggcaagccaattacgtgaggccgttcattacaacccagataccggcaggttcaccaggcgttcaaatggcaccccaatggagcatttatgcggaagcggctactactgcctgaacttgtttaagcggtccaggctcgcacataggatggcgtattactacatgactggtcgtcttcctgaaaaagtcgatcacattgatggtaatcggctaaataacgaatggaaaaaccttcgcgaagctactcatgctgaaaatatgtggaacacggggatgatcacgaccaatgcaagtggagtaaagggtgtccactggaataaaaaatataagaagtgggttgctgaaattagagccaacaagaaaaagtattatgttggttcattttcaaacattgaagatgcaaggctagccatcgaagcacgaagaaaagaattgcatggtgggttctataatccggcagggaaagttaattgcgataatccagtggcgaacgagaagggagatgaccatgaaagaccatga

SEQ ID NO: 240628 - DNA, 699 bp, Klebsiella pneumoniae
gtgactcggattctgacagcgattcggattctgacagtgactcggattcggacagcgattccgacagcgactccgactcggacagcgactctgactccgacagcgacagtgattcggattctgacagcgactccgattctgacagcgattcggactctgacagcgactccgactcggacagcgattcggattcggacagtgattccgactccgacagcgactcggattctgacagtgactccgattcggacagcgattccgacagcgactctgactctgacagcgactcggactccgacagtgattcggattcggacagcgactccgactccgactccgacagtgactcggactctgacagcgattcggactccgacagcgactcggactctgacagcgactctgactcggacagcgattcggattccgacagtgactccgactccgacagcgattcggatgctgacagcgattcggattccgacagtgattccgatgctgacagcgattcggactccgacagcgactcggattctgacagcgactccgattcggacagcgactcggattctgacagtgattcagactctgacagcgattccgactccgacagcgactcggactctgactccgactccgattcggataccgaaccgcaggcaaataatgatacccatacggcggctatcgataccgtag

SEQ ID NO: 240629 - DNA, 1044 bp, Klebsiella pneumoniae
atgaaaatagcggcgatttatacgcagagtgttggcccattgggcaatgcggaaattagctttaaaaacgactggacgggagaggtagaggaaaacgttctccttaccggcccgaacggctgcggtaaatcgacgctgcttcgctctatcgcgatgctttggggggcttttgggttctggctagagcaatccaagccgctcccaccatctcacgaatcccggaaatggttagaacgatggaacggtgtcgcgattgttatagatgacttcacatcaacaacaccatctcgcttggggctattttttggctccgaggaatggtctgaggaattaattgaatcctataaggatgttgagtggattggtgaaagtcgtgctgggcgtaaattgtctctaaggatttttgaagatgcctggttccagaaatggggtcactactaccagaaaatggtgatcaccactgagagagtttcatcccccaatgtcatttatctggatgctgaggcacgcagatggcttgcgcctaaaaagaatatttcctcacttgcacaggatgatctcagccagcgctggctggcaacctatacaccaacatctgactggaaagggcagcttgaagcctcgctgttcaatatgaaagcgacgctccctgagctgtatccagagatgatgaaaaccctgaatcagttcttttcaggcaaagtcattgaagaggatattcagccgggacagcgtcagcaggtcaggctggctaacggtgacactcatacgctggatgaactgagttctggtgagcatcaggtcttgatcatgctgtttatggttcaacgctggcttcagccgggcggtgtcgttttaatcgatgagccagatcttcaccttcatccttcgctggtttcccctctgcttgcgactctggaaaacattatccagaaaaagcaggggcagcttattttgacttctcatgcgaccgacgtctggcagcgctacgaaacgttggggctgcgttatcctctttctgttgaaaaggatgatgagcaatga

SEQ ID NO: 240630 - DNA, 3651 bp, Klebsiella pneumoniae
atgaatacgtcaaatatcaaaaaatacgctccagtggcacgtaaacagttccgcgatgcggtcatgcaaaaactgactacgctgggcattgaggccgataaaaagggcaacctgcaaattgcacaagcaaccgatcttggcgaccaggtgcgttatggtcagttctcgctggataaagcactggcgtcacgccgtgagcgtctggtcaagcgtgcagaaaagcagggctatgacgtgctggtggagcacatcgcttacacctggtttaaccgcttttgcgctattcgttatatggagctgcatggctatcttgatcacggtttccgtatgctgtctcacccgacgctggcagggggttttgaggttctggatcatgtgccggaagtggctgatgctttggagctggacaaagcgcgcctggtggagatgaagctggcgggcgatcgtgacgaagagctgtaccgcgaactgctgctggcccagtgccatgcattgcacggtgcaatgcctttcctgttcgaagcggtcaatgatgatatcgaactggtactgccggataacctgactcgcaccgactccattctgcgtgggctggtagatattattcctgaggaagactgggaacaggtcgaagtaattggctggctgtatcagttttatatttccgagaaaaaagatgatgtgatcggcaaggtggtgaagagcgaagatattcccgccgccactcagctgtttaccccgaactggattgtgcagtacctggtgcagaactcggtgggccgccagtggctgcaaacctacccggactcgagcctgaaaggcaaaatgccgtactacattgagccagcggagcaaacgccggaagtgcaggcacagctggcagctatcaccccatccagcattgaaccggaaagcattaaggtgttggatcctgcctgtggctctggccatatcctaactgaagcctataacgtgctgaaggccatttacgaagagcgtggctaccgtacccgtgacattccgcagctgattctggaaaacaatattttcggcctggatattgatgaccgtgcggcgcagctttccggatttgcgatgctgatgctggcacgccaggatgaccgtcgtattctgggccgtggtgtgaggctgaatattgtctccctgcaggaaagtaaactggatatcgctgaactgtggaccaagctgaacttccaccagcaggtgcagcgcggtagcatgggggatatgttttcggaaaggattgcactggttaataccgacagcgtggaatataaactgctgatgcgcaccctggcgttgttcactagtgcaaaaacgttgggatcgctgattcaggttccacatgaagatgaagcggcgctgaaagcgtttctggatggattgtatcgcctggctgttgaaggtgatattcagcagaaagaagcggtggtggagctgatcccgtatatccagcaggcgtggattctggcgcagcgctatgatgctgtagtggctaaccctccatatatgggggggaaagggatgaatggcgaactgaaagagtttgctaaaaagcagttcccggatagtaagtcagatttgtttgcgatgtttatgcagcatgcgttttctttgctcaaagagaatggttttaatgcgcaagtgaatatgcagtcgtggatgttcctgtcgagctatgaaatgcttcgaggatggttgctggataataaaacgattattactatggcacatttaggcgctcgagcttttgggcagatatctggtgaggtggttcaaaccactgcatgggtaatttgcaatcgtaatgaagataattataaaccagttttttttcgtttgatcgatagtaatgaagattataaaaagaatgccttgcttcaacgtagcggctgctttaaagacgttgcacaacatgaacttaaaaagattccaggtgcaccaattgcatactggctaactgattcgtttagaaaagtttttgaggattctactcctttaggcgaaattgcccctgtgcgacaaggtattgctacggctaataatgaccgttttttgcgaacatggactgaagtttgttttgaaaatataggattatactttcaggatagagaatcagctaaaaaaagtaaccgtaaatggtttccctacaataagggcggggagtacagaaagtggtatggaaataacgagtatgtcgtgaactggtataacgacggtgaggagctggaaaactacaaacctaaagcggttattcgtaatcctaattatttttttagagattcaattacatggtcgtttataagctcaacgtcttttggcgttcgattctctgatgctggggcaatatttgatgttggtggttcttctgcctttccagaaagtaaggatatgtattggcttgctagttatctatgttccaagcagtgttttatatttatggggataatgaatccaacgttaaattttcaagttggtaacgtttcagcacttccaattattgaaaataaaatatcaaaatttaaagatgcgttaagcgagattagtcgggaattaataagtattcacagagatgattgggatctttttgaaacttcttggtcatttaagaaaaatcccctttcagggaaaacatcaaaaagtataagtgatagctttaaaggatatatctcggaagcatctgaatcaattaaaaaagctttgacattagaatctaaatccaatgagatttggttggatgcctatcaattaaaacatgaaattgactatcaagttactaaggaacaaataaccctttcagtaaatacgctttatcgatatggaattgacaatactcaacgattacaatcagatacaattgtagaattaattagctatataattggatgccagatgggccgctattccctcgatcgcgaaggtttggtctatgcccatgaaggcaataaaggttttgccgaattggtcgccgaaggcgcctataaaaccttccctgccgatgaagatggcattctgccattaatggattcagactggttcgatgacgatgtcacagcacgcgttaaagagtttgtctgcaccgtctggggtgaggagcatctgcaggagaatcttgatttcatcgccgaaagcctctgtttgtacgctatcaaaccgaaaaaaggtgagtcttcgctagatacaattcgtcgctatctttccacccagttctggaaagatcatatgaagatgtacaagaaacgcccgatttactggctgttcagctccggtaaagagaaagcgtttgagtgcctggtgtacctgcaccgttataatgaaggcacactgtcgcgtatgcgtaccgaatacgtggttccgctgcttgcgcgataccaaggcaatatcgatctggttaacgatcagcttaagaatgctgaatccggcgctgccactacccgtctgaaaaaagagctggatgggttgagcaaaaaattcaatgagctgcgcagtttcgacgaccgcttgcgtcactatgctgatagacgtatcactattgatctggatgacggcgttaaggttaactacggcaaatttggcgatctgctggcggatgtgaaagccattaccggtagcgtacctgaggatatttga

SEQ ID NO: 240631 - DNA, 186 bp, Klebsiella pneumoniae; identical to SEQ ID NO: 240433

SEQ ID NO: 240632 - DNA, 489 bp, Klebsiella pneumoniae
atgggtaaaatactgctagtatgtaacgattgtccttatccagctaaccatggaggaaggttagacattctgcaaagacttaaatctttgatagagttaggcgaaagcgttgatttaattatcactcacaaagaatctatagcaaatgaaagtaaagaatatttagaatcaatatgtgaaaacgtgtattatattcagcgcacatctttacctaaagcttttattaagagccttttgaagtttgaacctcttcaattaacatcaaggcatgctttaaaaaatattaatttacctgagaaaacagactctaaaactacgcgaccaaaaggctcttgccatttaataggaaggacaattaaatctaccattttcatgaactctgttactgggcaatgtcctaatagtttaatgttatttttcgatgctaattcttttagttcttctgcatctttattatactcaaattcaccagctgcgatgaaattttga

SEQ ID NO: 240633 - DNA, 951 bp, Klebsiella pneumoniae
atgtctcacatgattgaattaaaaaataatcttaacattatccttaatgcaattcctcctggaagcgaaattatattattagatacaccattacatttaaatgtaggtgatgtactaatctataagggacaattgcagttttttaaagagcaccatataaaaattatctcagagcattcggataaagctagtaaaagttttatcgttaaaaatcacagaaaaattcctagaaatgccataatagtactaactggtggtggcaactttggggatctttatcagcatcatcaaactttacgcgaaacggtttgtaaatatcttccgaataacaaaattgtacaacttcctcaaacggcacattttgagaatcaatccaaattattagaatcttcgaaaatatttcgcacgcataaagacatcgtcatgtttgcgcgtgatgattcaacatttgaaattttttcaaattatttttctgataatgtatataaatgccctgatatggcacacgcgctttatggtatttatcctaaacaaacaaaagagatgattaagaataatgtaatgtatatgattaggaatgataaagaaggcagccaacaagataaaaattatgcatcttgtgttaaagaagattgggacactatatgcaatataaatgataaaaataaattaaagaaattgttattcttagaaaaacttaatagagctaccgggttgaacttatttgatattgaatcaaactggaataaatatactgatgccatgcttgttagaatcaataattacttcatgagctttgatgaggtgattacatcacgtatgcatggtcatattttatgttgtttattagaagttaaaaccaaagttattgataattcatatgggaaaaaccgtggatattatgactcttggacaaaatacgttccgaattgcgaacttataactaactaa

SEQ ID NO: 240634 - DNA, 705 bp, Klebsiella pneumoniae
atgagcgtttcaattataattcctgtatataatgtttcttcttatcttgaagaggctattaattcagtattggaacaaattagtaaaaatgatgaaatcattattgtcaatgatggttcaacggatgattctggcgaaaaaatagatcgtctctattcaaatcatcctaatgtaattattattcatacgactaattatggactgggtggagctagaaataatggtctgaagcatgctacgaaagaatttgtttattattttgattcggatgatatattatctcccggtttaattgaaagtttttattcaactgttagtaaatatccgaaattagatctttttgtgttttccgcaaaatctttcagcgattcttccagttccgataaattgccagaatatgatcgtggcatcgatgcattattcagtgacggcaaacaggctttttcatatttatatagtcaagaccgttgctatcctaatgcgtggttatatatcacgagaaaggaggttatagacacaaataatctaacttttaaatcaattatccatgaagatgaagagtatacgcctcgtttatttaatgttgcggggcaaacgatagttactaaaaatatttattttaatagaaggattagaaataactcaataatgcagtcgaaattttcagagagaaatatcattggctacattgagaggctttgttga

SEQ ID NO: 240635 - DNA, 378 bp, Klebsiella pneumoniae; identical to SEQ ID NO: 227108

SEQ ID NO: 240636 - DNA, 1518 bp, Klebsiella pneumoniae
ttgactcaacgcctcgttaaagatattccaaacggaacaattgggtacgctgcaattatcccgaaagaggataacttccttgagttcaagtgcccgcactttatcgagcttggcgacagccgccggttcctgaacatcgaagtatcacggccgatggtcaaggtaaaaaaccttgtgcatacctcattgcagactgcgggtacaagcctggaaagccgggtggtggtatcagcgcgggagatgttcgacgtttactgcgaatatggtgaggcaacgtgccatccagctgagaacgggtcttatgttatctgcataagagacacatgtaatgttcatatcgacaagtattatggattacatggatggggttttcaggggcatcatgggattaaagggcttttcatcaacgattccacgttcaaccgattcgatttccactcattcgggtacgattgtttctccgacaatatggccattaaagggaaacagattaacatacagggcgggaatacgtggcgcttccggaatctctcgtttattgtcacaaggtcggatggcgacgcgatagagtatttcctgaacttcgtaatcggtatgcgccaggactatgcgagtgattgtgagtgcaatttgacaattgatgggctgacagtcctttgggataaaaacctaccagcgtggtacaacacgacgcgctcatttgatgttgtgcgaattattgatacggcgaactctgctgatcagggtatcgacagcaaacttccgtacacaatcaatattcgtaacgtagtgtttgatctggccggtgtgcagaccgggcggccgaatgcgaactttgaatttagcgctgtaacagcacttcggtctcagtttactgattattccgtgactggcaaaaagaccttactgccagacaacattattgtagatggaatgactgcaattaatgtccagccaactcaaaacgcagtcatgtgcggcattaaattgcctactgacctgtatcagaactacgttggatcacgcaataaaaaaggaagcgatggaacgaacgcaaaagttactttgcgtaacctgcacagtgtgatcaatagccctgttattgagttggctgctgctcagacggtcgatatgcctggggatgcatcctcatggaattcaaattatttgactagcgactatagctggataccacgggttacacttgaaaattgctatccggcaattgttcatgtgtcaggtgcaaaagctattgtcgatattcatggagggaaactaggcagattttacacgaacggtaatggcaaccgctgccgggtcaccggtgctgatattgagctgatacctgatgcggcgggtatgacataccttgctgctgataaaacactggtaacgggatgctcctggttaaatcctgccaatggagctacctacacaggttctcttcgtggttcgggaaatgaaatgattggagatagctccatggcgccaaaccttcctgcaaacgtttttatttaa

SEQ ID NO: 240637 - DNA, 732 bp, Klebsiella pneumoniae
atgggtaacggaacacgtatcctgataaatgccgatggcgtgataactaactggtcaaaacagcatttcgaaccggtgaattctccattatcggccataccaaaccccaaagttgcatttgacctgcttactcctttggataactcccgtcacggatttactgttcagcagggtgttcagacgctacagccatacgggttgcatttcccaggcaccgcgggaagtcagaccaccttctcggaagcgggattgctgggattgtcatttctgacggcgtttcgtcttagcgcaattgatacattccagtacgttatggattgccgtgaccttaccgcaggttctggtcacggattcgctattacttataacacaaccggccagcgtcttgagcttcgagttggctggccagatggatcgcagggtatttactatgccaccgggaggacaattttagccaacaaatggtatgtggcctgtggtgttatttcccccaaccgtaatcacaaattaacgttgtccgatggaaccgcaattgctgcgagcccgacaggatacctggcgaacgtagcaggaacgccactgatgcttggtgccagcgctgccgggtcttcaatgctgaaaggagatatagggttctttggtgcatggggtaatgagttctccgcaggagatatcacaaatgccatagccctgggaactagtatcatgaccggaagaggggagacggtatga

SEQ ID NO: 240638 - DNA, 732 bp, Klebsiella pneumoniae
atgtctaatgggactcgtattttaattaattcagacggaattatcactgactggaataaacaacattttgaacccgttacatcgccactatcagcaatagcaaacccaaaggttgcatttgatttattcactccagttgataattcaagacatggtttcacagtacagcagggcgtgcaaaaactgaaggcttatggccttcagttcccaggtactgcggggagccagactacatttacagagccagggctcactggtttgtcatttcttactgctttcagactaacagcagtagatgtatttcagtatattcttgactgtcgcgatctaactcccggctcaggacatggttttgccataactttcaaccctaccgggcagaggctggagctgcgagtaggatggcctgacggaagtcagggaatttattatcagtcagggatgagtattattgccaataaatggtatgtggcatgtggtgtaatttcccctaacagaaaccataaactcacactttcggatggcactgcaatcgcggccagcccggcaggttatcttgcaaatgtggctggtagcccgctgatgttgggagcgagcgccgctggttcgtcaatgctgaagggagatattggattcttcggcgcctggggtaatgaatttactgcgggggatatcgcgaccgccattgcactcggcatcaatatcatgaccagcagagggcagacggtatga

SEQ ID NO: 240639 - DNA, 210 bp, Klebsiella pneumoniae
atgacgacaatcacggttaatattgagactgtttcaggttcaaaagttcaattctctcatgaattagctgtgtgggatgtgctgaaccagtttgagcgtgatgatatcatcagttcgctggtaaacggcaatgacagtgctcaagctgtcatatcagtaagcactggctacacgctgagttggtctcaaagcgacagcgcggacacttaa

SEQ ID NO: 240640 - DNA, 864 bp, Klebsiella pneumoniae
atgttggtgactatgacagacaaagaactttaccggcttggcattattcagcgagtatttgaccgggctttgcttcagcgcgacgcagcagacatacttaagctcagtgttcgtcaggtgcagcgtcttgtgcgcctgtaccggacagatggcgcaaccgcgtttgcatcttcccgccgtggacgtcctgcaaacaaccggatcgatgaagaaacacgctgtaaagccctggatttgatccggtgccactattcagattttggcccaacgctcgcaaccgaaaaactggctgaacgccatcatattcatctctctgttgaaaccgtccgtaactggatgacagccgacggtctctggcgtcctcattcccgccggcgaacccgggtttaccagccacgctatcgtcgcgactgtctcggcgaactggttcagatcgatggctctcaccatgactggttcgaaggcagagccccaaaatgctgtcttctggtcttcatggatgatgccactggtcgcataatgcatcttcgttttggtgaaaccgaatcagcctttgactacatgcttgctacccgtgaatatgttgagaaacatggtaagccgctggcattttacagcgacaaacacggtatttttcgagtaaatcatgccgccggaagcaaatctggaactcaatttggtcgagtcctgcacgatattggtgttgagcttatctgtgcgaacagccctcaggcaaaagatcgtgttgagcgtgccaacaaaacacttcaggacaggctcatcaaagaaatgcgcctcaataaaataagcagtatcgaagaagccaatgcttggctggaaacgtttatcggctttgttgaataa

SEQ ID NO: 240641 - DNA, 297 bp, Klebsiella pneumoniae
atgactatgcggccgtggctcgccaactttgagcagcaaattaaatccgcgttgctggtggcctctcctgtaccgggcattcgatatcaggtggaatttgattccgccgatcttctccgtgccactccaactgaacgctatgcaacttatgagcgcggtatcaagaacggaattatgaatccgaatgaggcccgcgaacgggaagggatgccgccgcgtgatggtggcgacgaatacagccaggcatggaaacaggaagtgaaagtgagcaagggcaataaggacggtgacgaatga

SEQ ID NO: 240642 - DNA, 213 bp, Klebsiella pneumoniae
atgccggacgcggaggcaggtaaagcattcctcgcggtaggcgacttcaagcgcggctatttcatcgtggatcacaccactggcgtgcgtacccgccctgacaacatcaccgaaccgggtttctacaaggtgcataccgataaatacctgggcggcggcgtggtggactccaacgccatcaaggtgcttgagctttccggctccggttcctga

SEQ ID NO: 240643 - DNA, 546 bp, Klebsiella pneumoniae
atggaagaaaatatctttagcgggccagctttctcacaaaaagtgagagagattatagacatgctctggcaagagagtgatagaggatgcgttctggtggcttcaagcatgattgaagaagggttacttgagctaatttcatcgttcttacttccaccaacgaactcaaaagatgagctattccatgggcctgcggctccgctttcatctctggagtcaaggatcgctatggcttatcggcttggattgataactaagtccgtggcaaaaagccttggcgttttcaggaagttaagaaatgaatttgctcatagaattgagacagtaaactttgatagccccagcgccctaaacaggcttaacgagatttatcgtcttttccctgaactatctgattaccttgatgatataggaaagagaacagataaccaccccctaccgacgagactaaaattcattatgtttttttcaagcaatattgctgcaataaaggctgtaaagacggaggtagtcccgataactcctctagaagaaactaaaatataa

SEQ ID NO: 240644 - DNA, 441 bp, Klebsiella pneumoniae
atgggtgtaaaagttcgcggcgtgcgagaggcaaaagccaatcttaaccgcattatcgacaatattcagggtcgcaaggttgtccgcgctatacagtcggcgctgatactaggcagcagcagagcagcgtattacacgccgatcgactcatccactcttctaaatagtcagttccgggaaattaacgttaacggcacaagggttacaggaagggttggatactcagccaattacgctgcttatgtgcacgatatgcctggcaagttaaaaggccagccacgcgctcactttggtaaaaccagagaaggcaccgaatttggaggagggacaggcaaaggtaactactgggacccccatggcgagcctcaattccttaagaagggattcgatgaagagcgtgatgcgattactgcggtaatcaaaaaggagctatcgctgtga

SEQ ID NO: 240645 - DNA, 270 bp, Klebsiella pneumoniae
atgaaagatttctcggctttagactcatggcttaaggtttcaacgtgggacagcctgcatccaaaggatgatgagcgattttacaaggccgtctacagcatgatcatgtccaacgatgaattggttgactctaatgcagtcaagaattacatccttcaattttttggtaaaacagatgaaaatacatactacctagagaaggcgtcgctttttgcaaatcgttacgatgtgatttgcaattttatatacgaaaataaaatagccctttag

SEQ ID NO: 240646 - DNA, 150 bp, Klebsiella pneumoniae
atgtccgacatctaccaaatcacgctaaccactcaaacaggcgaaaccttcacgggcaagatgtcacgacgtcagcctgagctggttaacggctttgtgccgctggtggccgatacaggtgagcgctgtactttgctccagacgatgtga

SEQ ID NO: 240647 - DNA, 684 bp, Klebsiella pneumoniae
atgtctacttgggagtgtcctttttgcggtaggttggctgtttatgattcaatgcagaaaaaacgtgatagcttctcagtttctggggataccaagtttggagtcctcgttttcgagtctttcgtaaacatctgcccaaacccagaatgcaaagaatttacatacattacaaagatgtctacaggaaaatatcaggccggttactatatacctaatgatctcctagagacgtgggttaacaggcctaacggaatttataaacagtttcctgattatgtgccgaagccgattttagatgactataaagaggcggtgttaatcaaaaacctttcacctaaagcttctgcaactttgtcacgcaggtgtcttcaagggatgattaggaacgtctggaatgttaagcccgcgagacttgttgacgaaataaaagccatcgaggggcagattgaatcgaatgtttggaaagccatcgatgctgttcggaatattggcaacattggtgctcatatggaaaatgatatcaatgtcattgttgatgtcgatccagacgaagctgagatgctgataggcctcctcgagcttctaattcaagagtggtatgttgaaaagcatgaaaggcaactacgaattgacgccattaccgctttagcggctgagaaaaaagcattaaaacaaacaaaataa

SEQ ID NO: 240648 - DNA, 462 bp, Klebsiella pneumoniae
atgactcgcctaaccgccatcggcagcgctgtgattatctcccttattgcctcaatggcatgggctattcaccattaccgcgacaacgccatcacctacagagaccagcgcgataaggccgctgaacaactcagcctggctaatgccaccatcaaagacatgcagacccgccagcgcgatgttgctgcactggatgccaaatacaccggagaactggctgatgcgaaagaaaccattgagcgtctgcatagcgatgtcattgctggccgtaagcggctgcagctcaacgcaaactgtcccgcgaacggagcgaccggcaccggcggcatgggcgatgcttccggcccccgacttactgactccgctgaacgggattatttcaccctcagagaacgaatcgtcacagtgacgaagcaggtaggctatctgcaggactacatcaaagagcaatgtattgagtga

SEQ ID NO: 240649 - DNA, 180 bp, Klebsiella pneumoniae
atgagtaatgcggtttgcagtaatgagcaatgcaaaaaagaattcatttactgggagcatagtggcggatatccggggggaaaggaaaaggaaactatattttgtccttactgtggtcatgaaaacggatttgtgatgaccagtggtttgatctctagtaagaaacttgaagataaataa

SEQ ID NO: 240650 - DNA, 513 bp, Klebsiella pneumoniae
atgaattgggaatttactagtaccgactggaacctggttattgcagcagttacggcatttggtggcttggctgcggcgtatgcagcactcttaagtagacagacagcagctaaatctcttcaactgcaaagcagaatgaatgcttatgagtcattaaagaactgcgcagagagggctaacggatatgctaaagggaagcaaggttctgattggacatttcatgatggagcaaacattgtcagaagcctgcgacaggcgatgaaaatcatacaggattatagtgagtacagtgataacaaggaaagggaagaattaaaagaatactttataaatcaaattaatatggagctatttgaagagttgaaccaccaaaatgcgcctggagctttctttaaagggacaggggtttcgtctgttgaagctaatatttacgagcaatgggaagatattgtcgcttttttcaacttgatggttgccacagatgctgatcttgcagattcaagatctgaataa

SEQ ID NO: 240651 - DNA, 2202 bp, Klebsiella pneumoniae
atgaatattaacgaaaaggtgcaatgggaaagcgggatcagcttgctaacccggcaggataaggtcgagggcgggcgtaacggggcggcgaatatccaggccggacaactggctaaccgcacccgttacctgaaacaggaggtggaagcatacgggcaaatggttaaatccggtgagatgccctatgacagcctccaggcggcacaggacgcaattgacgccggaaccatccctgaaagtagtcgtttctcttttcgttcggatgatgccagtttctgggccgaagagggaataaatacggatggcgttgccacgcgcaccggtaaacggatttacagcagtcagtttattgcggcgactatcatcgccggtaatgacgaggcgcaggccgtgacagatggcctgtcagtcaccctgaccgggcaggcttttcgcgtgatttatgtcaacaccccccagaacgccagggaggttatctacctgaatgacaataatgcggcggttcagattcttgatattccgtcacgcaatacctttctgagcatgcaaaccgccgtcagttcgctaacggagggttttgacagaagctttatggtgcgggacggtgtcagcgggttttccctgccggtaatgtctcctgacgggcgcgttatcggattcaatgaatccggtggcgttactgtctctcatgtcgagataccgggaatggatgccatcccggagcgcgacgccccgtttatgcttcccattgttggctcaaaaaccaacggtgtcattgctgtcgggcttgacccggataccggcgaaatcatgctacgaccagacggcaacacgattgattatatcggtgaacgcctgggcgatatttcaggcggatacctgccaccatcgaccgtgcgcggcgggtatgaagtgtcggccgtgcgtgaaaaaggtgatttttattacgcgacagtacaggagcgattcagccagaaaacctttgatgcaaagcagaaaaaagacggggctgttgatactctcgtgcctgacagggttgcgccagttgaggtacgtggcctgatgagccagtctaatggtgtgctggccggtgatacgcctgtcagagaaagtcgcgcattgttcccgttcagcgccctgtcattcagggagcggaactttgcccagggcggcagcggcgagattgatggcaactcgctgacggagtttacgcctcttgctgatgccgccagccagacaaataacaacctgcccgccacaatgaccgcatttgcccatgaatatctgaaaaaagagatgggcggcgacgtgccgggccaggtggtttttaccgccgggcagggttcggttgcgatgtccgcattgctacccggaactgttaactggaaaaattatttcgcctttctctccgctgcaaagcgcattgcagccacttacgggcgggacgtagcacagtcatatgtaacgattattcagggtgaaaacggtactaattatgctgctgattttgcaacgtgggcggatgccatcattccggaaataaagcggattaccgggcagagtacggaatgcaaaattgtgctgtggcaaatcaccggcggcggaaatggctatgagaatggtgtcggtgccctgcaactgaattttcttgatacccgcgatgacattctgataccggggccaatgtacggctatcctaccgccgccgaccgcacgcacctgaacgcatacgggcgaatgatgatgggcgaatgccaggcctatatggagctgatgattgcaaatggcatggaatggcaaccgttcagaatgaaatctgccacccgtaacgggaaggtcatcacgattgaaaccgggttaccccctggaacagtcactgcatcgcgagacagcaactggatgcccgatgtgccgcaggatggttttgtgtatgcgaataataatgacggtgtagttgcagtttcatctgtggcctattcaggctcgaaaatcaccctgacgctggcaagcgaacccacgtcaacagcgggggagcgtatctcatacggattgaataacagcgccggagctggctgggcatggtatggcggcaaggcgatggcggaaagtaacatccgctcaccgtttaacctgctgggccatccggtgccggagaaaatcaggcattaccttttacgcgaacgaatcggagtgacagtatga

SEQ ID NO: 240652 - DNA, 774 bp, Klebsiella pneumoniae
atgattaacccccttggcggcattatgattggcggtgacataaacaatgattacctgccgaagtcgggcacggtgacaggtatgctgctgtatgatacgggcctggttaactggtttcagggtgatgcccgtcgcgtcacgctgtcagacaatggcgatatcatttcgtttaatgaccttaaaggaaccggcagcaaattaagccgaagttcggaaacaaccggcgcaacgctggttaacgggatttttggcaaacatgctggcgcccgattcaatgccagcgaacaggacaggaaccttttcagcggtgatgcacttgacccgtcgcagccgttcagctgggccggggtggcgacattacgctccctgacggcatcctgtaccctgctggggacgttcacgtcgtcatccattcgcgccattctcaatgtcaccacatcaggtggtaacgccgggaagctggcatttctctacggtacatcgtcatgcattggtccgttactcagtctcgaccagccgtttgcatttgcctgtggttttgatggcgtgagcatctttttgcgtatcaacggtcagacctatacagcggtagctgctggcgagccgtcaaaatccgtattttcgctgggagcgctgccgggtggctcccagttctgggatggcgatgtcgctgatgtgtttctttgcaatgtggcgctgaacacgccagcaggtgcggcgctactgtcaaaaatcaaccgctttaccagcaagatttacgggctgagtctgtag

SEQ ID NO: 240653 - DNA, 618 bp, Klebsiella pneumoniae
atgatcatatttaaagcacttccttttgttttattgacttactctatctcagcattttctagtgttactgatgatgattttgatagatgctcacaattcttaaataaaatagtggcctccagtaatgcaaatttgataaaagagttgaaagtggatagggggctcattaaagcagatgttgacagtatcagtagtaatgatataactgctaaagttcaattcaataagatgcagtcaactgacactccaggtgaaggctttcttttatggatgaaatatgattacgttaaattcaatttggaggatgttactattgatccagataatccagaacaattaaagtttgataatagatacgcgtcagtatacttcagttgcctaaacaaaaaagtgatttacaaagtcaatggtgattccagattacagttttataaagatgataaattatcaactccagaaaccggtgtgtttatcttaccaggggaatatgtggaagttgaaagaaaatcagggagcgcctcgtatgttaaatatcaagcaaaaaacggagtggtatactcttcatgggtggattctagccgcatacagaaattttctccagaggccattaaaaactaa

SEQ ID NO: 240654 - DNA, 2358 bp, Klebsiella pneumoniae
atgagtggatcactgatgaataaaggactcagtctgacagaaaagctgatcggccagtcacggtatcgtattaacgttcatggctgcacggaatttctggatgtgttgcgttacagcgcggtggaatccctcagtcagccctggcggtatgacgtggcggtcacctgctcctctgcggatattgcctgtgacacgttactgctgaaacccgcatcatttactttcatgaccccggtgtttgacggcaccccggcgctgccggtccggacggtttatggcgtggtggagtcgtttcgccggatatccacgtcaaatgacgatacccgttatgctatgacgatcgttccccgcatcgcccttctggactatacgaaagggagcgaaatctatctcaatcagtcagtcactgaagttgtggaaaaggtactgcgtaaacacggtctggaagggcctgatttcgagttccggctttcccgcgaatatccgtcccgggagctcatcacccagtggcgggagactgaccttgagtttatccagcgcctgctggcggaggtgggtatttactggcgctatgaaatggacagcctacttgaacaggacgtggtgatttttcaggacagtcagcagcagtatgagttcggtgtcacgctgccattacgcaaccaggccgggatgagtgacagcggacaggagagtatctgggatattcagactgcatataacgtggtgagcggaagggtggccacccgggactacaactaccgggaagcgctgacgccgcaggacagcacggaaagtatcagcagtcaggaagggatcaccgccggtgaaatttaccactacgcggagcctttcctgacagcgggtgatacggaaagtacagagtccggggcgtatttcgcccgtctgcgtcacgagcgcattctgaacacgcaatatcatgtcaccgggcattcctccagccctcatctggctcccggtcaggtactggaaacggacggcacgttacccgatgccgtcagggaaggtatcgtcatcaccacggtacgcaccagcggttcacgcaaaagtagctttacgctgacatttgaggggatcccctacagcgaaaccgtctgttaccgtccggcgctgctcagtcgcccggtgatatccggctcgctgcctgcccgggtggaaagcacacagaaaggtgatacgtactcctggctcgacccggagggccgctatcgtgtgaaactggactttgaccgcaacagtaccgaacagggctatgcgtatctgtggctgcggctggcgaaaccgtatgccggtgatacttacggcttccactcaccgcttctcgacggaacggaagtggccgtcgtatttgacggtggagacccggatcgtccctacatcgcttatgccctgcatgattcagagcatccggaccatgttaccagcgagaatcatacgcggaacgtgtggcgcacgccggcgaacaataagctgcggatggaggataagcgccaggaagagcatatcaagctcgccaccgaatacggcaaaagccagctcaatatgggccatctggttaacgcacagcgtgagcagcgcggcgctggttttgagctgcgaacggatgagtttggcgcggtccgcgcagccaaaggcctctacctgacggcggatgaacaggcaaaagcgcaggggcctgtgcttgaaatggcccctgccatcaaccagattaaccaggccaacagccagatgcaggccctgaacagcgccgccgaagcggccggggccctgatctgcgacatcaatacccagataaattttgtggccgacaaaatcagggacctccagtcggcggtgctgctgggtagcgcgccgcagggagtggcactgacctcaggcgaacaccttcagctcagcagtacccgcaacaccatgatcaatgccggtcagcatcttgatatcggtgcgatgaaaaatgtttctgtaacggttgaaaaagccctgggtatgtttgtgcataaaggcggggcgaagctggtcgccaatcagggagacatcgagattcaggctcaacacaacacgatggccctgttttctgaaaaacagctgacggtgaccagcagtgaagatgaaattattatcagcaccccggaaacactgacgcttaatggtggcgggtcttacctgaggctgagtaagaacggcattgaacatggctcatcagttgagttcattatgaagacgtctgactatctggtaccaggatcgggcgcaaatctccccaacgaaacacccaatttcagcctgacggatatcactcaggaaagcaaaatcagcagcaaatctttcaatgactaa

SEQ ID NO: 240655 - DNA, 261 bp, Klebsiella pneumoniae
atgcgtggctttagttttgggttatctttgttgatttcttctttttatgcactagctaaaaccgacatagtacaagggccatttaagttagatgctaatgatagtgtttatattaataaggaggatgatgctaattatccattagctctttatttcgaaactaatggtaatagtatcaaagtggagtcttatgaggtcgatggtagtgaacctcatgtggaaacagttttttttactaaaataaataataaaaaaatgtaa

SEQ ID NO: 240656 - DNA, 792 bp, Klebsiella pneumoniae
atgagtaaggtaccgccgtttgataaggatgaggcggtgtggcattttcatccggtggtttttttgaatgaattattatcttcaaaacttattacactggaaatggttcttgctgcaaatctaaatgaaaataaaattcaatgtgaaagggttctaccttatctcaataaatatgcaagagcctataagatggaagataaaaaagaaattacacacttcctgtctcaaattgggcatgaaagtggttttagtataacagaggaaaatctaaattatagtgctaaagggatgcgaaggatttttgggtgcattaaaggtccagcccaatataataaaaatactgatgattgcaacttgggacgtttaagagacaaactctggactcaggaatctttgtatgcgcatagcccaaaaaatttggctaattatgtttatgccagtcgaatgggtaacgatggagaatcttctggggatggttataaatacagggggcgagggatgattcaattgactggtaaagatggctacagattttttaccaataaacataatgaaatgaatccggatgataagagagactttgtcgaacaacctgatctagtgataagtgatactgaatatggtgtagagtcagcgttttccttttgggtaagtaaaggactaaacaaaactgccagagcattgagtgtgcaagaagtcacgcaaatagttaatggtgggcagaatggttaccctgatcgcttacagaggtttaatgcagtggccccattattaagagtcgataaggagtga

SEQ ID NO: 240657 - DNA, 534 bp, Klebsiella pneumoniae
atgaaaaatagcattacaagaatgttggttcttgtgttactcttcttttcaagcatgatttatgcgtgcggtgataaccctaacgcccttgttcagggaccatttgaagataactcttttactaatggatttatttgttttcaatctgcgcctgataaaagggatatatatttttatctaagccgtattaataatggtaagttatataactctaaagtcgataccttctattactctgatgccccggtggaattaatgaccattttctttatgcaaataaatgggtatagaaatgttgttgttcttcttcgatggcatgtaaattatgaaggcaatggtgtcgaatatccgtattattatgaggttaaatcatataaacatgacgaagggcgagggtatataaagaatttggatggggaaaaagatcctcaattatcgggttatcaaatcaaaagtaacggaaacattcaaaacttcccattggataatgcggagaaaataaagaaatttttgcgcgttaagtatggtgtatga

SEQ ID NO: 240658 - DNA, 2322 bp, Klebsiella pneumoniae
atgaaaatcagttacccgctcagggacaccagcggcaaagaatttcactcactggatgatgttatgcggcttatcgacggggaagcgcacgggacatggttgctgggtgcgaacggcctgtggcatggcgggatccatatcagtgatatttctaatcccttttcagccctgaaccctgatgcgatcaataccggggaacctgtgccgctccagtttatggcagacggtattattgtggcgtaccggttaaacaatgaatatctgaccgctccgtactgtggacaacagctgcgctacagcagcagctttgtgctggtgaaatcacagtgcaagcctgacccgcaaaaggaaaagagctggctggagttttacagcctgtatatgcatctggctccggtcgctgattacccgaaatctccctgctataaagtcagggatggtcacagtggcatactgttacgccagtataaaaacggacaatacgggttaccggagggggagccagacaacggtgaggccgggacatatcctgctccggcaaaaacgaaaaagagtctgagcgcaggcgaccgttttgtctcttcccggacggggcgtttttatgtcacgaagaacggaaacgcgaccctgacaacctttggtctggtccgtttgctgaaagatagcgttccgggcaaagaacagtactgggtcacgctggatccggtactggtggagccggatggtgaaattcaggggctgatgccggaatggatgcagaaggcaaaacaaaaaggtgcttttgactccgtggaactgacggaaggaacagaggaatggaaggtcagcgccggaacgcctgtcgggtttatgggctgtatggagtcgccgggtgaggggaatcagcttgtggacagggagtggtttgtccatctggaagtgttgagtacggacagcagaatgcccggatttttagccaatccggcgtgtgtaaagggtgaaaaaaagtcagtgctggcacccaagggaaaatccctgtttacccgacaggatgccgctggacagccggtatttaccccgacatcggcgaagctgggcgctcagtgccagctctcccgggaatcggcaacgcccgtcgcggatgagtcacaaaaatggtggtataaggtcagcggcagtggctggttaccacaaaatgatgttgaggaagttaaccagtacgatttagagaaacttgggtttcaggcgctggaggaaagcagcgggggcgatgtgatgaacagcccgtatgagagctggatcccccaggcgttcgggacgataagccggaccgcggaacaaggcgcggggtatcagtacggtctggtgccgcagttttatcgtgacctgatggcggagatggacagcaaccgtgacgggaaagtgacggcagaggaaatcaggcaggcgctggcagtgcgggatccgctggtgaagaatgtggtcaaccggctggtagttaaacatcacagcgagtggtgtggtggccgctcgacggggcgctgggaagggttttataaggatctggattcgattgaagtgaaatactgtgagaaatggcaggcagacctggaatggatgagtaaggtgccgccgttcgaaaaggatgaggcggtatggcattatcatccggtggtgtttttagatgctattattgataaatttacagatgtgattgaattccaaacaactttaggtgtttatagaatttcaaagaaatcagcagaattcatattatcctgggaggcatatatgcctaaaccatatgtcccagaaggagaccaatcaagtggcgtcactgtcggatatggatatgatttggggcagcaaactacttcatcggcaagggcattgctatctgagtattactctaattcacaggttgaaagattactttctgcaattggtaagaaaggtaacgaggctcgagcaattgtccatgagttgtttgacattacaatcgaaaaagataaagcattagacatggccatggtattaaaagagcgatattgtcagatcgttgttgatatttatccccaggcaataattcttcctccagacagtgccggagccatactatcattagtatataatcgtgggccatcattagcacttcctaagccaggagatctaatagatagacgtcgtgaaatgagagagattcgtgatgattttgagcagggtaatataaaaaaaattcctgagcgtttgagaagtatgaagcgtttatggccccatcagcgagggcttgggctacgtagagatggcgaagcaaagttaatagaaaatgaaattttcgattga

SEQ ID NO: 240659 - DNA, 855 bp, Klebsiella pneumoniae
atgcaattgatgaatttacaaaatggcttaaggataacgtttgatcttaacgttatctgcatagccttatctttaataatgcctagacaatctttagcagatgagttggattttaaaaaattaggtcttaacgatacttttaaacaagatattctgaatattgaagggatccggaattattatgtattcgatgaaaaggaaggtgcgttcagagtgtattatccagcaggttcctttgatcctcaatcgatgaaaagtaaacatcttccatctggagggatgaattttaaatgggccccgttttatagtagaaataaggaatgtgctattatacagtattctgttcgatttcctaaatcttttgatttcgttaaagggggaaagttaccaggtctatatggtggaaatggaaatactggaggaaaaataccaaacggatatgatggattcagtgttcgtttactttgggtagagaatggtatgggcaaagtttatgcatatcttcctcaggaagacaaaaaacagaagtggggggttggattatctggcttgccatggttttatcctcgcggagaatggcaaaatataactcttaaagttaagctcaatacggttaattttcaaaatggaattgtgaagttatgggttaacaataaattagttattgataggcgggatgttttattcagaaaaactcctaatttaaaaatcgacggcgtcctgttttcaactttttttggtggcaataatcctagttttgcgcctaaggaactccagtatcttgacttcaaggatattaaaatatcggattggttctcaaagcaaatgagatgcgaacatgatgaaactgattaa

SEQ ID NO: 240660 - DNA, 1338 bp, Klebsiella pneumoniae
atgtttgttcagttttcttttaaaaattatttgtcatttaaagatgaggcaacgttatcaatgcttgccgcgaaaataaagtctaaagataaaaatttagataagcgctcagtctttaacgctttccctgatatcgaccttttaaaaacgggtgtgatatatggtgcaaacggaagtggtaaaagtaatgtcttttctgctttatcattcatgaagagaatggtaataaactcttcaaaagaatctcaagcggatgaagatataaatgttcttccattcaagttgaatccaagatatgaagatgaaccttcatcttttgaaatgatatttattattaacaataaactttatgaatatacgtttgctgctgttcgtaataaaatcacatcagaaacattatcagtaattgaaaaaaacaaagacgaagtcattttgtttgaaaggagtgcaaaagaaataaatgtgcacaaacaatttaaggaaggtattggattagaaaaaagaactaggaaaaatgctttattcttatctgtttgtgctaactttgatggtgaagtatctaaatcggtaattagatggtttagaaaaattagagttattcaaggcatgagtgatataggctatcttccattcactgtaaagcttttggatgatgaaaataagcgtaagaaaattaaatcgattatagatatgttcgatctagatattgttaatatctctaagagccaggttgagcagacagagaaaaaagaaagtgagcttttggatgcgatttttacaactataaaaaaagattcaagatttaaaaatgtatcgttacctcagcataatccgttaggagtctcaactacccataaccgtttcaatgatgatggtgtttttgtagatacgattaattttgagttaggagaaaacgaatctgaaggaacaaaaaagctcattgcattggccggtcccttaatggatacctttgataactcatatatattatttatcgatgagtttgatgcaaggcttcaccctttgataacaaagaaaattgttagaatgttcaatagcttagatatcaataaaaataatgcgcaattggtagtcgcaacgcatgatacaaatcttttagataaagatgagttacgcagagatcagatatggtttgcggaaaaggactctttaggtggttcgcatctaaaacaacttgttgaatataaagttaggaatgatgcatcttatcgaaaagggtatttcgagggtgattttggcgccattccaatgttgggtgagccagatataatctttgaatcagatcgagattcagattcagattcagattcagattaa

SEQ ID NO: 240661 - DNA, 591 bp, Klebsiella pneumoniae
atgaaactaaaacaaaggaaagttggcagcaaagatactgaaaaaaaagttcttattgtttgtgagggtgcgcgaacagagccatcatactttaaaaaatttaaggtaaatactaagtgtgagattgtaggtgctggttgtaacactgttagtgttgttgaaaaggcattgcaaatgttctcaacagggaatttcaaggaggcttggtgcgtctttgatagagattcattcactaagaaaagagttaaggctgcgcttacgctagcgcggcaaaataacataaacatagcattttctaatgaatcgtttgagttgtggtatgtcttacattttgcatatttagatacaaaaattactcgtgcggattatgtaaaggcactgactggctatttgggtaaaccgtacaaaaagaatgatgaagatatgtatcagatattacttgagaatcaacataaagctatagagcgatcgaagcgtctttatagtgaaatgttacttccgggagcttgtgagtgcgactcttatccttatactactattcatacattagttgaaagattgaataagttaggtcaagaaattggttcttaa

SEQ ID NO: 240662 - DNA, 3090 bp, Klebsiella pneumoniae
atgagtgagggaagattcaatctttcagcgcttgccgtgcgtgagcgttccatcacgcagttcctgattatcctgattacggtcgcgggcattctgtcgtttttcgaactggggcgggctgaagatcccccctttacggtcaagcagatgaccattattactgcctggcctggtgccacagcgcaggaaatgcaggatcaggttgccgaaccgcttgaaaagcggatgcaggaactcaggtggtacgaccgcagcgaaacttacacccgtcccggtctggcttttaccatgttgtccctgcaggacagtactcctccttcccaggtgcaggaagaattttatcaggcgcgtaagaagctcggtgatgaggccagaaacctgccggcaggtgttatcgggccaatggtcaatgatgaattctccgatgtgacctttgcgctatttgcactgaaggcgaaaggagagccgcagcggcggctggtccgcgatgcagagtccctgcgtcagcgtcttctgcacgtgccgggagttaagaaggtcaatattatcggggagcaggcagaacgtatctttgtatcgttctcacatgaccggctggccacgctcggcatttcgccccaggatatattctccgccctcaacagccagaacgtactgacgcccgccggttcaattgacaccagagggccgcaggtctttatccgccttgacggtgccttcgacgaactggagaagatccgtgcaacgcccgtcgtcgttcagggcaggaccctgcagctttctgatgtggccaccgttgaacgtggttatgaagatcctgccaccttcctggtccgcaatcagggggagcaggcactgctgctggggatcgtgatgcgggagggctggaatggcctggatttgggcagggctctggatgaggaaacggccagaatcaacgagggcatgccgcttggcatgacactgacaaaagttaccgatcagtccgtcaacatcagctccgccgttgatgagttcatgatgaaattctttgctgccctgcttgtcgtgatggtggtttgttttctcagcatgggctggcgcgtgggggttgtggtggccgctgcggtgccactgaccctggctgttgtttttgtcatcatggaagcgtccggcaaaaacttcgaccgtatcacgctgggttcattgatcctggcgcttggtttgctggtcgatgatgccatcatcgccattgagatgatggtggtgaaaatggaggaaggctatgaccgcatcaaagcctccgcctatgcctggagccacacggcggcgccgatgctggccggcacgctggtcaccgccgtcggtttcatgcccaacggttttgcccagtccaccgcgggtgaatataccagcaatatgttctggattgtcggcattgccctgattgcttcatgggttgtggcggtggtgttcacgccttatctgggcgtgaaaatgctgccgaaaatcaagacggtggagggtggccatacggccatctataacacccgccattacaaccgctttcgccgggtgctgacccgcgtcattgcgcgcaagtggatagtcgccggtaccgttattgccgtctttacggtcgctatactcggcatggggctggtgaaaaaacaatttttcccgacctccgaccgcccggaagtgctggttgaagtgcagatgccttacggcacctcgattgaggagacctgcgccacaacggcgaaaatcgaggcctggctgagaaagcagaaagaggcaaaaatcgtcacgtcctacatcgggcaggggtcgccgcgtttttatctggccatggcgcccgagctgcccgatccgtcgtttgcgaaaattgtcgtgctgacggacagtcaggatgcgcgcgaggcgctcaagttccggctgcgcgaagcggcagctgacggcctggctccggaggctcgtgtgcgcgtgacccaactggtgtttggcccgtattcaccctatccggtggcttatcgcgtcatggggccggatcctaccacgctgcgcgaaatcgcagataaggttgaaaaggtaatgcagtccagcccgatgatgagaaccgtcaacaccgactgggggccgcgggtaccggtgctgcacttcacacttaatcaggatcgcctgcaggcggtggggctgacatcaaattcggtcgcgcagcagcttcagttcctgctttcagggattccaatcacctctgtgcgtgaggatatccgttcggtgcaggtcatggggcgggctgcgggagatatccggctggatccggaaaaaatcgcgggctttactctggtagggtctgctggtcagcgcattccgctatctcagatcggggaggtagaagtgcagatggaagatcctgtgctgcgccgtcgcgatcgcacgccgaccattaccgtaaggggagatatcgccgacaatctgcagccgccggatgtctccacggcgattatgaaagagctgcagccggtcatcgatacgcttccggccggataccgcattgaacaggcaggatcgattgaggagtccggcaaagccaccaaagcgatggtgccgcttttccctatcatgattgccatgaccctgttgattatcatcctgcaggtgcggtcgatgtcggcaatggtgatggtcttccttaccgcgccgctggggctgattggggtggtgccaacactgctgcttttcaaccagccgtttggtatcaatgcgctggtaggcttaattgcgctgtcggggatactgatgcgtaacaccctgatccttatagggcagatccatcacaacgaacaggaagggctggcgcccttccatgcagtggtggaggcgacggtacaacgagcccggccagtgctactcacggcactggccgccattctggcgtttatcccgctgacgcactcggtattctggggaacactggcctataccctgattggggggacgcttggcggcactattattacgctggtgttcctgcccgccatgtatgccatctggttcaggatacgtccagagaagcctaaggacttagaacaccaggcttcggagtga

SEQ ID NO: 240663 - DNA, 1107 bp, Klebsiella pneumoniae
atgctcaggcttcaatctgctcctcttgccgtttgcctgttgccgcttgccctcacagcctgcggtgacgcttccggcacagacgatccccgcactcagcctcctctggtcaggtctgcaaccgtagtgagcgctgtggatgcctcccgcgcctttaccggcgttgttgtcgcccggattcagagcgacctcggtttcagggtgcagggcaaaatcctggaacgtctggtggataccggccagaccgttaaacggggccagccattgatgcgtcttgatccggttgacctgagcctgcaggcacaggctcagcaacaggccgtcgcggctgcgcgggcccgcgcaaaacaagccaccgcggatgaggtacgttaccgcggactggttgcagcaggggcggtgtcggcatcagcttacgatcagataaaggccgccgccgatacagccagagcagaactcagcgcagctcaggctcaggcgaatgtggcgcaaaatgcgacgggctacgccgtgctgctggccgatgccgatggtgtggtcatggagacgctggctgaacccggtcaggtcgtcagtgccggtcaaccggtggtccgtctggccagggccggtcagcgcgaggccatcgtacagctgcccgagacgttacgcccggctgttggaagtgaggccggagcaatactgtacggttccggtaaacagccggtcccggcgagattacgcattctttccgatgcggctgatccggtcacacgcacctttgaggcgagatatgtgcttgaggggaccctggcgaacgcgccgctgggatccaccgtgacgatgcatcttgctgacgataaattttcgggccaggtgatgcaggtgcctttagcctctctctacgatccgggcaaagggccgggtgtctgggagatttctggtaagcccgccagagtgtcatggcggcccgtgaaagtgctggggctgggggacgaggcagcaaagataaccggtagcctcagacccggcgaacaggtggttgctctgggggcacatctgctgcacgacggtgaggtcgtacgcactgaccagggcgacacccgcgtcgccgggagccggccatga

SEQ ID NO: 240664 - DNA, 615 bp, Klebsiella pneumoniae
atgacaaaacacacaaatgcacaaaccctgcggggacctgtggaccacagcgtccgcgatcagattgtggaagcggccacggagcacttcgggcattttggctatgagaaaaccaccgtgtccgatctgggaaaagccattggtttttctaaagcctatatctataaatttttcgattcaaaacaggccattggagaggttatctgtgccaacaggctggcgaaaatcgctgagatcgttaatcacgcgattgccgatgcgcctacggcgtcagaaaagctgaggcgtttactcaaaacattgaccgaagccggtagcgatctgttttttcacgatcgccgactttatgacattgcggtcgttgcttcccgggaacgctggtcttccgccgtcgtctatcaggaacagctgcgtcagctgatccagcacatcatccaggaaggccggcaggcaggggagtttgaacgcaaaaccccgctggatgaaaccactgatgccatcagcctggtcatgcagccttacatttgccctttacagctgcaatataacctcgataccgcagcctctgcggccgtactgttgtcctcgctaatactcagaagtttatcgccctga

SEQ ID NO: 240665 - DNA, 1464 bp, Klebsiella pneumoniae
atgtttctcctgcgtactcttgcactggctgtaacggccggcttactggcgggttgtgccgtcgggccggattatcaacgcccggacgcaccactcgcgaaacgctatcaggcgcagtcagccatccagcagagaagcgcctcccggagtgccagttttgccgtctggtgggaaggcttcgacgaccctctgttaagtcagctcgtttccgacgccctggcccagaatctcgatctcgcccgggcgactgcccgcatgcaacaggcccgtgccgggctgggtgcggcgaccgctgcgctgttaccgtcggggaacttcagcggacaggccgcccgcgcctatcagtcgactgaaacccctctgggtcaggttctcagcacaacgccggattataatcgctacggcaacagctacgaaaccgatctgaatgccagctgggagattgatattttcggcgggctgcgacgcgaacgtcaggctgcccaggcggactatcaggcctccgaagcaggcgtcgtcgcgacccggctggccgtcgccgcgcagaccgccgatatctatatcaccctgcgcggattacagacccgcctggccatcgcggagaaacaggtcagcacacagcaggcactgctggaaaaggtccgcctccttcacgacaaaggactggcgcccggctatcaggtgcgtcagaccgaaggggcgctggctcaggttcaggccacggtgccggtactccggacggggcttgatgccgcgatgaatgcactggatgtcatgctcggcacacctcccggcacccaccgcgctcagctgacggtaccgagccccattccgcaggcgccacagatcgcctcgacgggtacccctgcagacctcctgcgccgaaggcctgatattatcgtggcggagcgccatctggccgcctccagtgcccgtattggtgtcgccatcagcgagtattatccgaagttttcactcagtgcattactcggcagcgccacggccgtgtcgggcgacaacctgttctccgccggtgccagccagtcagccggcgtgctgggcctgcgctggcgactcttcgattttggccgcatcaatgcccagatagaccaggcaaagggccaggaagctgaagctcttgctgcctatcgcctgacggtattacgcgccaccgaagatgtcgaaaatgccttttcagccctgctcaaccgggaagcacagactgcaacactgactgaaggcgaatccgcccttgccagcgcccgcgaatcgtcttttatcgcctggcagcagggaacagccagcctgattgacgtccttcacaacgatgaaaccctgttgcaggcttctgatgccagagcgcaggcccggactgaatccgcgcgggcagcagtggcggcgttcagggcgctcggaggaggctggctgccaccggaaaccgcgatgaatacgcatacgccataa

SEQ ID NO: 240666 - DNA, 783 bp, Klebsiella pneumoniae
atgaaacgaacaggtattctggaagtggacgcgttaacggaaaaactggttcggggattgtttcttgccgcgcctgatgcacaggtttttctggtaccgggaaacaacgagcgggcgcgtaatctggcaggggaatacccctgctggaccctggatacgtatcaggacctcattgatgaggctgacgtgattataactggtggggagcgtcacgccctgcacggtattgccggtcaggtgcagttgcacagcacgcaaatactggtatctctggtgccagggctctctattgcgtacctgcaaaaactgttcggacacccagtgtgcgtcagactgatgctgactttcgccgctgaaatcaatcagtcgagcgtgatcctgacggaggctgacaaagagatccagaccttattttctctgctgggacgactgaccgtcttgtcagacgaatcagatttcgatctggcaacggtacatctctgcatgaccagtggcttctatttcctcgcggagggattacagtgctggctgaccgggaaaggcatggcggatgacacggcccggcaactggtgcttaacgggcttaaagactgcactgaatatgccggttatcacacgtccctgaacctgggggttttagggggggatatatcatctgcggtcccctttatgttgcacgggattgaagttcttgcccggatgcaggcactcaccccctggcgtgcagcgtcagatgagatgttatccgtcattcagcaaataccggacgatgaaaagcagtag

SEQ ID NO: 240667 - DNA, 786 bp, Klebsiella pneumoniae
atgtcagcgaaaaataacacatgggtgcttattacgggagcctctggcggctttggtgaagagttcgctcgtcagtatgccgcacaggggaaatcgcttatcctggtggcgcggcaattcagtaagcttgacgctcttgcccgggaattacgccagcactttaaggttgatgtgatggtggaacaggtggacctttccgtgatgtctgaggtcagcgacttacaccatcgtctgcaggagctcgacattcaggtcgatatattaatcaacaatgcgggctacggtttacaggggcgctttctagagcaatcccttgatgaggcgctggatatgatcagtttggatatttccagcctgacagccatgacccgtctttttgccgccgatatgcgtatccggggtaaaggacatattctgatggtcgccagtctgttgtcctggcagggggtaaagaattttgccgtttactccgccgcaaaagcgtacgtactccggttttcagacgccctgcaccgcgagctgaaagacgaggggatcgtcgtcaccgcactgtgtccgggcatctccgacaccggttttgcggaagctgccagacagaaactgacccccgcgttaaaaggggtgatgatgaaaccagaaccggtggtacaggccggtatacgagctctcgaagccgggcgaatgagcgttgtacccggtctgggaaacaaggcgattaccgtgctgacctgggccaccccccgctggttacatcaggccatcatggcccgtgtgatgggggtgtaa

SEQ ID NO: 240668 - DNA, 840 bp, Klebsiella pneumoniae
atgaatgatgatgaaatgatcaaggatactaaagaagttgtctctgcattaggggagttggtcaaactagcaggagacaacgaaaacgctaagaaagcagcggataatataggaaaaatagcggcaacagttaccggagccgttaataatatattattgccacttgctgctgtaaattttgcagtggacaaagccaggaactactttaacaaagattttaaagaggaaattttagaagcaacggctgaaattccaaaggaatacatccaagaacctaaagcttcaattgttggaccagcgatgcaaggacttgcttattcactggatgaagcagagttgaaagcgatgtaccttaagctaatatcatctgctatggacgagagaaacaatggagtaatgcatcccgcatatactgatatacttaaacaaatgagtcctattgatgcagtgtttatgcggtattttgaagagaaaacaccatcatttataagagttattcatctgtacttcactcacgatggtaaaacagggaagatattatctaattatggagagcacattaatgagataggtttcaaaaatataacccagtataaaataagtttaaataacctcctccgattaggtttaattgttgaaggcgaagcaactacgggtagctacgataacattagtttaggaataattgaacaagtcaaaaaaaacatgcatctaaataacgaagaaaaatatcatgtaaaaggtgccacgcttaagataacagctcttggattagggtttacatatacatgcataaaatccgtgacaaatcctgaaagtcttttgagtataataccttaa

SEQ ID NO: 240669 - DNA, 300 bp, Klebsiella pneumoniae
atgacctatgaactggagtttgatccacgagcctggcgcgaatggcagaagcctggcgagacggtcaaaaaacagttcaaaaataagctccagcagattgtgcagaatccgcgaattgagtcgaccaggctgagcgattaccggattgctacaaaatcaagcttaaggcgtcaggttatcggttggtgtatcaagtacgagatagtgtggtggtggtttacgttattgccattggcaaaagagagaaagcggccgtttatcatcaggcgaataaacggctctaaacgctatcgcaaatga

SEQ ID NO: 240670 - DNA, 1329 bp, Klebsiella pneumoniae
atgaatggggggaaattgccggaggggtgggtagaaaccccgctagaaaatattgttgaaatactggattcgatgcgtattccggttaacaacaaagaaagacaaaaacgtattgaggggaaagattttaataaactatacccttattatggcgctacaggtgaagtcggtaaaattgatgattttatttttgatgaagagctcattgcactaggtgaggatggtgttccattttttgatggacaaaaaaataaagcgtacatgctttatggaaaaacatgggtaaataaccatgctcatgttttgaaagctattcaaggattaagtcataacaaatttctatgttattttctcaatcaatttgactatcacgattacgtcaacggaggaactcgtttaaaacttacgcaagcaaatatgcggaagatcccggttcgttttgctcctttttccgaacaaaaaatcatcgctgaaaaactcgatacgctgctggcgcaggtagatagcaccaaagcacgtcttgagcaaatcccacaaatcctgaaacgttttcgtcaggtggtgctagctgcaattgttaatggaaaattatcaacgaatactgaacaatggaaagtatattcattaaaaaatctttgtgtcagtatttcggatggtgaccatcaagctccaccaaaatctgaaacaggaatcccctttctagtcatctccgatgttaataaagggaaaattgatcttgaaaatgtatccagatgggttccagagtcttattacctggcactaaaagagattagaaaaccatctctaaatgatattttatacactgttacaggttcttttggaatcccagtagttgttaacaccactaaaccattttgtttccaacgacatattgccatcataaagccaaatagcaatttgattaactatagatttttattattctatttagaatcaccacaaatattcaaacatgcaagtgatgttgctactgggactgcacaaaaaacagtctcattatcaagtctccggaattttgaactttcagtcccttctttaaaagaacaagccgtaatcgtccatcgtgtcgagcagctcttcgcctacgccgacaccatcgaaaaacaggtcaacaacgctttaacccgcgtcaacaatctcacccagtcgatcctggcgaaagcgttccgcggtgaacttaccgcccagtggcgtgctgaaaacccaagtcttatcagcggtgaaaacagcgccaccgcgctgctggaaaggattaaagccgaacgcgcggccagcagcggtaaaaaatcctcgcgtaaaaaagcgtaa

SEQ ID NO: 240671 - DNA, 6321 bp, Klebsiella pneumoniae
atgactacacgctatttttcgtcacttattgaacaatcgttgtctcgttcaactgaagcaacactgagtatcatgggggtcacaaacccgcagttgcgtgagcacctcgcgcaacaaatgggcgccgattgtgggaaatcaggctcattccttgcttctcccgttttccaacaaatgtttggctggaaagcgtcaaacaaaacgatgcgtagcctgacggaaggcaaggcattgctcagtaaagctgtggttgattcgctggatgatcagaacaatggacgctatcgttttggtgctgactggaaaccctttactcaccagctagccagttggaaggctctgctggaaaaaaaacattctgtggtagtgaccagcggtacgggttcaggcaaaaccgaatgttttatggtgccggtgctggaagacctctaccgggaattacatgaaaatggcaacaacccacttatcggcgtcagggcccttttcctctatccacttaacgccttaattaattcgcaacgtgagcgcctggacgcctggacacgtggttttggttccggaatccgatactgcctctacaacggaaataccgaaaatctacacgccgcagtgaaaagcgaacaggtaaaaagaccgaatgaagtactctcgcgcgaaaaaatgcgtgaagaacccgctccaattctggtgaccaacggcacaatgctggaatatatgatggtccgccagatcgacgctccaattatccagcaatctaaatcacaaaaatcattacgctggatcgtattggatgaagcgcatacctatgtcggctcgcaggccgctgaactggcgctgcagttacgccgcgtgatgacggcctttggtgtgactccagatgatgttcgctttgtagcaacctctgcaaccattgccggaagcgatgccgaaaagcaattaaaaaaattcctctctgaattatccggtataccgcaagagcgcattgacgtactggacggaagccgggttattccggaactggaaccatgcaaacacgtttttattccgttagaagaaattgagcaaatccctgatacagacatgaagggcgtaagcccagagcgctttgatgcacttacgcattcacctgaagcgtattacttgcgcgacatgctagttactcaaccgaatccaatgaagttggatgatatgacgcagcggttgaactcgctaacaaaacagcattatagccagcaggatgtgttgcgctggattgacgtctgctctggcacacaacccaatactaaggatcccgcatttcttaaggtcagggcgcacatattccaacgcaatacccagggggtgtgggcctgtgttgataaagaatgcagattaaagcacggtaccccgctggaaaagggttggccttttggctatgtgtatgtgaacaaacgccaaaattgcgattgtggaagcccggtttacgagctggcattctgtaatgaatgtaatgagccacatcttctggcgcgggacaaaaagggaaaacttgtccaatgggaaaataaaggcggtgatgagttctctttgcaagatgatgtgcatattgaacatgatgccgcagaagaaaaagttgataaagagagtcgttttcagcccgcactcattatcgccgcagagaagaccagcgcggcgggttatacccaacagcgtctggaccgtcagacgcgtcgtattggtgttattaacaatgacagcatcccgctagttattaacgacattgaacaagtatgtagtgccagtagctgtggctacagaggcacgagcggaaaacaaccgttccgccgtgccttattaggtgggccattttacgtcaccaatattgtgccaaccgttctggaatattgtcaggattttattagtgaagaaggaaaagagggcgtcggacctgattcgttaccaggtcgaggccgtcgacttattacctttaccgacagccggcaaggaacggcccgcatggcagtgcgcatgcagcaagaagctgagcgcagccgcttacgcggcagtgtggtggaaatcctgagctggcatcaacgaacacagacttctgcaacaccgaatgccaatgccgatctggaaaagttagcgacgagggcaaaacaggcccacaatgaggcgaaagagtatagaagctggggaatgccggaacaagcaaaactggctgaagcgcaagccgaacagcttgaacaggctattcaggccgcgaccggtggcaaagctgcgaccattctgttttcgcggacctggattgaaatggttaatgaacttaaagagaaagccgatattcgcggccctattctgcaatataaccactatctgaagcctgaaattttcaatgagaatggcgggccgctaaagctttctgagatgttgttattccgggagtttatgcgccggcccaaacgaactaacagcctggaaacgcagggattagttcaggttggttatcaggggctggagaagatccataagatgccggtgcattggcaagagaaagggctgacgctggatgactggaaggattttcttaaggttacgctggatctgtacgtacgtgaaagcaacttcacacaactggacgatgagttgaaaaactggattggtagccgtttttcatcgaaattcgtccgtaacccggacacaaaagatcccgaagataatcagaacagacgctggccacaaattcgtaatggcaatatatcccatcgtttagtgaagttattaatgcttggcgcaggattcaaaaccgtaaatacggcgacgatggatattatcaatacgtggctgaaagaagcgtggacccaacttaccggcccacttgcagtgctgaaacctgatggtaaccgtttctatctgccaaaagagcacatgactttttctttaatcacagatgcctggatttgtccggtaaccaataagattctggatacggcctttaaaggcttaaccccttatctgcccacccacatttcgtttgaacaccttaccaagacacaatatgacgcttttgtcgcgcaaaaggtcaccatgccggaaatctggaagctggatcgttcgcaagaagactacgctccgggtctggcgaaggtacgtgactgggttagtaaagagccactaatcgcacaattacgttcggaaaacgtctggacggatattaacgatcgtgtcgtggaaggcggattttactaccgcactgccgagcactctgctcaacaatcgtcagaacgtctacaaagctacgaaaagatgttcaaaaacggacagcttaatgttctcaactgttccaccaccatggaaatgggggttgatatcggtggcattaccgccgtggtgatgaacaacgtaccgccgcatccggctaactatttacagcgtgcagggcgagccggacgtagtcaggaatcgcgtgcgatctcttacacactatgtaaagggaacccgcacgatcagcaggtttttgccaacccactctggccgtttgagaccatgatccccgcgccgatggtggcaatgaattccgcccggttggtgcaacgccacgtcaatgcgttattactgtccgactttttatgtcacgtcattggcgaaacggataaagaaaaaaccagtcttgatagcctctggtttttcggtgaagacgacgggcaatcaaaatgtgaacgctttaaagtctggctcgagcgtccggttcttgatattgacacggcgctggaacgactggtgaaaggtacggcgctgcatggagccagacccgacctgttgcgggataaaacaatccatgcgattacgttcctgcaacagcgatggctttccgtctaccgcgatcttgtggctcaagagcgcgaatcacagccgcaaacgccttatcgcaagcgcatagaactggagaaaaaacgacactgtggcgagtatttgctgcgtgacctggcggccaggactttcctgccgggatacggcttcccgacagatgtggtgacgtttgataacttcactatggaagactatatccgtgaaaaatcacagaaaagccgggataaaaaagatcgcgaagataatgtgtcacgttataagggacttccctcgcgtaacctgggggttgccatccgtgaatatgcaccaggtgcagagatcatactggatggccgggtcttccgctctgctggcgtctcactgcactggcacaatattaatgccgataccaatgaagcccagcgtctggattgcgcctggcgctgccacaaatgcgggaccataggctatgaagaggggttgagcagttccgggacgctattttgcaccaacagcgcctgtggtgaaaaaatcatcatggataatcgtcgccaggtgctgcagccagccgggtttgtaactgatgcgcatgcgccggtgacgaacaatattgaaaccatgaaatttatcccggttgtccctgcctgggtatttgttaaagcagaacccgtatcgctacctaacccgataatggggtatatggcatctggcgctgatgggcatgttttccagcaaagccttggagaaggtgggcatggttacgcactttgtctgagctgcggtcgcgcagagtcgatgttgaacgcaaacgatgcgccgaaaagtatggaagcccactacccgccgcgtccgggaaaagcagatcgcgacagccagaatcaacgtctaatttgccccggctcgacggcgctcatgaagaacgtcacgctgggggcattggcacgaacggatgtctttgaaatggttctacgcaagccgcaaaacggtgaatatctcccggatagcacggaagaagggcggattgttgccatgactctggcggtagcactacgtcaggcgctggccggggttttgggtatctccgcggcagaactaggctacgccgtgcgtccggtcagactggaagatggacaatcagtattagccgttcaactctacgatgtgattagcggtggtgcaggttttgcatccagtgcgccaatgcacattgaggccattctgttgggaatggtgaagcagttgggttgccaccactgcgatacggcatgcagtgaatgcctcctcgactcccagactcgccacgatcacgatttgctggatcgtaaagcagcacaggcatggcttggtgatgacttctcgtactacatcggtttgccggatgatgaaacattctcgctaccggatgcccgatattgcccgggagccattggcgatacccttcgtcgggcgattaacgagggtgctgaaaaactcacactgtggatgaatgggccactcaatgagtgggatctttatgcccgtcaattccgggcggctattcagaactaccggattaaagacaatgttgcggtcgaccttgtcattcctgctggcgtcgatgatccggagctgttgcatgagctttcgcagtttactgctttgggcgtgcgtttgtgtcatagcgaacaggctctggaattgccgattgttgcgcaagtcgcctttgccgatcgcgtaatgacgctggcttcacgcagccagcaggcaactatcccagggccaggctggcacctgaatgacgaactggtcgttcgcagcctcggctataacacggtaaaactgaacgagtttgttttgccggggaaagcagcgaactctgttgagcgtgtcaaagacatagagattcataaacagttaaatggtgcactttcgcagttcggacaacgcttctgggacacgctgtttaacagccatgaagaagcacaatcgctgatgaaaaaccagcgaatcaccagcgttcactataccgatcgctatctgcaaaacccggttgcgctggcactgctgggggcgatactgaaaccgctaaaaacaaagctgaccgatgacgcggagcttgagcttgatactctgtttaagcccaaggatcgtcccggcaaccggccgttccatgactggatgagcgatgcggattttcaggatttcgccgaccagtggtttactgcggcaatgggcagagcggtagaactgacggtgttcgattcgccacgtgatattccacatcatcgtaagctgacggtgacctttgaagatggtcagacgttgaagattcgattcgaccagggaatgggatactggcgtatcgacttcccaaatgcatggcgtaactttgactttactgacgatgtgacttatcagctagtaaaaatggcgcaagcctgccaggagggcaaagtccttaatagcgaggacagctgggcaacggatgtgctggtagaggtgatgtcgtcttaa

SEQ ID NO: 240672 - DNA, 174 bp, Klebsiella pneumoniae
atggatatcaagacaaagcttaaacgttctttagattctgtggaaagtgcaatttcatctttaaagcgtgcaagagggcaaactacggatgcataccatgaaataaacaaagcaattcgtgaacttgaggatgccgagtacaacataaggaaatccattcgtgagatggagtga

SEQ ID NO: 240673 - DNA, 807 bp, Klebsiella pneumoniae
atggtggcaaatactaagtcaactgaaaagttgcaaatcagtaagataagtaagaaggtaactgaatatttcggtgctattaataccataattaataaatataatctttatagtgttaatagaaaatgtcattttcttgggcaaggggctgttgaatcagaaagtttgctgtcaatgcaggaggttagccagcaacaactgatagagaatggtgtccacaaaggtggtgcaattgttggcctatccaccaaaaaagaatcggatctcgggcattggtatggagagttggcggaagaaaaagatgattatttttctggtaaaaaatacaattcaaaagggaaccttatcacaggatcttacagctggatcaatgggaattgtggtgatgttgatgcccagaaatacagagggcgtgggtttaaaatgctcaccgggctcgatacttattctagctattgggtatatcgagggtggctctcaataaatgactttgatagatactggtgggatgaccctcaatataaaaagaaaaacccacccaaaatgaaaaaacgtttcccccagatagactcgccacaaaaaataacagaaaatacttataactgccttgatactggaggcttttttatcgttggatttagaggtaaaacggtgaggataatggatggggataaaaatggcaaagtagatgataatcaggttattgaaaatgtcacctctgcaataaatggtggctataaagggctcgcagagagaaaaatttttacgaaaaaagctaaggaagtgattggtgatgacgttgaataa

SEQ ID NO: 240674 - DNA, 147 bp, Klebsiella pneumoniae; identical to SEQ ID NO: 225777

SEQ ID NO: 240675 - DNA, 210 bp, Klebsiella pneumoniae; identical to SEQ ID NO: 130796

SEQ ID NO: 240676 - DNA, 588 bp, Klebsiella pneumoniae; identical to SEQ ID NO: 130797

SEQ ID NO: 240677 - DNA, 918 bp, Klebsiella pneumoniae
atgcaaaatgatgttagtaaagtcaatacctttttccctaagccagcctgggttaccatccgtgaagcagtaaaaataaccaataaacttagggatataaaaatagcagaatatgatatttatcgacatgccttatatggtaacatttcactttcgatatactttcagtcacctgttatactgagaaaaattcgttcctcagtgaacaaaataaaactacgcccagtaggcgattctctaccatatcggctttgcatgcttgaacgaaatgtatttttaaatggtaaaggtttaattctcagtacagagggggaatatatctcacctgctcaattagtcatgaacataggtatgctgggacatgaattcgttctcattcagcggctacttgcacattctctaaatatgccgttacctattacaggtgcaaataatgccaattatggtattacaattactttggcaggccaatcatatcagatttttgaaaaaaagacatggcaggacagaattaatcagcaaatcacgcgattaccggcgcatatcattgcagatatttacgaggatgaatcagtaaacagattcatgaatttttccggtaaaggatattttcctgtttatgaactcccggaagatgcctgctttgtaatacgacaagaggaacttgataaattactcggtacacatgcagatcgctttacccacacttcatccagtaggctttccacacctctctcacgcttattctggttagcatgcaaacataatgattcgatcagtccactgctcaggcatccctataaacttcttcccatttttgaagaatgggcatcagtcgatggtattaccgatcatctgagcgcggacacgctgaaaagagcgcttgaacgcggatccccgaatcagagttcaaaataa

SEQ ID NO: 240678 - DNA, 1185 bp, Klebsiella pneumoniae
atgatatacattattcgctttttctcagctgcggcctggagctttttttatcccttcatggctgtctggcttaatagcgttgtgggactcagcagtagcgctgccggtatcgtcgtcgggtttgctattgtggcgaaccgtacaggcgcgctcgctttccatcgcctgctggacaaaacagaacgaaaagcagagatcgcactgacgctgttgggtgttgccatatcagcattcctgatgctcgttgcagcagcaatgggcgtttctgatatctttgtctggattgttcttgcaacgttatttggcctgactaactctgtatcagtcatatcgcaaatttcatacatcgtgcatgttttccatgacggcgagcatgagcgtgtgctttcatatgaaaacgttgcagccaatgctggcgctggtattgcaccatttctggcgtccttcatgctttcaggtacaggttactggtttgttgcctttcccttgttacttgggacactgggcgcaatagccacccgtcctctaccctctgcaacccatcctgaggtggctgacacaaaaagtgaaacagcgaattcatcagaggatactggtaatcaccaaattatcgcttttatggtgattaatttcctgacgatggttggctatgcccagttttattatgtattgccgacctatgcggtggaaaatttttccagtgaactggtaggcactctatttcttctatcaagtattatcatcattatcggacaggtttatatcacttcattctcacagaggataagccgactatggcgggttgttatttcaaacttatgtatcggttcaggatgtgcattattaatattctcatctgagcagcaagccgttctgtatatcgttgtcgtcctgatcgtaaccggagaaatgatttgtggtccgttgtatcaggcgcaggcagttagaatctggcgaggacgtcgatctgttgtaatggcaatacagacctgtgtctggggcgctgctgaagccactgctacagtagcagggctgttacttattgcaggaaagctgagtgttatttccttcctgttgggagttttgacctgttttattgcagcagctggagcatggttatcaatactccagaaacgacctttaatcggtattgatacggataaaaatttcgcagactcttcataa

SEQ ID NO: 240679 - DNA, 1236 bp, Klebsiella pneumoniae; identical to SEQ ID NO: 198014

SEQ ID NO: 240680 - DNA, 1356 bp, Klebsiella pneumoniae; identical to SEQ ID NO: 198015

SEQ ID NO: 240681 - DNA, 1053 bp, Klebsiella pneumoniae
atgtctatagagtcaatatctaatcaacaaataacgatggtagcctctggtatgagaacagataaaaacaaaacaaaacatgtagatagtctccctggtaaaacgtctaacaagacagatgaaaaacatgctcttggttcattcctgacacaacttcgtgttgaaaggggacatcttaaagtttcgacatttctggaagggatagatattcctttttctgctaattattatcgtgatatcgaagcaggcaggaaatatctcagtatagactcagcagtagaactccacaactctcttggtatagaaacatcaagcaaatcaagctttgattatttctggcattattttaaggatttattaccttctgatatgcatgaaatgctatttgggaaaggaatagaaacaagagatctgtcttcaagactagaactgagagaccatgattccaaaatattacgccgcgcactcagcctaagtcgatatgaacgcgaatttattatttctgatgaaataattagaggatttaagaacaactttgatttatggccacttatgacatatctatatatggttgacactgcatccgtggctgaaattaaacaagtttgccatcaacttgacattgcattcgattctcgtgtggtcgaatttttgagtcttgtagcaaaagaacgaaaccatgaggaagccccttttgttcgccttgcaccgacactcagaatgccaaggaccccagaatctattaatcttaaagacaaatttatgtgttatgaaactgagaaatccctgtccaaacccgaaaaaagtgaatattttgacatagatgggacatttaaatttagtgcgatggttacgcttaaatcgccggaaattgaacaaatacaggacagacttgttgatctcttttccgctattgaggtacacactaaatccggacgacagcttgaggatgagaatgcacatccttattttttggaattgatcatttcaggcagaccagaatatgacggtcgaactgccagaaaaccatcagggtttaaaaaaccagaatag

SEQ ID NO: 240682 - DNA, 723 bp, Klebsiella pneumoniae; identical to SEQ ID NO: 198017

SEQ ID NO: 240683 - DNA, 1053 bp, Klebsiella pneumoniae; identical to SEQ ID NO: 198018

SEQ ID NO: 240684 - DNA, 1584 bp, Klebsiella pneumoniae
atgaatattacacagcataatagcacatccacaggcgataccttcattctcagcccaggccgtaacgtcagtctgaaagactttattgaattctctcagttcagtaaaaaaatagttgcttcagaagaaaccagagaaagaattgccgcatcaagacgagcccttgaaaaattagtgaaagaaggctcggttatatatggtgtcaacactgggatgggtgggtttgtcgatcatctcgttccgctcgaaagggctgaagaattacaaaaaaaccttatccgtggtgttgcgacaaatgttggtgaaagattttcagatataatttgccgggcaactatgttcgcccgaattatctcactttctcgcggcaactcagcattatctctggaaaatttcgatcgatttatcgcaatctacaacgctggtctgattcctgagataccacgtaaagggtcattgggcaccagcggagatctggggccactggcagccatggcccgtatgctcactggtgagggcaatgcctggttcaatggtgaacgcttggctgcagaagatattctgcaccagctggggctcgcaccgcttgagctaagttataaggaagggctggcactcatcaacggcacctcctgcatggttgcgcttgccgccctgaacgtcatcgaaaccaggtcacttcttgaacaatatgcgtcaatctccgcctttgcctcagaaacgcttcttgccaggattcggccatttcatcccgacgttcatcaactaaaaccgcatacaggccagcaaaaaattgcagagatgatatggaataacctccatggaacaaggctggcggttgatgatatacagctttcatcagaactcggaagcaggcttacgaatagcatcaaacaagaagatatgccgattgaagatgcctattcaattcgctgcacaccacagatacttggcccggttttggagacaatagaatttgtggaacgaatagtgagtaatgaattaaattcgtcaaatgataacccccttatcacccccgaaaacggtcaggttttccataacggtcattttcacggacagtatatatccgccgcgatggactatttgacgatagcaatcattaccatgtgtaacttatctgaccggcgaatagacagattgctgaccagtgcgaacagcaacgggctcccctcttttctatgtgcagaaaatggtgggctgcggtttggtttgatggggggacagtttatgtcatcttctgtcacagcggaaaatcgttctctggctacacctgtatcaatacaaacactaacaacaacaggtgattttcaggacgtagtctctttcggtctggttgctgctcgcaggacggcggaggtgctccagaatacccgctatgttattgcttttgagttgatctgcgccgctcaggcagctgatatcagggatgctacaaaattaggaaattcaggtcgcctgtggtacgcaaaagtgagggagtcagtcccttatctggaccatgacgagtcaataacaccttatctggaagaactcgtatcccggatacttggaggccactcatga

SEQ ID NO: 240685 - DNA, 1008 bp, Klebsiella pneumoniae; identical to SEQ ID NO: 198020

SEQ ID NO: 240686 - DNA, 1251 bp, Klebsiella pneumoniae; identical to SEQ ID NO: 197974

SEQ ID NO: 240687 - DNA, 921 bp, Klebsiella pneumoniae
atgacacatttcacactcaagcaacttaaatatttcgtcactgtggttgagaccgaaagcatcgccgaagcgtcacgccagctgcatatcgcccagccttcgatttcggtcgccatcaaaaaccttgaggacgcttttgaacagcagctgttcattcgccatcatgcacagggcgtatcgctcacctccagtgggagacggttctacgaaaaagcaaaggagttgctgcggttgtcctatgagtttgagcaaagttcacgcgcagaaaatgagctggtttgcggcaccatcgccgtgggttgttttgaatcggcggctccgctgtatatgcccaagctgattgcaggtttcaaaaaactctatccggaaatcaatattcagctgtacgacggtgaacagcatgagctgatgcacggtttacatcgtggccgttttgacatggcatttctctacgatcttgacctggacaacgcgattcagaaagaaccgctgaatgcgccgcataaaccctatgcgctgctaccggcggcgcatccgctggcgaaaaaaagtgcggtgacattacaggaactggcaagcgaaccgatgatcctgttggatgcggtacccagcaaaaattactttatcagcattttcaaagagaatggttattaccctgaagtggcctatagctctccgtcaattgaaatggtgcggtgcatggtcgggcaggggctgggcttttcggtgctggtgacccggccctgttcggatatgacatacgatgggcagcgcttggtgcaactggatattatcgatgaaatggcggcatcgacgctgattatggcttatctgcaaaataatgaacccacgcggcccacgcggttatttatggattattgccgcagtgttgaattaactccggccgtcagcagccattaa

SEQ ID NO: 240688 - DNA, 1491 bp, Klebsiella pneumoniae
atgcataatcgtgattactggcaaggtctgctgaaccaacaacgctttagcacgcatgcccttatcgggggtaaaccttacttcgccaaagcggagaaaacctgggcggtggtgaatcccgccaccaatgcagtgttagcggacgtcaccgcttgccaggctgaggatattgacgctgcggtgcgttcagcacgccaggcatttacctctggtatctggtctgaatgtcctttagcgcaacgcaaagccgtgctgcgcaggctggcggagctgatgctggagcaccgggaagaactggcgctgctggaaagcgcaagcatggggaaaccggtgctcgatgcctataacgttgatgtgcctggtgctgctcatgtgatggcctggtacgcagaaagtatcgataagatttatgacgaggttgcccccacccgtccgggtaccctggcaaccatcacccgtgaacctgtcggcgtggttgccgccattgtgccgtggaattttcccctcgatattgccgcctggaaaattggcccagcgctggcagccggaaatagtgtgatcctgaaaccctcggagaattcgcctttcaccgcactgaaactggcagaactagcgctggaggccgggttgcccgccggggtgttaaacgttgttaccgggctggggatcgaagccggtgctgcgctgggccagcataacgatgttgatgtgctgacctttaccggttcaaccgcggtgggcaaagcctttatggcctattccggccaatccaatttgaagcaggtgtggctggaatgtggtggcaaaagcgccaacattatttttgccaattgccaggatctcgatttagccgccgaaaaagccgccttcggtatctgtttcaaccagggtgaagtttgttcagctaactccagattattagttgagcgtaagatctatcccgactttatggcgaagttgatcacgaagttgcacggctggcaacctgaccacccgcttaaccccaatgcgaggatgggcgcgatggtttcgactgcgcataaagataaggtgatggattttattcagaccgcagtgactcagggcggtattgtgcgcgcgggtggcgagcaacgcgaaatcgagacagtcgctaactacatcctgccgacggtgattgagattgaaagcgaaaacgttaacttatggcgtgatgaagtattcggtccggtgctcgcggtaaaagtctttgatgatgagtcggaagccatcgaactggcgaataatcatatttacgcccttgctgcgtctgtatggtcggacgacctgaatcaggcacatcgtgtggcgcgcaaactgaacgccggaacggtgtcggtcaacaccgttgatgcgctggatgtgaccgttccttttggtggcaatcagcaatcgggttttggccgcgacctgtctttacatgcctttgataaattcaccaaattaaaaaccacctggcttgaattacgttaa

SEQ ID NO: 240689 - DNA, 1647 bp, Klebsiella pneumoniae
atgaacaatagcaagacctatgactacatcattattggtggtggttccgcaggttcagtactggccgcccggcttgcagagcaggcagatctcaagatctgccttatcgaggccggtagccgtgatgaaaccccgcgtatccagacgcctgcgggcaccatcaccctgtataaaagcaaaaagttcagctggaacttttattcaacgccacaaaaaagcctggggggacggcaaatccacgtcccgcgcggcaaggcgctgggtggttcctcatccatgaacagcatgatttatattcgcggattaccttctgattatgaccgctgggaacagcaaggttgtgagggctggggctggaataatgtcctgccctggttcaaacgatcggaaaagaatctgctgtctcaggacccggcatatcatggttttaacggcgaattactggtcgataaaccgcgcgatcccaatccggtatcagcgctgtttgtcgcggcgggcaagcgggtcggattagcggagaacaccgactttaacggtaaatcgctggcgggggtcggcatttacaacgtcacgcaaaaggatggcaaacggttatcaagctatcgtgcatttttgcatccccatattgggcgcagcaatttgaccgtgatgactgactgcaccgtgcaaacgttgatcattgaagacaaagcggtcaaaggcgtgcgaataactgagcatggccgcgatcaacccacgtcaattctctgccgccatgaagtcatcctttcggccggctcgatcggctcaccgcatattctgctgaaatcaggtatcgggcctgctgccgaacttgaggccgcaggtattccgctggtgcaccctcttcccggggtgggcaaaaatcttcaggaccatctggatggtctggtcaccgtgcgttgcagaaaccctctgacgcttggtttttccctcgccgcctggaaaccgatcctgacatcccccttccagtatctctttcgtcgcaaaggttggctaaccaccaattatgttgaagccggtggctttgccgcgacaaaactcagtagcgatgaacccgatattcagttccattttgtgccgggttatcgcagccatcgtggccgtttatttgaatggggccacggctatgcgattcacacctgcgttttacgtccgcggtcgatcggcgcgttgcagttaaagcgtgatgggcagatcgctattgattttaatttcctcgccgatccttatgacgccagcgtgctggtggaagggataaaagtggcaaggaatattctggctcagccggaattcaatgcattgcgtggcgaagagatgctgccgggcaaacatatccagactgacgaacagctgcatcaatacgtcaaagaatattgcgccacggttttccatccggttggcacctgcaagatggggcgggatgaaatgagtgttgtcgcaccggacactctcaaggtatatggcgtggaaaatttgcgcgtggcagatgcatcaattatgccgacgcttatcagcggcaacaccaatgcgccttcaattatgattggcgaacgtgcggcaagcatgatcctgcaaggaacgccggtagctgagaccgagacgaataaggagaacgcttatgcataa

SEQ ID NO: 240690 - DNA, 1404 bp, Klebsiella pneumoniae
atgatgacaaacaacccaaaagataatgctgttgcaaccacaatagagttgagcaccatccagcccattcccgcgcatgaacgtcatggcaagccacgggatctttttaccatctggtttggttcaaacatcatgttgcttaccgtgattaccggtgcgctggcggtgagtattttccacttatcttttatgtgggccaccctcgccgtattgattggtaaccttgccggtgggctgtttatggcattgcattccgcgcaggggccacaattaggtgtgccgcagatggtgcaaacccgcggccagtttggttcttatggttccgtgctggtggtggcgttagtcgtcatcatgtatatcggctttctggcatcgaacctggtgctgggcggtcagtcactgcacgccatctacgcaccggtttctaccgataccggcatcctggtttctgcggtactcagcctggtcgcctgtgccttcggttataacctgattcatgcctacaccaaggtgatgtcgtgggtatccggtattattttgctcgcggcctttgcgtggattgttttcgtgcatggtctgccgactgattttctcgcacgtaatggctttaatctcagcggattcctcggtgccatttccatcgccgcgttatggcagctggcctatgcgccttatgtatccgattattcccgctacatgccaaaagatatcagcgaaaaaagtgtcttctggtgtagctacctgggatgcgtactgggttcattgttcccgatgattcttggcattctggtttctatttgcatcgtggatggtgatttaatcaccggcattgtgaatatgaccggcggattatcctccaccgtaattattgtgtttgccttaggcattgccgcgaccaatgcaatgaacctctattgcggcgtgctctgcaccctgacgctcggccagacattcctgcctaaatggtcgccactttctggcgcccgcattgtggtttcgattgtcaccatccttatcgaagtgctgattgcgatttatggtcaggaaaactttctggtcaattacaccaactttattctgatgctgctgtatgtgctggtgccgtggacggcaattaacctggttgattactatctggtggcccacggtaattatgatgtcgcttcattcttccgtcgcgacggtggcatatacggttacttcaattcaaaagccattttctgttatctgctgggcatcatcgtcgagattccctttatgtctaccgccatctataccggcccggcagcaaatatgttaggtggtgccgacatctcctggattattggtttagccatcgtctcacctgtttattatttcctctgccgtactcaggcagtggcgcaaacctctgttgctaaataa

SEQ ID NO: 240691 - DNA, 1269 bp, Klebsiella pneumoniae
atgacatcattaaaaactgaaacagatacgctgattattggcgcgggtcaggcgggggttgccatgagcgaacacctgacgcgtctgggcattccgcatctggtagtggagaaaaatcggattgccgaatcctggcgtagtcgtcgctgggattcgctggttgccaacggtccggcctggcatgaccgctttccggggatggagtttcccggctgctcacctgacagcttcgtggcgaaagaacaggttgccgattattttgtcagctacgccgccatgaaccagtcaccgattcatactggcgtcgaagtgttaagcgctgaacgcaatcaggggcgcagtggtttcaccgtcaccacctccgcaggcgtgatcaatgtgcagcgtatcgtggccgctaccggtcctttccagcgtccggtcatcccggcgattgctcctcagcatagccaggtacaacagctgcactcggcagactataaaaatccgcagcagctgccgcaggggggcgtgctggtggttggtgccggttcttccggcgtgcagattgctgatgagctgcaacgtgccggtaagcccgtatggctgtcggtgggaccgcacgatcgtccaccacgttcctaccgtggccgggacttctgctggtggcttggggtactcggtctgtgggatgccgcagccagccagccgggcaaagagcatgtcaccatcgccgtcagtggcgcacgcggtgggcataccgtcgatttccgtcgtctggcggcgcagggcgttaacctcgttggcctgactgaaagtttcaccgctaacaccgtacgttttcaggatgacctggcggtgaatattgcgcgcggcgatgctaattatctcgcattgctggatgctgctgacgcgtatatcgaccgtaacggtcttgatttaccgcctgaaccgcaagcacgtgagttcctgccagaccccgcctgcgtaacccatccgcagctgtcacttaatctggccgaagctggcatcaccagcattatctgggcgacgggctacgtggccgattacagctggctgaaggttaatgcctttaatgaccagggcagaccgcagcatcatcgtggtgtttccagcgagcctggcgtctattttctcggcttgccgtggttgtcacgtcgtggttccacctttatctggggcgtctggcacgatgccaaatttattgctgaccagatcgctatccagcgccagtaccagcattaccgcgctccctctgactcgctttaa

SEQ ID NO: 240692 - DNA, 426 bp, Klebsiella pneumoniae
atgcctactcatcaacgtattcgtatgttcaacaccaaagaaacctatccgaatcagacgctggacaacgatctctgccaggcggtacgcgctggtaataccgtctacgtgcgcggccaggtcggtaccgattttgcaggcaatctggtcgggctgggcgatccccgcgctcaaaccgaacaggcgatgaaaaacctcaaacagctgctggaagaagccggtagcgacctgagccatatcgtgaaaaccaccacctatcttaccgatccacgctatcgcgagccggtttaccaggaagtgggcaaatggctgaaaggggtgtttccgatttcaactggtctggtggtttcggcgctggcacagccgcagtggctgatggaaattgatgtgattgcggtgatcccggatgactgggaggcgaaatga

SEQ ID NO: 240693 - DNA, 675 bp, Klebsiella pneumoniae
atgacgctttcgattgccgcacgctgtgcggagtccggccaactcggtatcgccattagctcgtcgagcattgccgtcggcgcgcgttgcccgtggctggtggccggagtgggggcggtatccagccagaacattacattaccggcactggggcagcagattctggcgcggctggaggcggggttagcgccggaacaggcactgaaaagcgcgctggcagaagatcgctttagcgagtatcgccaggtgactgtcattgacgccagcggtcgcagcgccgcctttagcggtgacaagacgctgggtatttatcatgtggtgcagggcaaagaatgcgtggccgcaggcaatatgctggcggagcaagcggtgatcgccgcaatggtgacggcttttgaagccaccaccggtgaactcaccagtcgtctgattacggcgttgcaggcggggatcgacgctggtggtgaggcggggccggtgcattctgctgccgtgaaagtagtcgatgattacacctggccgctggtggacctgcgcgtcgattgggcagaagaaaacccattggcagagctgcacaagttgtggctggcgtatgaaccgcagatgcaggcttacgtcacccgggcactggatccacgcgatgccccgagctatggcgtacccggcgatgagtaa

SEQ ID NO: 240694 - DNA, 1188 bp, Klebsiella pneumoniae
atgccccgagctatggcgtacccggcgatgagtaacgcggtacgcgacatcctcgcggcactgctggcgtttgataccaccagccgcgaatccaatctggcgttgattgcctggattgaagattttctggcgcaacggggtatcgcgtcgcaacgcatcatggatgacagcgggcgcaaagccaatctgtatgcccggctgggaccgggcggtgacggcggggtgatgttgtccggtcataccgatgtggtgccggtcgatggtcagcaatggacgctgccgccgtttgccctgacacaacaggaagggcgctactatggccgtggcagtgccgacatgaagggctttctggcctgcgtgctggcatcgctggataactttctgacccagccgttgcgcctgccgctgcatctggctttttcctatgatgaggaagtgggctgcctcggggtgcgcagcatggtggactatctgcgcgcgtctgcggaaaaacccgccatgtgtatcatcggcgagccgacagaaatgcgcccggtgtatggacacaaaggcaaggtggcgatgcgttgtcaggtgcatggccgcgcctgtcactcggcctatgcaccctctggcgtcaatgccatcgaatacgcggccaggcttatcaaccagctgggcgcagcggcgcagcaactgaagcagatcgaggatgcgcgttttgatcccccctatagcacgctccagaccggtatgattcagggcggcagcgcgctgaacatcgtgccgcaggattgtcagtttgattttgaaatccgctatctgccgggcgctaatgttcagggtgtgatgaccgaggtcgagctgttctcgcaacagcaattgttaccgcaaatgcaggcggtggcagccgagagcgcgatccgttttcagccgctgagctactatcctagcctgctcaccgatccgcaatcgcaattcgcgcagtggctggcgcaatggagtggcagcaatgatttctcaaccgtggcgtttggcaccgaagggggattgtttgatgaagcggggattgccaccctgatttgcgggccaggcagcatggcgcaggggcataagccggatgagtttattgctattgaacaagtagaacactgcatgagtatgctggtaaatttatgtaaatggatgcgtacagttcctttaaaatga

SEQ ID NO: 240695 - DNA, 330 bp, Klebsiella pneumoniae
atgcaaaaccgtggcgttgaagttatcctgatcgattgcgtggacggactgaccggcttccctgaggcgattaacagcatttatccacagactgaagtgcaactgtgcgttattcatcagatacgcaactcgatcaaagacgtggcatcgaagtatcacaaagcgtttatggccgatctgaagccagtgtaccgggctgtgtcaaagaggccgcagagacggcactggatcaactggagtcagcagtatccggtggtgctcctgtcgtggcgtcgtaaatgggaaaaactgtcagcgtacctgccttacccaagcatcatatccatctga

SEQ ID NO: 240696 - DNA, 531 bp, Klebsiella pneumoniae
atgacggccttcgaggcagagcttgcccttgtgacccgcatgatgaatcgtcaggttaggcaacatttccgggagcaggcccgcctgctgaccagcgtcaatggcgtggcggacatcactgccgccaccctgctggccgaaccgccggagctgggcaccctgcccagcagggaaatcagcgcgcttgtcggtgtcgcccccgtttacagggactcaggaaaaatgcggggaagacgaactatttttggcggaagggcgggcgtagggtgcacgctttacatggcggtgataaccgccattcagtttaacccggcaatcaggggcttttatgtcaggttagttgaagccggaaaggcgaaaaaggtggcgctggttgcctgcatgcttaaactcctgatcgtcctgaacgccatggtcaaaagggggcacactgtgaggatgatttcatgccactccgacaatttagtgactaatgaaactcagttcagctctgagactgatgtcattagagctttttttatgccatcataa

SEQ ID NO: 240697 - DNA, 342 bp, Klebsiella pneumoniae
atgcaccagaaaggccgattttttgcatcagaaacgcttaactatgcattttttagccaaaaaactggctacttttgcactgaaatgatccacagcgcgtttagatgcacccttttggggcatggatacgaacctggcggcaggcccaccccattgtgcgggcctgcagcagtcttagtcgccgtacacgttaaaatcgaagtatttcttcgccattttgtcgtaggtgccgtctttacgcatttcgcccagcgctttatcaaacgcggctttcagctcggcgtcgtccttacgcaggccgataccggtgccgtcgccaaagtactttttgtctttaactga

SEQ ID NO: 240698 - DNA, 570 bp, Klebsiella pneumoniae
gtgaaacgactgattattggcatttccggcgccagcggcgccatttacggcgtgcggatgctgcaggtgctaagagatgtgccggatattgaaactcatctcatcctcagccaggcggcgcgccagacgttggccatggagaccgattactccgtacgtgaggtgcaggcgttagccgatgtggtgcatgacgcccgcgatatcgccgccagtatctcttccggttcgtttaaaaccgccgggatggtgattttaccctgctcaatgaagacgctctcgggcattgtccatagctatacggatggcctgctgacccgggcggcggatgtcgtgctgaaagagcgtcgtccgctggtgctctgcgtgcgggaaacgccgttccatttgggccatctgcgtctgctggttcaggccgcagagctgggggcggtgataatgccgcctgtaccggctttttaccaccggccacaaagcctggacgatgtcatcaaccagaccgtcaatcgggtactcgatcaatttgatatttgtctggagcacgacttgtttacccgctggcagggggcctag

SEQ ID NO: 240699 - DNA, 2400 bp, Klebsiella pneumoniae
atggaaaggtttcttcttaactcaacagtactgttgcataggctgagcacagtctctttggatgaggtatcacttgatgagagggtggagtcatctgtgttccttgctcaatacgaacaggtgcgtagtttgcctgatcatgtagctaaatcggcttggtcatctttagtgcagcaaatcaaacagcgtaatatgaaactcggcccagtagcaaccttacgccagatagctgaaaagtttattaaaaacgagaaaggcggccccaaaatcgatctacctatgttctcggaatggcaaactctgatgagccgagtgtcgtgcctaccaattatggcgtgtcatcaggtatttaaccctgggactgccagtcaggaatatagctttcgctggcctttatacccatatcacccaacggttgaagactacattacccgtgaatacctacacgaaactcaccaacacctgaatggcagtaccagtgcagaagagtgttggctggatgcactcaagcaccctgaagtgagcgtcagagatttcgagaagggctgggcatctcaagagatgaaacaactctgcgcccagattgacccctctctgacgcctgaaatcttcaaggagcgtttgcaaatcgcctgtaatattcgcgaaattctttgtcgggttgctcaggacgtggagttgccagaatggatagcatcgatgcagtatccgcagcagttggcggatagcaccattctgcataatggccaggagtatgggtttgcgacggtttggccaactgacgacaaatacagtcaggagtctgaattttgctggctaaccgggttgttggaaaaatggcggtataatgcgcccgaaggtttagaacgactgctttggatttacctgctgattcaaaatcagtacttgaccttactggttcagcgagacgattttttcggttttgatcagttccagaattacaccatgacggagttgagggaggaaacagagaaatcttatttgtctcgttttaaacatgcccatggtgctggtgtgtattctcaggtgcgttatctggaaggacgttttgctccgaagagcgaccctagaaaaatgcaaaaactgctcttcagtgtgttaagaggatattgggaatatctgagtgctcatatgtctctggaatggatgcatgagaagccgctgactatgtcgcaagtgctagataacctcgaactggttgaacctcatggcaagtgtgcagaactggcgctagtgccgcactttatcaaaagaaagccaaaaaatggtgaggtctatccttacgcattactattcaaagacctgaaaaatcaggcagctattctgatggacatgctgaagtctgaaccgcgcctgacaggctggattcgaggagtggatgccgcagctaatgagatgcacgcgccaccggagttgtttggccccttgttccgggtgctagccaaatcaggtattgctcattttacctatcatgttggcgaggactttccgcatctgatcagtggtattcgatccattgatgatgccttgagatttttgccattgcgtaatggcgaccgtcttggtcactgcacggcgattggcatcacacctaatatctggaaacgctctttgccattgtctttgtccatgaccaaagagacgagattgctcgatttggtgtttatctggcgggaacttcgaagtcatccggaactgctgcgttacgccagtgatgcagcgattgaagcagttcgcttggcccataaagtgttttcgctggaagaagaagtctcgattatcacccttgatcaggtatttgaaatgcgggggctgttggcggaatctgaaggtctgctgggtgaactaaatgggccattaaaacccaaatccctctggttggaagagtacgagcgcgccagagagttggttaaaacgacgggtatgaaaaggccgctgaagttgtataagcaatggcttacatcggacaatgtgcgaaagcagcgtgctgaatatgttgaagttgccctggaatatttgccggatgaagcggttgttgcattacaacaagctgtaatggcaaaaatggcagaccgaaacattgcgatagaatgccctccgaccagcaatacccgtatcagtcagtatcgagatgtcagcgagcatcatatctttcgctggatgggcttgccgggtgaggcgattgaaggtgatgttcctatgtctatttgtcttggatctgatgatccagggatctttgccgcagatttgaaatccgagttctatcatcttttcattgtgttaacccgaaatttcggtttgtcgccagcggaggctttgggaaaggtagcagaggtgaatgagaatgggcggatttatcgctttcatgatgttagctag

SEQ ID NO: 240700 - DNA, 2844 bp, Klebsiella pneumoniae
atgacagacagcgtacagactgaaacaactgagggaaaaatcatcatcaacttgtttgctcccaatcttcccggaagtaccaaagaagatgatctcattcaaaaatctctgcgtgatcagttggtcgagagtatccgaaactcggttacccttcctgacaccgataagtctgctgggctaacacggtttattgatgagtccggtcgtaatgtattttttgtggatggtactcgcggtgcgggtaaaaccacttttatcaatagtgtggtcaaatctctaaacagtgaccaaggtgatgtaaaagtcagcatcaagtgtttgccgaccatcgaccctaccaagttgccgcgtcatgaaccaattttggtcactgtgactgcccgtctgaataaaatggtgtccgacaagttaaaaggatgctgggcgtcgaatgactataaaaaacaaaaagaacaatggcagaatcaccttgcgcagctccagcgtggtttacatctgctcacagacaaggaatataagccggaatatttcagtgatgctttgaagctggatgcccagcttgattactccattggtggccaggatttgtcagaaatctttgaggagctggttaaacgtgcgtgtgaaattctcggctgcaaggccattttgatcacctttgatgatattgatactcagtttgacgcgggttgggatgtacttgaatctattcgtaaattctttaacagccggaaattggtggtggtggcgacgggtgacttgcgcctatactcccaattgattcgcggtaaacaatacgaaaattacagcaaaactttgctcgatcaggaaaaagagagcgcccgcttagcagagcgaggctatatggttgaacacctcgaacagcaatatttattaaaactttttccggtacaaaagcgtattcaactgaaaaccatgttgcaactggtcggcgaaaagggaaaagtcggtaaagagaagatcaaggttaaaaccgagcctggcatgcaggatattgatgccatagatgttcggcaagcgattggcgatgctgttagggaaggccttaatttgagagagggctctgatgctgacatgtatgtgaatgaactgctgaagcagccagtacggttgttgatgcaggtgcttcaggatttctatatcaaaaaatatcatgctacatcggtaaagcttgatggtaaacaaagcagaaatgaaaggcctgatgagttatcagttccgaatttacttagaaatgccttatatggttcgatgctaagcagcatttatcgtgcaggattaaattatgaacagcatcggtttggtatggattcgctctgtaaggacatttttacctatgtaaagcaggatcgtgattttaataccggattttatttgcggcctcagtctgaaagtgaagcattaagaaattgctctatttacttagcgtctcaggtaagtgaaaactgtcagggcagtctctcaaagttcctacagatgcttttggttggttgtggttctgtcagcatattcaaccaatttgtaaccgagttagcacaggctgaaaatgatagagaaaaattcgaacagcttgttagtgaatatgtagcttatatgtctgttggcagaattgaaagcgcctcacattgggctaatcggtgttgtgcggtggtagcaaacaaccctaatgatgaaaagattggtgtttttcttggcatggtgcagttaaatcgtaaatcacgccaaaacatgcctgagggttacaaaaaatttaacattgatactgagaatggcttggcaaaagccgcaatggcggcttccttaagtacggtagcttcaaataaccttatggatttcagtagtgtttttaatctgattggtgctatagcagatatctctgcatgccgtcgtgaaaggcctgccattactaatgcttttaataaagttatagctcagacaacatgtattgttcccccatggagcgaggctgctgctcgtgcagaaatgaaaggctcaagtaaaagtgcggataacgatgctgctgttttggatgttgaccttgatcccaaggatgatggcgtaactgatgaaagtcagcaggatgacgcaacggaattttctgatgccattactaaagttgagcaatggcttaaaaaagtaaacaaaattgagattgaaattcgtccgtcggcacttttgattggtaaagtatggagtcggttctatttcaaccttaataatgtggctgatcagcataaaaccagactctataatgatgcagagcatggacgaatggccagtcaatcaaatgctgcgaaaattatgcgttttaatgttttagcttttcttcatgcggtattggttgaagagagcttatatcattcggttagtgatagggaatatatcggtgaggggttgagactaaatccagttacttcggttgatgagtttgagaaaaagataaaagtaattagtgaagaattgaaaacggataagaaaacatggaaagatacccacccattgtttttcttattaattagctgtccaattctacatccgttcatttttcctgttggaggggttaattgttcagccaaagcactgagcaaggaagcaagtttcaatgaactgattggtgaaattgttggcgacaaattactttctgataaagaatgggactatttgtctaaaaatggtaatcgagaaataaacattaaacaacagatgtctcaaaacactataacatcgctgaattcctccacaatcgtcggagcatcatacgataaggctacgccagctaggaaaaccaagtcgtcttcattaagtgacggcgaagaaaaatga

SEQ ID NO: 240701 - DNA, 219 bp, Klebsiella pneumoniae; identical to SEQ ID NO: 121053

SEQ ID NO: 240702 - DNA, 8583 bp, Klebsiella pneumoniae
atgaaaatgatccccagagcgtggtttaaccgctcccgtattccgaagaatgctgccgaaaacataacgttttcggcgaacgatcctgccggtgaaagctcgccgcggtcagaactcttttcgaccgtccagatggaacgctacggccagaagctggcgcgaactcataaagtatcaccggataggcatccttattatcttctgaaacggcttggcgacaatgaggccgtcattacccaaaactgctatgagcttaacgcgggtaaaaagaccagtatcatgcccgccggtgaatggctgctggacaattattatctgattgaggaacaaatccgcactgtccgccagcatctgccgaaaagctttggcaaaggtcttccgtcgcttgtatcgccgttgaattgcccacgaatttatcatattgcatcagaggccattgctcacggcgatggccgctgggatgccgccagcctgaccagctatctcactgcctatcaacaggtgacgccgctgacgctgggtgaagtctgggcgttaccgggaatgctgcgccttgcgctgattgaaaatcttcgtcgtatcagtatggaagtgataaaagcgcagcaggacagaaaccttgctgatacgtggataacaaggattgtcgaatgcgcagagagtgcgcctggtgatttaatcatggtggttgccgatatggcgcgctcccgacctccgttaaccagtgcgtttgtcgcagagctggtgcggcgcctgcaggggcatggcaacgcgctgtcgttacctctgacctgggttgatcagtgccttcgggaacaggggatcaccactgacgttctcatacatagtttcaatcagcagcttgccgccagccagctgtccgtcagtaacagcatcgcgggcctgcgtttattgagtgaaacggactgggctgatttcgccgaaacgataagcgttgtcgaacaggcattacgcaatgatcctgccggcatctatccccggatgcacttcaatacccgggatcattaccggcacgtagttgaggttctggccagggacagcggtctcagcgagcctgaggttgctgagaaggtgctggcgctttcagaggaaaaagcgcccgatacaccggaacatcatgttggttattatcttgcgggcgaaggtcgacaggcgctggatattcatctcctggcagacgcctcaaggctcatacgcttgcggcacagtttcaacagaataaccctgctgtcatggcttggaagcctggcgttgctgacaaccgcagcgaccgcagcaatattgcacgaaaccgccatgcagggcgcagactggctattgatcgcggtgatattacctctgattatcgcattaactcagttaatgagcgatttgctcagtgatgcaaccacccgttttcgcgttcctcgacccttaccggggatggatttttcagccggtattcccgctgacagtgccaccatgttagtcattccctgcatgttgaccagccacgaaagtttcagccagctcctcaccagtcttgaagtctgctggttggggaatgaaaacgaaaatctcaggttcgcgctgctcactgattttgctgattctgaaaatgaaccctcgccggaaagtcacgcgctgctcagacaggctatcgccgatacgcaggcgcttaatcgccgctacccctccggccgaccacgtttttatctgttacatcgccagcctgaatggaacccctcggaaggagcgtggatgggctatgaacgcaagcggggaaaactggcgttactgaacagctggttgcgccatcccggaacgcaattcgtcagcgttgcagagatgcctgcccaccttttaccgggtcacataaaatacgtcattaccctggacagcgatacggtgctcccgcgcgatacggcacacaaactcgtcgcgacgatggcgcatccgctgaatacgcctgagtatgatccggtacgccagagggttgtcaaaggattcggtattttacagcccggtcttgcggaggagataccacgcaacggtcaggggcgttacgcagccctgcgcagcagcgtaccgggcaataacccttattcgatgatgtcttcggatatttatcaggatctctttggggaaggctcgtttgtgggcaaagggatttacgatgttgatatttttatgcaggccactaccaacatctgcccggaaaatctggtactcagccacgatctgcttgaaggatgctatgcacgttcgggtctgctgagcgaggtgttactgtacgaacagtaccctaataattatctgtcggatgttgcacgacgttcacgctggatccggggtgactggcaactgcttaactggctaaaaccacgcgtcagaaaagccgatggaacccgggtcaggaatccgctgaccgcgctttcttactggaaattactcgataatctacgtcgcagtctggtcgccccctccttactgatattgctgttcttcgctctgctttgggtacccaacccggtttactggctgggcatactgttgctgatatggctgttgccagccatcctctgcattagccacgaccttctgcataaacctctgcgtcgccgcgtgaagccgcatctgttaatggtgggggcgggcgcgctaaagcgtctgtcaggtatcagccttaattttgcgatactgccgcacgaagccggatattcgctgaaagcgatcgccgtgacgctatggcgactggggataagcaggcgtcacctcagccagtgggtcagccacagccaggacagcagtcaggccagacccactgttgcacgtttttatcaggcgatgtggctgaacgttgccggtggcgtggcgctgacaatactgaccggacaatttgccccacagctgctggggattgcgttaccgatcggtttggtatggtgtgtggcaccgctgctgatgagctggctgagtcgccagcccgtgcgtaaggttttttcgcctaatcaggaacaaaaacagctgttacgccagacaagccgtgaaatctgggctttttttgaaacatttgccacagcaaaagagaactggcttccgcctgataattatcaggaaataccacaaccgacggtggcacaccgaacttctcctaccaatattggtctttcacttatggctaacctgacggcatgggactttggctacctgcccggcggagaggtgctccggcgcgtgtcgctcacgctcgacacgatggataaaatggagcactaccggggccatctctacaactggtatgacacccgtacgctggcccccctaagtccacgctatatctccagcgtcgacagcggcaatatggccgggcatttattgaccctgcgtgcaggcctgtccgccatgcgtcatcagcctgttttaagcaaccaacagatactggcaggactgaacgatacgctggatattctggaaaaacagtggggtaagaacccacctgacagcctgagactgctgcgcaagcattgcctgaacgcggtgtcgctctctccgcaggcgcttttcagcgaactgaaaagcatgcgcacccagtgcaaccatctgaccagcgcatgtcatcagggatctcctcttcagatgcgctgggctggacatctggagcatcaactggttcagctttgccatgagtggtctctgttgcttggctggttgcctgcatcctggaatgaacagacgctgccgacgctgagcgagcttgcccgtccgacattaaccggtacaggaacgcctccggcgtcagtggcggagcaggcccgaatgcgactcaatattatcaccgagctggaacagcggctggatgagcatgcccggatggatttcgcctttctgtacagtgaagcaaccagtctgctcagcgtcggttataactgtgacaccaatatgcctgacaaaagccactacgatctcctgccgtctgaaatccgcctgaccagttttcttgccattgcgactaatcagctgcctcttaaaagctggtacgcgctgggtcgattgtttaccacgattgataatgaaactgccctgatgtcatggagcggatcgatgtttgaatatctgatgccgaatctggtgatgcccacctggcccggcagcctgctcgatgaaatgagtcagtcggcggttatgcgccagattcactgggggaaagaacgcggggtaccatggggtgtttcagagtctggctatcatgcttttgatgttcagcataattatcagtatcaggcatttggcgtaccggggctcggtctacgcagggggcttgccgatgacatggttgtcgctccttacgccacgctgctggcgctgatggtttccccgcagaaagcctgtgagaacctgttcaggctgcaaaaaaatggtgcatgcggagaatacggtttttatgaagcgctggactataccccctcacgtcttgcaaccggtcagctctatgcggtggtacagtcctggatggcgcatcaccagggtatggcatttcaggcgctggctcatgtgctgcttgatgcccccatgactgaacgctttatgtccagtacggtattccggtcagcgagtctgctgttacaggagcgcgtgccggatgcggtcgatctgtacagtccgcgccgtcattttgaatctcatgagggcatggtcaaacccgttcgctatgaaccccgtattttctatagcgtggatacccccgccccggatattcaactcctgtccaacggccattatcatctgatgttgaccgcgggcggcggcggttacagtcgctggaatgatattgcactaacgcgctggcgcagtgataccacccgtgataactggggagcattctgctacatccgcgatacccagacgggagatgtgtggagcaatacctggcaaccaacaggctacaccagcggacaagacgaggaagtgttgttcaccgatgcgggggcagaattcagacgcagcttagggggactcagcgtcaaaactcaggtggtgatctctccggaggatgatgttgaattgcgacggctcacactgattcatcgtggtcgcaagcctcgctctctggagctgacaacctatgctgaagtggtactggcacctgatgccagcgatctggcacacccggcattcagcaatttgtttattcagactgagctggctcctgagcgtgacgctattctttgccaccggcgcccgcgctcaccgaatgaaccgggcccttgcctgtttcacatgatggtggtgcacggcgataaccgacataacgtgtcgtttgaaacggacagggcaaggtttattggacgtggcagaaaccctgcgaatgcacaggcaatagagacgggagggatgctaggcaacacgtcgggctcggtgctggatccgatactggcaattcgcaacgccattattctgcagccggggcagccggttacgattgatatcatttatggcatcagcgagacccgtcagcagagcctggcgttgctggagaaatatcgcgattaccctatcgccgatcgcgtctttgaactggcctggtctcacagtctggtggtattgcgccagatgaacgccagtgaagatgatgccacgttgttcaatagtctcgccagcgctgtgctttaccctgtccaggagctgcgcgccgaaggccaggcgatcggccgcaaccggcgtggccagtccggactgtggggctgggcaatttcaggggatctgccgatagtgctgctgagtataaccagcgaggaaagtatcacctcagtgaccacactgattcaggcacaccgttactggagacagaaagggctggatgttgatttagttatcctgaataacagccccggcggctaccagcagggattacaaaatcaggttatggagttaatttatgccgggtctgaagccagtctactggataaaaaaggcgggctttttgtccgcaacggtgagcatctctccgctgaggataagttgcttttgatgagcgtggcctgtctttatattgatgaccgcgcagggggtattaatgagcagcttaaccagcgtattcataccctgaaatcgccggcaagggcattcattccgcgtgctgtgcgcgagcgtaatcaacatacggactggagccctgataccagtcagttatgccatttcaacggatacggtggattttctcaggatgggcgggagtatcagatcgtccttcgggaaaatgcgcttacaccggctccctggtcgaacatactggcaaattctcgttttggcagtgtgatctcagaggcagggcaggcctatacctggtatgagaatgcccatgaataccggttgacgccgtgggagaacgatccggtgagcgatcgcagcggcgaggcattttacctgcgcgatgaagagagcggggagtgctggtcgccgacggctttacctgttcgcggacacggtgattacctgacccgccatggttttggctacagcgtttttgcccatcgtgagagtggtatagacagcgagttgacggtcctggttgctgaagaagatccggttaaactggtgctcctgacgctcagtaactcttcgggacggacacgtcaactttccgtcacaggctatgtagagtggacgctcggagaaacacgaacgcgctcagcccctcacattgtgacacatgtggccagaacgcccggcggctgcgggatacttgcgaataacttttatggtgataatggtggcggccgaactgcattttttgccgtcagcggtaatgactgttctctgacaggggaccgccgggagtttattggccgtaatggttcccttcacgccccttcggctatgaaactgcaaaagctttctggtaagacgggggccggtctggatccctgcggagcggtgcaatcggcggttacattaattgacggggaccagaggacgtttatttttatcctcggtgcagaggagaatgatgtttgtgctcaggagacgctggcccgctacatgaacgaggatacggtccgccaggagctgaaccggattcataatcactggcacaatgttctcgataaaatcgtagttaacacccccgacacgtccgtaaatttactggttaatggctggctgttgtatcagacggtcgcctgccgtcttatggcccggagtggctactatcagtctggcggtgcatttggttttcgcgatcagctgcaggatacgctggctctgagccacgctgctccggaccggatgcgtgaacagataatactctgtgcatcacggcagtttatcgagggggatgtgcagcactggtggcacccgcctcacggcaacggtgtgcgtacccgctgttccgatgactatctttggctgccgcttgctgtttgccactatgttgaaacgacgggggatatggatgcactggaaatacgcattccttatctggagggacgctcgcttcagcctggtgaagagtctgtctatgacacgccggtcatcagcggcaccgaagagacactctggttacactgcgtcaaagctattcactatggactttgcttcggggagcatggcctgccgctgatgggggctggtgactggaatgacgggatgaaccgggtgggtatcgaaggcaaaggtgaaagcgtctggctgggcttcttcctgtacgacattttgcagcggtttgcagcgctggcggagcgcaggctggatgaaagcgtcgccgcgatgtgccgttcacaggctctgcgcctgcaaagtaatctcgaagcccacgcctgggatggggaatggtaccggcgcgggtattttgacgatggtactcccctgggatcgaaaacctcacaggactgccggattgatgcgattgcgcagagctggtctgtattgtccggcgccgcgagcccgggacggtgcgcaaaggccatgcaggcgctggataagcaccttgtggataacgaaggagggctgatcaaactgttaacgcctcctttcgacggacacggtccaaatccgggctacatacaggggtacctgcccggcgtgcgggaaaacggagggcagtatacgcatggcgccatctgggcagtgatggcctttgcccgaatggggaatgccggacgagcctggcaactctggtcaatgctcaaccctataaatcataccctgaatgcggactctgtcgggatttataaagctgagccttatgtcatgagtgctgatgtctacagcgtcgctccccataccggacgtgcagggtggagctggtataccggttccgcaggctgggcctggcgtttacttaccgaggaattactggggataaaacgttccggcactgactttagtgttcatgccaggttaccggatgagtggtcgtctttttctatggcatatcaatatggtgaaagccattatcagattagtgtttcacgcggcgatgcagaatattgcgtgacgctggatggtgttctcctccctgatgacagaataccgctgaaggatgatggacaaaaccatacggttgagatcattcagaactga

SEQ ID NO: 240703 - DNA, 189 bp, Klebsiella pneumoniae; identical to SEQ ID NO: 121050

SEQ ID NO: 240704 - DNA, 528 bp, Klebsiella pneumoniae
atgaatgagcatgcggttctgaaattgcttaatgagctgaatatatcttttcagtacatatcacatccggaagtgaagacggtcactgaccatgcgagttttgctgcagattttccggcacagctgctgaagaacctgttgctgaaaaatagctctggtaagtatttttacttgtatattctggatggcaataaaaaggcagatcttcgcgagctagcgctccagcttaatgaatcgcgtttgtctttcgctaaaccatacgagttaatagaaatactcggtgtggaacctggcggggttacgcctttcgctattgcacataacaaggagagggatatccgaattgttatcgattcttctgtatcagcgagtcgttcactgggctttcatcctctgatcaacaccgcttcggtttgtatttctaaaaaagacttattgcggctactgacatttttcggttattcccctgttgatgttcagaccgatagcgtgctcttgctactcgcgcgaataacggatgcgttctaa

SEQ ID NO: 240705 - DNA, 1389 bp, Klebsiella pneumoniae
atgtctggaggtcttgttactgcggcttacattattgccgcgctgttgtttatttttagccttgcaggcttatcgaagcatgagacgtcgcgagcagggatcgttttcggcatcgccgggatggcaattgcgctggcggcgactatcctcggtccccaggcagccaatcttgcatggatcctggtagcgatgatggcaggtggtggcatcggtatctttctcgcgcagcgggtggaaatgaccgaaatgccggagctggtggcgattctgcacagctttgtcggcctcgcggctgtgctggtgggtattaatagctaccttgaccacgcgccgctcgatgacacggccatgaaggttatccatcttgtggaggtctttttggggatcttcattggagccataacctttaccggttcggtagtggcgttcggtaagctgcgcgggatctttgcgtcaaaaccgctaatgttgccaggccgacacggtatgaatctcgcggctctgctggtctcttttaccttaatgatcgtattcgtgtgcagcaataacctgctgtggcagagtctggcattaagtgttatgacgctaattgcactggcgtttggctggcatcttgttgcttcaatcggcggcgcagatatgccggtggttgtctcaatgctcaactcctattccggctgggcagcggcggcggcaggttttatgctcagtaacgacctgctaatcgtgaccggtgcgctggttggctcttcaggggccatcctttcttacattatgtgtaaggccatgaatcgcgcgtttatcagcgtcatcgccggcggctttggcagcgagggtgcggcatctgacggtagtgccccacagggcgaacatcgtgaatgcagcgctgcggaggtagcggaagcgctgaaaaacgcccgttcagtcattattacccccggctacgggctggcagtagcccaggcgcaatatcctgtacaggaattaaccagtcggctgattgcgctaggcgtaaaggtacgattcggtatccatccagtagccgggcgtttaccgggacatatgaacgtgctgctggcggaagcaaaagtctcctacgatatagtgctggagatggaagagattaatgacgacttcagtgctaccgacgtggtgctggtcatcggcgccaatgacaccgttaaccctgctgcacaggaagatcccggaagccccatcgcaggcatgccggtactggaagtgtggaaagcacagcaggtggtggtgttcaaacgttcgatgaatactggctacgcaggcgtacagaaccccctgttctttaaagaaaacaccaccatgctgtttggcgatgcaaaagcgagcgtagaggcgatacttgcgcagctctaa

SEQ ID NO: 240706 - DNA, 1527 bp, Klebsiella pneumoniae
atgaatatttcgattccccgggaacagctggcgggtgagacgcgggtcgccgccacacccgctaccgttgaacagatgctgaagctgggctttacgatctccatcgcccgcggcgcgggtgcagcggcaaatattactgatgatgcatggcagaccgcaggtgcaacgctgtgttcgcaggatgaggtctggcagagcgatattatcctgaaagttaatgcgcctcttgcggatgaaattcctcttttgcgcccaggctgcacgttaatcagtttcatctggcctgcacagaaccccgagctaatggcgaaactcgccgcccgcggggtgacggtgatggcaatggatgccgtaccgcgcatttctcgtgcccagtcgctggacgccttaagctcaatggctaatattgccggatacagggcagtagtggaagctgctcaccagtttggtcgtttctttactggacagatcaccgctgccggtaaagttccaccggcgaaagtgctggtcattggcgcaggcgttgccgggctgtcggcaattggcgccgccagcagcctcggcgccattgtacgcgccttcgatacccgcccggaagtcaaagaacagatccaaagcatgggcgcggagtttctggaacttaattttgaagaacagagtggcagcggggatggttatgcccgtcagatgtctgccgagtttattgaggcagaaatggccctgttcgccgctcaggccagagaggtcgatattattatcactaccgcactcattcccgggaaacctgcgccgcggcttatcacccgcgagatggtcgccagcatgaaacccggcagcgttatcgtcgaccttgccgctcagaccggcggcaactgtgagctgacggtacagggcaaatgtatcaccagcgatgatggcgtaaagatcatcggctataccgacctgccagcacggctggcggcccagtcatcccagctttacggcaccaatttggtcaatctgctgaagcttttgtgtaaagaaaaagacggcaatatcgtcatcgattttaatgatgtcgttatccgcggcgtaactgtggttcgggagggggaaatcacctggcctgcgccgccaattcaggtttcggcccagccgcagcagcctaagaccgtaccaaccgagacggtaaaaaacgcacccgcttcaccgtggcgtccatacctttttctggcgctggttattgcactatttggctggcttgcgcatcgcgcaccggcggacttccttgcccattttaccgtctttgccctctcgtgcgtggtgggctattacgtggtgtggaacgtcaatcactccctgcatacgccgttgatgtcggtcaccaatgcggtatcggggatcattatcgtcggcgcggtcctgcaaatcggccttggaggctggatctccgtactggcttttatcgccgtttttatcgccagcattaatatcttcggcggtttttacgttacccgtcgcatgctgaaaatgttccgcagaaactaa

SEQ ID NO: 240707 - DNA, 861 bp, Klebsiella pneumoniae; identical to SEQ ID NO: 195618

SEQ ID NO: 240708 - DNA, 1185 bp, Klebsiella pneumoniae
atgagtacaaaagatgttgtcattgtcagcgccgcccgtacgcccatcggctgctttggcggcgcgctaaaggatctctcggctatccaactgggcgagcatgcaatcaccgccgctatcgctcgcgccgctatcaaaccggacgatgttgacgaagtgattatgggcaacgtactgggggcagggctaggtcagaacgtcgctcgtcaggtcgctatcgccgccgggatcccggtagaaaaaagcgcctttaacgtcagcaaagtatgcggttccgggctcaaggcgaccattctaggcgcacaggccatcgcgctgggcgatgcggaaatcgtggtggctggtgggacggaaagtatgagcaacgccatgtacttatccgccgcggcccgctggggacagcgcatgggcgacagtgcgctgattgacagcctgattagcgacggtctgaccgatgccttttccggtgagcatatggggatcaccgccgaaaacctggcgcaaaaataccagctcacccgggaagagctggacgcctatgcggcggaaagccagcaacgcactgaatgggcgcagaaaaacggtcgtttcgacaacgaaatcgtgccgatcaaaatcgtcacgcgcaaagaagagcgttacgtcaaagccgatgaattcccccgccacggaaccacgcgagaaaccctcgcccggctacgcccggcgtttcggccagacggcgtggtgaccgcaggcaacgcttccggcattaacgacggcgccgccgcgctggtcctgatgagccgtgaaaaagccgccgccctccagcttcagccgctggcgacgatccgcgcctggggcagcggcggcgtcgatcccaatatcatgggctacgggccggtacccgcaacccgtcgggccttataccgcgcgggcttacaggtggatgacctcgacgtcattgaggccaacgaagccttcgcctcccagtgcctgagcgtgatgaaagggctggggctggatccgcagaaaaccaacgtcaacggcggcgcaattgccctcggtcaccctatcggcgcttccggcgcacgcattctggtctcgctggttcatgaaatgcagcgccgccacgctcgttatggtctcgctacgctctgtatcggcggcgggatgggactggccatggtggttgaaaaagaataa

SEQ ID NO: 240709 - DNA, 939 bp, Klebsiella pneumoniae; identical to SEQ ID NO: 195620

SEQ ID NO: 240710 - DNA, 927 bp, Klebsiella pneumoniae
atgaacaatccactcacacgggtcaccgtgctcggcggcggcctgatgggcagcggtatcgcgcagatctttgccgcccgcggtgtggaggtgacgatttatgatatcgacgctggcgcctggaccgcgccggacaccatccgcagcaacctgcagcggatgcaggcggaagacgccaccatcgaagaggttattagccgcgtcgttttttgcgaccgcctggcggagagcgttaagggggcgcaaatcgtcttcgaatgcgtgcctgaacagctggcgcttaagcagcggctgttttgcgagctggactcactttgtccaccggaaacgattctcgcctccaatacgtcggtcatcagcatcagcgagatcgcccgcgatgtgacccacaaacagcgcgtactgggcacccatttctggaatccggcctttctgatcccgctggtggaggtcattcgcacacgctggaccgacgatgcgctattcgaacgcacatttgacatcctcgcctgggcaggaaaacgcccggtacgggttaataaagatgtgccggggttcctggtaaaccggctacagcacgccctatggcgcgaagcgatttaccttgtggagcagggcatcgccgacgcgcgcaccgtagacgaaggcatccgatatggctttggtatccgactgccggccctcggccctctggaaaacgccgatatggtagggacggacctgactctggcgattcatgaatatatttttccgcatctgaataacgcgacaactccctcgcctctgctacgccgactggtgagcgaaggcaagctgggcttcaaatccggtggcggatttcagacctgggacgacgcatcaattaacgaaagccgtgagcgactgctgagctatctgcagcgcgtcactcagcaacctgaggagtaa

SEQ ID NO: 240711 - DNA, 789 bp, Klebsiella pneumoniae; identical to SEQ ID NO: 195622

SEQ ID NO: 240712 - DNA, 342 bp, Klebsiella pneumoniae; identical to SEQ ID NO: 195623

SEQ ID NO: 240713 - DNA, 657 bp, Klebsiella pneumoniae
atggataaaaacgccatgagagaacgcattgcgcgccgggttgcaaaagagcttcacaaaggggacctggtgaatctggggattggcctgccgacgcaggtcgccaactacgtcgccgacgatcttggcgtcatcttccagtctgaaaatggcctggtggggctcggccccacgccggatagcgacagtatcgacgccgatttaactaacgccggcggtcaaccggtcaccgctgtacccggcgcggcgtttttcgatagcgccctgtcattcgccatcatccgcggcggccacgttgacgttaccgtgctgggggcgctggaagtggatcaggagggcaatctcgccaactggatcatccccggcaagatggtgcccggaatgggcggggcgatggacctcgtgaacggcgcccgacgggtgattatcgccatggagcactgcgataaaagaggccagtctaaaattttgccccgctgccagcttccgctgaccgcagtcggccaggtcaatctgatcgtgacggaaaaagcggtcattgaagtcaataacggcctgatgttgcgcgaaatcgccgcggataccagcgtggaggaagtggttgcgcaaaccgccgcaccgctacgcatctctgaaacattaatccagttttcctaa

SEQ ID NO: 240714 - DNA, 669 bp, Klebsiella pneumoniae; identical to SEQ ID NO: 195625

SEQ ID NO: 240715 - DNA, 1383 bp, Klebsiella pneumoniae
atgaagcatcgccccttattacataaatcggttgataagggggtaattaaatttattaactgggtgagaattatgcaaaataccaataacattgccgataaaacggctaatcattccagcacccggagtaatttcggcggctggggctggagcatggtcggcttcagtatgttgatgtactacaacttcgccgcctggaccgctgacggcctgaacgttatcgtccaaagctttgtcgatctccacggctgggacttcgccacgcttctctctttctcaacgcccgccggatggattggcgttatcggcgcgctggtgatcgctgaaatgatcaagcgcaaaggggcaaaaatcgtcgctattcttggcctgctggcgctgggattgacgatgatctggtttggccgcgtcacctcttacgccgaatacgctattggcctggcgctgatgaatctgctggctactggctgctgtttcaacgtccccgccactttactgaatagctggtttccaaggaaaaaaggcctcgcgctcggctgggcgaccatgggaatgtcgttctgtaccgcgacgctgatccccattatgtttttcctctttgaccgcttcggcgtacccggcgcttatgccgtcgtcggcgggacgttaatcacccttggcatcatctccatattctggatccgcaataccccggaagaaatgggtttgtacccggacaatgaaccgatttctcgtgaacagcaggcggcaaaccttgcggcccagaccgactatcagagcccctttacctaccgcgtactgttccgcgaccgcgaaatgtggctgatttccgtcggcttcggcctgctgtggttggtggatattggcgtcgtcagccagttgatcccgcgactgatttctgttggctatgataaagaaaccgccgtctggatgttcacctccgccgcgctgatttgcgctattttcagctacttctgggggtgggtagatgtgaaagttggcacccgaaaagccagtatcgcttacgcctttttctttgctgtgacccacgcttgtctgctggtacgcggtaacgactacttcacctacttcacactattaatggttggcgccagtatcgctggtatcaaagagctatgtacatcgatggttgggacagtgtatggccgctacgacttttccgccgctaaccgtctggtttcaactattgcctgtttattccgggttagctgttttgcagttgttgccgtcagtctgaaatataccggtgattatgatggagcttatatctcttttatcgccctggatattattgcggccctgttaattttcatgattaacgataaatgcaaaggcaaaacagattctgttgtcaccgtgtaa

SEQ ID NO: 240716 - DNA, 999 bp, Klebsiella pneumoniae
atgtactgtgaagattatcgttatgatgagtcaccccccaccttgtcgcaggatgtcgctctttccgatccgcatatcatgaccagaatgatgttcttcgtaaacctggtcactactggttccatttcatctgcggcagagcgtatgggaatatccatttcttctggctcacgatggctgtctgacctggaaaaagagatcggctgtcctctttatcggcgcaacaacaaagccatgccgctgaccgatgccggtgattatttatatcggaatttctgtctgatcggcgagaaggtcggccagctaaaaaatgagctgacgcatttttccacccagcgtcggggaacgattcgcatctgctgtacaccggtgtatgccgaacaatatctgatgcccatcgtcgccaactatctggccggaaaccgtcaggtaaatatcgccgtccatgtctccgccttcggcattcagagctggaaagatcatgatatcatcatcggcgccgtcaatgccttaagccaccagcaggaccaggaactccctctggtgaaacgtaatctgatcgctgaacctttcgtgaccgttgcctcaccgcagtatttgctgatgaacggcacgccacagcacccatccgagctggtgcaccatcgctgcctgttcgccagctcgctgaccggcagcaacgactgggcctatgagatcaataacgaacgtcactttttcaaaattcccaaatctcttgaggtgtgtgacagcaccctgttacgaaaatcggtgctttcaggggccggaatagcctacctgccggaatatgttgtgcagcgagatattcgcaatggcaaactgacctgcttgtttaaagagatgaaaacatcacaatggttgttaaacctctattatccagcccgtagtcagataaccgaatgcgtatcctcttttaaacattttttgattgagcaacacactgttacctttgagcaaatacgggcggcgaatcattaa

SEQ ID NO: 240717 - DNA, 684 bp, Klebsiella pneumoniae; identical to SEQ ID NO: 195628

SEQ ID NO: 240718 - DNA, 957 bp, Klebsiella pneumoniae
atgaaaatcagaacgctatctcttaccttagcctttacctcttctcttgctttttcttgccagctttttgccgccgaagggctgacgccgttacagcccggtgcgaccaccggtacccatactggcgcatttccgcccgatgggctgtatatgtcaatgacatccacctatgaaaccggcgtcgtgcgaaacggtagcggcgacacggcgaaaatcgccggagggaaaaataagctctcaaacgtcgggctggtgatggccgccacctgggtttccggctgggaatttctcggtgcccgctatgcggcgatggtcgtacagccctataagtttattcaggtaaaaaataccggccagcacaccaccgaccataccagcggcctgctggggaccagtattacccccctcgctctttcctgggatttacacaacaatttccacgttggtgccgggttagccgtctatttaccggatggcaaaacggcctatacccgcaatgcggcaaccgggcgtaaagagacctccggggataacgtctcatgggaatattggtcgtttgaacccaatatcgccatcagctatctgaccgacgattgggggattacgcttaataatatttttgacttcaatacgaaaaataacgaaaccgactaccgctctggtagcacctggtatctggatgttactgccacccatcgtatcaacaatagcctcaccgccgggcttatcggtaactggactaagcaggtgactgacgacaagattaacggtagaacggtacagggggtagagggtatttattctgccggcaaacgcgtcgaacatatcaaagctggtccgatgatgagctatagcgtcagcggtgtcaccgttaccggccgactattgtttaatttgcacagcgaaaatgatgccggaatgacctttttccatatcggggtttcgatgccgctttag

SEQ ID NO: 240719 - DNA, 435 bp, Klebsiella pneumoniae
atggataactatacgctgcatcgtggcagacttatcgaccatatccagctcgtggtaaacgactttgccgcaagcaaagcgttttacactgctgttctggcggaacttaagatccccatggttattaccgatgacgattatatctgggctgacgaactggtcatttcgtcggtaaaaagttcggagtctggcggggtgcctacaggacggcaccatctggcctttcaggccgcagaccgtgaatcggtgaacgcgttttaccacgcagcactaaatcatggcggacgtgataacggcgcacctgccgaacgcacctatcatcccggatactatgctgcttttgttctggatccggacggtaacaacatcgaagctgtttaccatggtgagggcgatcgcagtgcccgctctgtagaaatcagcttcactgtctga

SEQ ID NO: 240720 - DNA, 819 bp, Klebsiella pneumoniae
atgaccgtaattccggtatcagcccttgaatgcagcattactgagctgtgccgtattcttgcagacagctttaatgaatcattgacaccgtttgcgttgccaccggaaatttttgcttcacgtttcatttccgaaggactcagcctcgaagactcgtttgtctggctggtcaatgataacccggcggcaatagccatcgtaacccgcagaatggacaaaacgcgtctggcagcatttggtgtgttacccgagtaccggagccagggactggcaaaacagatgcttactcctctgtttatctccttaaaagagaaaaagttatccagcgtgaggctggaagtgatgcgcgaaaatacccaggccatcgctctctatcatgcgctcggttttcaggttcgccgacatctgtgcaaataccggggagatccacagtctcgtctggaaataccttcagaggatatggaatccaaggctgttgatgacttcctgcgtaccgtctggtctgcaccagatgatgatcttccctggctggccagtcccctgcagctcttgtctattccctgcgacatcctcagggataacgaacatgcatggtgtgctgtcgcgaagttcatgggacaacctcagctccgctgtttgtttgtggaaccggtgtatcgtcaccagggtcgggctaaaagaatgcttcagaaaatgaatgccagatggcctggcataggtacatcagcagcgatcccagaaacgctggcaccattatttactgcggcgggttatcaggctgaaacgttatgccagtttgaaatggaactgacattttaa

SEQ ID NO: 240721 - DNA, 573 bp, Klebsiella pneumoniae
atgagttgcaagtttgaatggatcaatgagcccgccgtatggtgctacgaaaataacgccctgtcggtaatcactgatgagcatactgatttctggtgccgtacctggtacgggtttgagcgttttaccggccacatctacgctgctgatgtaacaggtgattttacttttcaggttaggatccgcgcagacttcaccacactctatgaccaggccggaattatgatgctctctgacgaacagcactggctcaaagctggcatcgaatttaacgatggagcacctgcaatcgggagtgtactcacgatgagaaattccgactgggctacaggactctttcctggggatccgaaggaattctggctgcgtctgacccgtaaaaaagatgcgttacgattgcagtactcctcagatggacagcactggccattacttcgcttatgccatttccctacgggccctgtaaaaacgggcatcatgtgttgtacacctcagcgcaaggggttggaggtagaatttcttgatctcagactgactcctgcgatggataaggaactgcacgatctaagttga

SEQ ID NO: 240722 - DNA, 324 bp, Klebsiella pneumoniae; identical to SEQ ID NO: 113325

SEQ ID NO: 240723 - DNA, 321 bp, Klebsiella pneumoniae; identical to SEQ ID NO: 113324

SEQ ID NO: 240724 - DNA, 1134 bp, Klebsiella pneumoniae; identical to SEQ ID NO: 216203

SEQ ID NO: 240725 - DNA, 927 bp, Klebsiella pneumoniae; identical to SEQ ID NO: 216202

SEQ ID NO: 240726 - DNA, 765 bp, Klebsiella pneumoniae
atgaatcttgattatcaactcgacgggccggatggcgcgccggttatcgtcctctccaattcgctgggcaccacccgggcgatgtggcagccgcagatcgaggcgttaaccgcccatttccgggtgctgcgctacgacacgcacggccacggtaaaacgacgaaaaatggcaaagtgaccctcgcccagttgggtgaggatgtgattgcgctgctcgatcacctgaatatcgaccgcgcctggttctgcgggatctcgatgggcggtttgaccggcctgtggctgggccgctttgcgccggagcgttttcatggtctggcggtcgccaacaccgcggcgcgcattggcgatcaggctagctggctgtcgcgggcgcgggccgtacgtcaggaggggatggcggtggtggccgccggagcggcagaccgctggttcacccacgcgtttcgccagaaggcgccggaggtggtcgaggcgctttgtcaccagctgacccataccgatgctgaaggctatgccgcctgctgtgaggcgctggccgccgccgacctgcggggcgaagtggggcagatcccgctgccgacgctaatcatcgccggggaaagtgaccctgtcaccacggtcggtgacgctcatttcctgcagcagcagatccccgcctccgaggtggtggttctggcggcatcgcatctgtctaacattgaggcgccgaaaagctttacttcggcgctgctgagctttttccagggggaacgccatggatga

SEQ ID NO: 240727 - DNA, 1788 bp, Klebsiella pneumoniae
atgtcctggacatttttttacgcttctgtgaatcctgtcgcctcgctgggattagcgcgcgaaaaaggctacacttcggctttgaactatctatcaaaagagaaagaggcgaagtccaacgtggctcaattcgtttataccatgcatcgtgtcggcaaagtggttccgccgaaacgtcatattttgaaaaatatctccctcagctttttccctggcgcgaaaatcggtgtgctcggtctgaacggcgccggtaaatctaccctgctgcgcatcatggccggtatcgacaccgagatcgaaggtgaagcgcgtccgcagcccggcatcaaaatcggctacctgccgcaggagccgcagctcaacccggagcacaccgtgcgcgagtccgtggaagaagcggtcgccgaagtggttaacgcgctgaaggggctggacgaagtctatgccaaatacgccgagccggatgcggacttcgataagcttgccgcacagcaaggcaagttcgaagagattatccaggcgcacgacggccacaatctgaacgtccagctggagcgcgcggccgacgccctgcgcctgccggactgggatgcgaaaatcgctaatctttccggtggtgaacgccgccgcgtcgcgctgtgccgtctgctgctggaaaaaccggatatgctgctgctcgacgaaccgaccaaccacctcgacgccgagtccgtcgcctggctggaacgcttcctgcacgacttcgaaggcaccgtggtggcgattacccacgaccgttacttccttgataacgtcgccggctggatcctcgagcttgaccgcggcgaaggtattccgtgggaaggcaactactcctcctggctggagcagaaagaccagcgtctggcgcaggaagcttctcaggaagccgcacgccgcaaatctatcgagaaagaactcgagtgggttcgccagggcgcgaaaggccgtcagtctaagggcaaagcccgcctggcgcgctttgaagagcttaacaacgttgaatatcagaaacgtaacgagactaacgaactgttcattccgccaggcccgcgtctgggcgataaagttctggaagtcagccatctgcgcaaatcctacggcgaccgcgttctgattgacgatctgagcttctcggtaccgaaaggcgctatcgtcggcatcatcggtccgaacggcgcgggtaaatccaccctcttccgcatgatgtccggccaggaacagcctgattccggcaccatcaccctgggtgaaaccgttaagctggcttccgtcgatcagttccgcgacgcgatggacaacagtaagaccgtgtgggaagaagtgtctggcggcctggatatcatgaagatcggcaacaccgagatgccgagccgcgcctacgtgggccgttttaacttcaaaggcgtcgaccagggtaaacgcgttggcgagctgtccggcggtgaacgtggtcgtctgcacctggcgaaactgctgcaggttggcggtaacgtcctgctgctcgatgaaccaaccaacgacctggatatcgaaaccctgcgcgcgctggaaaacgccctgctggagttcccgggctgcgcgatggttatctcgcacgaccgctggttccttgaccgtattgccacccacattctggattaccaggatgaaggtaaggttgagttcttcgaaggtaactttaccgagtacgaagagtacaagaaacgcactctcggcgccgacgcgctggagccgaagcgaatcaagtacaaacgtatcgcgaaataa

SEQ ID NO: 240728 - DNA, 954 bp, Klebsiella pneumoniae; identical to SEQ ID NO: 204930

SEQ ID NO: 240729 - DNA, 210 bp, Klebsiella pneumoniae; identical to SEQ ID NO: 204929

SEQ ID NO: 240730 - DNA, 288 bp, Klebsiella pneumoniae; identical to SEQ ID NO: 204928

SEQ ID NO: 240731 - DNA, 603 bp, Klebsiella pneumoniae; identical to SEQ ID NO: 204927

SEQ ID NO: 240732 - DNA, 1287 bp, Klebsiella pneumoniae; identical to SEQ ID NO: 204925

SEQ ID NO: 240733 - DNA, 210 bp, Klebsiella pneumoniae; identical to SEQ ID NO: 204924

SEQ ID NO: 240734 - DNA, 504 bp, Klebsiella pneumoniae; identical to SEQ ID NO: 204923

SEQ ID NO: 240735 - DNA, 708 bp, Klebsiella pneumoniae; identical to SEQ ID NO: 204922

SEQ ID NO: 240736 - DNA, 810 bp, Klebsiella pneumoniae
atgagtactaacagcgaacgtatgtccaatgcgcccgtttactacgcattggtgcaagtaaagtttactccagtagctgcaatgagtaagtatgttccagacatacaagatgcgctaagagttgaaggatttcctttatttgaagtttccaatacaactcaactgaaatttgaaataagaaaccccaatgagccaccggtgcattcatttgagcctgtgacaagttggttgatgattgatgcagacagaaggtcgggttttgtgttaggcaacgatttcattacgttccatacaacagattatgataaccatgtacctttcatctcgtcactaatacttggtctgagcaaagttcttgaatttgctaagccatcgttggtaagccggatagggcttcggtatttggatgctgtttttcccgagaaaagcgaaacaattgagcagtatcttgtaaaggaacttcatggtgttgatttcggatggacgccactacagtccattcaagagtctgtatatcaaacatctgttgagccattgatctctaatggatttatggtttcacgcatacataagatgaatggtcagctaggttttccgccagatatgattcctaatggtttactgccgctgccgagatttagtaacacagagcatcgtatgcacgcaataattgatacagatcattatgttgaaggcaatatgtcaactgatttgcagttaattgaaaaacagattctttcgttgcatagtaaagttaaagaagcatttgaaggcatggtttcagattttgcccgtgctaaatggcactga

SEQ ID NO: 240737 - DNA, 663 bp, Klebsiella pneumoniae
atgtatgcaattcctactggaagcataggcactgtggaacggtatacgcctgattcgcagttaagctcgtgtgtatcaggtgttgttgctgtcgccgcatctttactattagttggtacgggggcttcatatcctgtaaatgcttataaacaatggcgtcagtatgttcagccaagggttcagtttgcatttgattccatagagccaacgtacacgcctgcaatttctcctgaggttgatgttaggaatgttgcccaacatttggctaatattcgcgaagtgctgtctccatcaatgtcagaactggctaaggatttggggataactcggcaggctctctataaatggttgtcaggggagaaccagcctgatgatgcttcaaaagtacaatttattactaacctcagtaacgttgctgatgctttttccaaagctggactcaatgatgcgaagttattggtgaaaatgaaagcattcaatggtaagtcattgatggaattagtgaaagaaggtgagtcttggaacaagccagttcaggtattgattgatgaagctaaagcgatgaatgcagctgccgaatcggccaattacttagcaagtaaggcgaaaccgacagatgattggaagtcatctatttcaattcctggaacagtagaggaataa

SEQ ID NO: 240738 - DNA, 849 bp, Klebsiella pneumoniae
atgttggtacgaggaacatcatggcgtcaggggcatgttcttaaacatgatgatgccgtttcacttggacttctgaagcctgatgaaacgaaccataaagttgtagttataacgcatgattgtgatttacagagtagttcagaaaaaaacgtggagctgatgcttggccccttgaaaaaggggtcaggcaagatgaaaagagctaagcatccgagaattctcgatctatgttttgaaaacccagaaagtgctcagaagaacgcagtagagcttcggcatgaaagaaaagtcgtcattcctaaagaagaattccgttgcgaggaaaacgatccggcattctccatttgcacagaagagaaacaagctcttaagcaatggttagcagctaagtatggtcgtccagcgtttcctaactcgtttgaagagcgcttacgggcttacgacgataataaaaaatttattttcgaaaaagaagttgcggacattatcgccacaaacgcagagcatttgattggagttttttttgatttgggcgaagaaagatttaacgaccttgatgaaggtataccgtatgagctttctatcaatgttgtttatgatgcaattggaggtggccccgatgctagggaggcggctgaacatacctgttctgctctaaaaacattgttttataagttttatggtgacccaatcttggggcattcagagcttatagaattgaatgattgcatagctgttgccgatactcatttctcactgtatgcattgaggaggatggatcaatggagggtggaatacatcagccttgaagatgattcatatggtgattttattggtgccggagtttaa

SEQ ID NO: 240739 - DNA, 579 bp, Klebsiella pneumoniae
atgaaaaatattaaaaactttcttcatgttttattattgcagggagggaactacttattcccattagttacaatacctattgcttcacgggtgtttggaccagacttaattgggacttttaattattatacttacattgtttccttttattgtatgattgtggaattcggattcggttattctggtgttcgtcttttaacaagaaacccagaaaataaatcaaagatatttaatgaaattcttacagccaagtttttaatactttttttagtttcgttgtttgctcttttctattcttataaatttattagtcaaagtgactttattcttttcggaacttgttatcttcttgttttatcatcattatgtaatgttaactggttttttcaagctaccggtgattttagcttaataacaaaggtttcactgtttacaaaatttattagtattcttttaatagttttctttgttaagaataaagacgatttattattatactctttaatagtaaatataccaatggtattaagttctcttttttctctttggtattgtaggataaagtataaattagattaa

SEQ ID NO: 240740 - DNA, 459 bp, Klebsiella pneumoniae; identical to SEQ ID NO: 211462

SEQ ID NO: 240741 - DNA, 183 bp, Klebsiella pneumoniae
atgattctcagaaactcctttgtgatgtgtgcgttcaactcacagagtttaacctttcttttcatagagcagttaggaaacactctgtttgtaaagtctgcaagtggatattcagacctctttgaggccttcgttggaaacgggatttcttcatataatgctagacagaagaattctcagtaa

SEQ ID NO: 240742 - DNA, 318 bp, Klebsiella pneumoniae
atgggctttccttcaccggcggctgactacgttgaacagcgtctgtccgttaactcgatctgcaatgttggtcctaacacccgcgttttcgaaagggatggcggttatgttgtgctggatatttccctgaagccaaagcagggtagtcaggttctgatccagcacggcggcgggacggagcttgccacgttgagaggaaagtcgctgataacagaagatggcgaagcaattgaaggtgaggccttggatgatgttactgtcgccggcgttgtgacgcatgtcatttgtgatgtgcgaagcgatagcctggctgtttaa

SEQ ID NO: 240743 - DNA, 1071 bp, Klebsiella pneumoniae
atgattgagttatcggtagaaaatctgcatctcacctatggcgacaacccggtgttgaagggggtgtccatgacgctcggccggggggaggtagtatcgctgctggggccttcgggaagcggcaaaaccacgctgctgcgggcggtggccgggctggaaaaaccgacgagcggacggatcgccatcggcaaccgcacggtgtacgacggcacgccgcgcagcgagatcccggccgaagagcgtaacctcggcctggtgttccagtcctatgccctgtggccgcacaaaacggtgttcgacaatgtggcctatccgctgaagctgcgtaaagtggccgccggggagataaaagagcgggtgcagcgtgtgctggatcagctggggctggggcaccttggcaaccgccatccgcaccagctctccggtggccagcagcagcgggtggccatcggccgggcgctggtttacaacccgccggtgatcctgctggatgaaccgctctccaaccttgacgccaagctgcgcgaagaggcgcgggtgtttttgcgcgagctgatcattaagttgggcctctcggcgctgatggtcacccacgatcagaatgaagcaatggccatctccgatcgtattttgctgctgaacaatggcgtcattgagcagcaggggaccccgcaggagatgtacggcagcccggcgacgctgttcgccgctgagtttatgggcagcaataaccgcctgcacggcaaagtgatggcgctggagaacggcagggcacggatcgaaggcgccagctggagcctgtgggggcgagcgggcgagggggttagcgttggcgagccggcgacggcggtgatccgcgtcgagcgcctgcgacttgacggcgccgcgcaggataatagcctccagctaccgctgctgaccagcatgtacctcggcgaccgctgggagtacctgttccgtaccgaaggcgacgactttccgctgcgcgcctacggaacggcgctgcgcgatgccgaacactgccatctgacgctcccggcggaggatgtgtggatttttccgcagcggtaa

SEQ ID NO: 240744 - DNA, 810 bp, Klebsiella pneumoniae
atgttgctgcaacgtcttggtcggctgtggcgacataccgatacgccccgccatgccagcgcgaaggcggaatgctggctattgtccccctcgctggagagtgctttagccaacccgggttctgcattcggcatgagcgcgatggtctattcgccctatgtgttatgccgcagtctggaggtctggcaagcgatcccgtccctctcattgccaggggatattcgccccctgatcgatcaaacctataccgagcgcgctgaagaggggacatgggccaccctattgcatgagctgaaaaatggcagccgctttcgttcaggagaacaggcgctgcagtcgctggcgaagctcacgttatctaccggcgggaaaacgctgcctgagcataaagcggagactcgctatagcgatcgtgacacccatgacctgttgctgctgcgtggtctgcgtacgcaagacggcatcacgtatatgcgcctgctagatggtgctgaattaacccttccgcatgggcgccatcgtttaagccgggcgcagtggcgacagctggcggtggtgcttaatcagcagctggtgcgagttagcccggctttttgtccgcccacaatagctaaaagtgagctggaaaaattacacctgcaggaggtgttctatcttggtcgccccgaagatgacgaggcgttactgcgggttgcgattgtcagcccggcgggtgagttgaagacactggatggccggcccgcaggcgataaatacactctcgaatatagtgaatatcttggcttccgggccatttccaaaaaggaataa

SEQ ID NO: 240745 - DNA, 510 bp, Klebsiella pneumoniae
atgcttgaagaggggattgcttcaatttgtcatggggaaaaacagatggtggtaaccccgcttttttctccgtcgatattaggatttatggatggttatgggctatttgatgatatcccacaaaaacggcactacgtgctgtttgccgagacggatttgcgtgggcgctggatatcacaccaggctgctgttgatatcctgaatgagcaaaacctgtggcgccatgtcacgcatatcctggcgcagcggttgatggtgttgagcatgcgtgagcaagagctgatgggggtggattcttacctgatggtgcgaaccctgttaatggagctggcaggctatccggaggcgtatcgtcgaaaaatcaacgtattaaactttatccttcgccgtaccaacttgtcgcgtagccgcatcatgtcgattctgtcggagctgcgtaaaggtgactatattacgatccatcgcggtgtgctgaggaccatcgcccacccgcttcccgctcacttttaa

SEQ ID NO: 240746 - DNA, 303 bp, Klebsiella pneumoniae
gtgagtatggcgaacctacgcaaagaggcgcgtggccgcgaatgtactgtgcggatccccgggcactgcaacggcaacccggaaaccagcgtgctggcgcattaccgcctggcgggtacgtgcggcacaggatgcaagcctgacgatactcaggcggcgatcgcctgcaacgggtgccatgacgtaattgacggcagaaccaaaaccaccgatttcacctacgacgaattgcgcctgatgcacgcagagggggtaatgcgcaccctggaaatctggcggaaagagggactcatcaaatcatga

SEQ ID NO: 240747 - DNA, 819 bp, Klebsiella pneumoniae; identical to SEQ ID NO: 197823

SEQ ID NO: 240748 - DNA, 249 bp, Klebsiella pneumoniae; identical to SEQ ID NO: 197824

SEQ ID NO: 240749 - DNA, 306 bp, Klebsiella pneumoniae
atgagtaataccacactacagatccaggctatcccagcatttgatatccatgcaaagcttaaatcattcaatgaatgctggtcttttgctatccgtacgcaacctcataatcatagttatgatttcgagttttgcactcgctttattccagatttaacattcgctatatacaagcgcattggtgattatttcgtgctggttgatttctttaactcatacgatgaagcatgtgatgaggcgaaggacattctatatatttatccagagatcagagatctgatattaaaagccacatctatttcatga

SEQ ID NO: 240750 - DNA, 693 bp, Klebsiella pneumoniae
atgaacacacttgcagaaaggctcaggttggcaatggcttatgccggggccacccaaagccaattagcgcacagggtcggggtaagccagggagctattcaaaagctcacctcaggaaaagctcagtcgagcggaaaaattgtagatatagccaaagcattggatgtagatcccgtatggctaagcactggtgaaggcagcatgggaccagcaaaaacccctgaacaaaggatgtttggtatagacccatgggataaaaataccccacttgaggatgatgaggtagaagtgccttacttgaaggatatagagttcgcatgtggagacggcagcgcgctcaatgacgattacaatggcaaaaagctaagattctcaaaagcaacattgcgaaaagtcggcgcaaacagtgatggggatggtgttctatgctttgctgctcacggcaatagcatggaaccagtaatcgcagacggctctaccgttgccatcaactgccatgacaaacgtatcattgatggtaaagtttatggcattaatcaaggtggatggaaaaggttaaagatcctttatagatcaggccctgacaaggtaacaatcagaagttacaactctgatgaataccctgatgaagaggtcgatatggatagcctagaggtgttaggacgactgttctgggtctccacaatattctga

SEQ ID NO: 240751 - DNA, 702 bp, Klebsiella pneumoniae
atggtcagtaaaaacagcgaagccccattggcagcaacctttggggcttctatcgaaaataaccgcgaaggaaatatcgacatgaacattgtagcaagatcagacctcaacttccaaggtaaagcgattgttccagttaccggcatgactggtatttggctgacctctgcagaaatcgccaatgcgcttcagtacaaaagcgcaaaatcagtaacgaacctgttcaaccagaattcagacgagtttaccagcggaatgactcaggtcattgaatcagtgacctcaggaaactaccgcaaaaaggtgcgagttttctcacttcgtggcgcgcacctgatcgcaatgttcgcccgcactccggtcgccaaagagttccgccgctgggtgctggatattctggatcgcgaagtggttcattcgccgattgcgaagcagttcagtgatgatgagctttgctcactgtcttacctgtggagatcaagcgcagttatgtacgaagcctgtcataacatttacccgttattgctggcagcagagcacaaattactacctcgctttgcctcgatagtgaccaaccatgcgaggactataaacaggacgcgagatcttcttcgccgcgaaacgaaacatattgaagagcacccatggggggatactaactggaaaaatgtattttcatacgggacgggagtattgcagtga

SEQ ID NO: 240752 - DNA, 444 bp, Klebsiella pneumoniae
atggccggtcaaaatattacgtcggcagacgccatcattgagctggtaatcgctgaactctacccatccgggtttaacctggagcagttcgaagcgcaaaacatcttcgaaatgggtgataccgacacggcagagtaccagcgtactgctgacggtaaactgctgggtggttttatttatggtgatctgccgtggacattccatctggcggcatcatccccgtcgattaagtacatcgacaactggcaaaccactcagatgaccacgcggtctgtgctgcgtgtcaatgggacggtgatcctgccatcgctgggcaaaaagtacatcatgaccaacggcatcctgcagcgcgcgcgccgtatgccgtctgccggccgtgtgcttcagccggtaactgggcttatccagtgggaaactgtcactccggcagactactcagcgtaa

SEQ ID NO: 240753 - DNA, 132 bp, Klebsiella pneumoniae
atgcctaagagcaacagattttaccaggcacaaacacacaaaaatgttacccgcgaccgcttcattcgctctgttaacccggtggttggcatgaaggaagagctgaaacggaaggaggaaggccgtgagtaa

SEQ ID NO: 240754 - DNA, 621 bp, Klebsiella pneumoniae
atgaaagaacgtggaatgatttttaatgctgagatggtgcgggccattctcgacggtcggaagacacagaccaggaggattatggcaccacagccagcagacgatatcgagcgttgcattttccctaacccagaagcaattggctggaaatcatctctgagacacaagcatggcagcaccactgctcatttttgccattatggaaagccaggcgaccgcatctgggtccgtgaaacatggaataaatatggcggactcctcacctatcgcgcagaccacgactggattgatgatatgcgcaaggaaacggtttgcactgccaagtgggtgccatcaatccacatgccgcgatgggccagccgcattctgctggaaatcaccgacgtgcgggttgagcggctgaacgctatcagcgaagaggatgcgcgagcagaaggcattattgacggtggctgtcttaattgcggggaacctgagccatgcggatgcgccaacccagagcctgacgccgccgatgcttttgcctacctgtggcaatcgatctacgggcaggaaagctggaatgctaacccctgggtttgggttatcgagttcaagcgcgttgaaggcggtgcagcatga

SEQ ID NO: 240755 - DNA, 825 bp, Klebsiella pneumoniae
atgcttgccacaaccgatctctggtttcgctatcaggatgagccggtacttaaagggctgacgctggatttttcccgccatgcggtgaccggcctggtgggggccaacggctgcggaaagtcgacgctgtttatgaacctgagcggcctgctgcgcccgcagcagggggcggtgctgtggcagggagaggcgctgaattacagcaagcgcggtctgctggcgctgcgccagcaggtggcgacggtgtttcaggatccggatcagcaaatcttctataccgatatcgacagcgatatcgcttttagtctgcgtaacctcggggtggcggaagaggagatcgcccgccgggtggatgaagcgttgaccctcgtcgatgccctggggtttcgccagcagccgatccagtgcctcagccatgggcagaaaaaacgggtggcaatcgccggggcgctggtgctgcaggcgcgctacctgctgcttgacgagcccaccgcgggcctcgatccacgcgggcgggcgcagatgatcgccatcatccgccgcattgtcgggcaggggcggcgcgtggtgatctccagccacgatatcgatctgatctatgaggtgagcgacgccgtttacgtgctgcgtcacggcgaagtactggccgcgggggatcccggcgaggtatttgcctgcgcggagacgatggacagggcgggattgacgcagccgtggctggtgaaacttcatagcgaactggggctgccgctgtgtaaaaccgaggcggagttttttcagcggatgcacaacaacgcgataggcgcgataaaggaggcgtcatga

SEQ ID NO: 240756 - DNA, 1524 bp, Klebsiella pneumoniae
atgacgctggcagtgatgttgcagggcacggcttccgacgtggggaaaagcgtgctggtggcgggactgtgccgcatttttcatcaggatgggctgcgtaccgcgccgtttaaatcacagaatatggcgctgaactccggcattacgccggatggcaaagagatgggccgggcgcagattttccaggccgaagcggccgggattgcgccggatgtccgcatgaatccgattttgctcaagcccaccagcgaccgtcaggcgcaggtggtgctgatggggcaggtggcgaccagcatggatgcggtgagctatcaccagtacaagccgcgcctgcgcgagcagatcctcgcggtctaccagagcctggccggagagtatgaggcgctggtgctggaaggcgccggcagtccggcggagattaacctgcgcgaccgcgatatcgtcaatatgggcatggccgagatggcgcaatgcccggtgatcctggtggccgatatcgaccgcggcggggtgtttgccgcgatttacggcacgctggcgctgctgcagcctcaggagcggccgcgggtgaaaggggtgatcatcaataaattccgcggcgatgtggcgctcctgcgctccgggatagagcaaatcgaggcgttgaccggggtgccggtgctgggcgttatgccatggcttgacgtggatctcgaggatgaggacggcgtcgcgctgcaggccgggaaataccatcgcaccgaccggcgcgatatcgacatcgccgtggttcacctgccgcatattgccaattttaccgactttaacgccctggcggcacagccagacgtccgggtgcgctatgtccgcgatccgcaggcgctggccgacgccgacctggtcattcttccgggcagtaaaaataccctcggcgatctgtgctggctgcgcgagagtggcatggcgcacgcggttgagcaggcccggcagcgcaaggtgccgctgctggggatctgcggcggctatcagatgctgggcgaaaccattatcgatgaggtggagtctggccttggcacccagcccgggctgggggtgctgaagaccgtgacccacttcgcccagcacaaaaccaccacccaggtgcaggcgaccctggggtctgcgctcccggattggttagccgacgcggcggggctgcgcgtcagtggctatgaaattcatatgggcgagacgcgccgcgaggcaggctgcccgccgctgctgctgctgcataaagcggggcaggcagtggacgacggggcgataagcgacgacggcctggcgttcggcacctatctccatggcctgttcgacagcgatgcctttacccgggcgctgctcaacggcctgcgccagcgcaaagggctggcgccgctggacagcgccctggagtatgcccgctataaaacccggcagtttgatcggctggccgaggccatgcgcgaacatatcgccatcgataaaatttacgccatcatgcgccaacatcaggagcccctatgctga

SEQ ID NO: 240757 - DNA, 546 bp, Klebsiella pneumoniae
atgctgactctggttaccggcggcgcgcgcagcggcaaaagtcgccatgccgaggcgctgattgccgatgcgccgcaggtgttatatatcgccacctcgcaaatctttgacgacgagatggccgcaaggatccagcatcatcgcgacggcaggcccgcccactggcgcaccgccgagcgctggcagcagcttgatgaactgatcaccccggctatcgccccagcggaggcgattttgctggaatgcatcaccaccatggtcaccaacctgctgttcgcgctcggcggcgacagcgaccccgacggctgggattacgccgccatggaacgggctattgatgacgaaattggcgtgctgattgccgcctgtcagcgctgtccggcgcacgtcgtgctggtgaccaacgaggtggggatgggcattgtgccggagaaccgcctggcgcggcattttcgcgatattgccgggcgggtcaatcagcgcctggcggccacggcggatgcggtctggctggtggtttccggcatcggcgtcaaaatcaaataa

SEQ ID NO: 240758 - DNA, 1056 bp, Klebsiella pneumoniae; identical to SEQ ID NO: 221295

SEQ ID NO: 240759 - DNA, 306 bp, Klebsiella pneumoniae
atgaccaaaaaattcactgttgcactgaacgctgcaacgcagagtcaagacaatcaattcgtcacttttttgaaagataacgatatggcttggtggcgctatatcggtaacttttggctggttattgattacgacgataaatttcatgtcgaatcattaagagatgaattattaaaaatttacccaaacgttcataactttgttatggatgtcaccggttcttcaagtgcctgggctggatatggcccaaactctgggaaaaataatatgtttgagtggttaaatgaaacatgggatgcctcttga

SEQ ID NO: 240760 - DNA, 459 bp, Klebsiella pneumoniae
atgagccgattaaccgcaatcatctgcgctgtcgttatctgcctgctagtttccatggcctgggcgattgaccattaccgcgacaacgccatcaactacaaagaccagcgagataaagccaccaagaatctccgcctggctaacgacaccatcaaagatatgcagacgcgccagcgtgatgtcgctgcactggatgccaaatacaccggagaactggctgatgcgaaagaaaccattgagcgtctgcatagcgatgtcattgctggccgtaagcggctgcagctcaacgccagatgtcccgcgaacggagcgaccagcaccgccggcgtggatgatgcaaccagcccccgacttactgacgccgctgaacgggattatttcatcctcagagagcgaatcgaaaccgtcaccaaacaactgaccggcctgcaaacatatgtgcgtgagcaatgccagtga

SEQ ID NO: 240761 - DNA, 951 bp, Klebsiella pneumoniae
atgtgtggcacgacgaagcgcaacgcaaatcgtaatggatcatctgatattcactcccaccaaacgaagcagaaaccgcaagaaacccatccccacagaatccgatgtttcaactttcaattacacggcccgtctgtgggatatgcgctggctcagaaccagagcaaggaggaagaatgcttagccctaaccaaattcaatcctacgagcagcagagtgtacgcagagcattatgtgccggatgtatgcaggaacttcaggaagacgagcattacgtatgcgaaacatgcgcaaatctttgtcgagagtgtttacaactggtcaagcaaaatggggatgagaaaaatggctaaggctccccggcgaaaatgcaaagtctgcaatgaatggttccacccggcattctcaaatcagtggtggtgcagcccggaacacggaactcaactagcaatagagcgacgaagcaaggagagagaaaaagcagagaaagcagcagataagatacgacgaagagaagaacagcagcagaaagataagttaaagattcgaaagctcgccttaaagccccgcagttactggattaaacaagcccaacaagcagtaaacgccttcatcagagaaagagaccgcgacctaccctgtatctcgtgcggaacgttcacgtctgctcagtgggatgccggccattaccggacaaccgctgcggcacctcaactccgatttgatgagcgcaacatccataaacaatgcgtcgtatgcaatcagcacaagagtgggaatcttgttccttatcgcgtgatgcttatcgaacgtatcgggcaggaagctgtagaggaaatcgaatcagaccataagcgccatcgctggactgtagaagagtgcaaagcgattaaggctgagtatcagcggaaacttaaagacctgtgcgtgaacagagtggaggccgcatga

SEQ ID NO: 240762 - DNA, 219 bp, Klebsiella pneumoniae
atgagcaatcttcggaaatacagagaggctctgaaggtctctcaggcaacattagccgagcttatgggctgcactcagccagcggtaggccactgggaatctggtcgtagaagcccagaccttgagacgtgccgtgagttagtgaagtcacttaataaactcggtgcaaaagttagtcttgatgacgtttttccgccatcagaaagtaacgccgcataa

SEQ ID NO: 240763 - DNA, 654 bp, Klebsiella pneumoniae
atgaaatggcatgaactggctcgctcaagaatgaaggagctaggagttactcaagagaagttagctgaagagcttgggatgacgcagggtggcattgggcactggttgcgcggttcgcgacacccttcaattgaggaaatagcaaaaatctaccgctatttaggtgtcaataacgtatcgtttaactccgatggtacattttctacatcaggtgaacaatcctctactcctgttaaggttcagtactgttaccctttgttctcacatgttcaggctggactattctcaccggagctatgtacttatacaaagcaggatgccgagaagtgggtgagcacaaccaaaaaagccagtgaacatgctttctggcttgaggttgagggtaactccatgacagccgcggcaggttctaagcctagtttccctgagggtatgctgattctggtagaccctgaagagtcagttgacccaggtgatttctgtatcgccagactgggtggtgatgaattcacatttaagaaactgatcaaggacagcgggcagttatttctccagccattgaaccctcaattccccatgatgccgtgtaatgaacactgccgggtcgttgggaaagttgttgcttctcagtggcctgatgagacgtttgggtga

SEQ ID NO: 240764 - DNA, 1026 bp, Klebsiella pneumoniae
gtgacgaaagcaattacgattgatagtgtggatgtgcttgaaagtgtttttaatcgcatccaatcaggtgaagaaatcctgatagaacaactaaaaatcaagctgttcgacgatgttaaatttaagattttcggcgacgaaacacgctataatgggactcttccagcatctttagcgcaaggtttatgtgagtttcagactgagatgtacaaggtctatactcttatcaagtataagaccgataatcttcagaggcttggaagcgcagacagagaagaggcggagattattttctctatcaactctggatgcacagagataattaccgccttaactgatttcgctaacgcctgtggaaatgcatttgaaaaggtaacgcaagggatgagccccaaccagaagacaacatgctttctctttgccatcgcactttttggcggtgcttgggtaagtacgtcttatctaaagggggaatctgacgttgccgtcaagcaggaagaaactcgtcaacaagaagccaaagaaaaggctgagaacgaaaggctatccattcttaaggatggcatgttgcaagcaatcagatccaatgccggagtagacacaattgaaagagcagaaggcattcaggaacacgtttcaaaggcatatacgggcgttctcaaatctgctagcgacgcagatagaattgaaatcgacggcgcgacaaaacttaatctttctcagaaagatgttcacgaaataatcaagaaccccatcgaaaaggccaaaaaagaagagcgcaatcttgagttggttatcgacagcatcaagcgtacagctgaaaagataacattaagctgccgagagccatcaagtgaagaaagctttcctgtttcagttgacacctcgtttatcgatgacaaagatgaaatcgctttgctttttgatgccatgaaagaaaacagaacggttaaaatattaggaagctatacgatacgagctggagtaattgaaaacggaaacgcatcaacgatttctcgcccataa

SEQ ID NO: 240765 - DNA, 387 bp, Klebsiella pneumoniae
atgaatgtcggttctaccacgcttgatagctgggtacgccagctcaggcgaaagcgtcagggttttacgccctctgcaaatcccattactgcaaagcagcaacgtattcgcgagctggaaaagcaggttcgccgcctggaggaacagaatacgattgtaggtgactcgtatgacaacgcgttggctgaaagcattgacgggttatacaaagctgaagtgacccagcgtcaacactggaaaaataggcaacatgtggagttggcgacgcagacgtggatagacgagttcaacaaccgacgattactaaaacgtatcggctatgtatctccagttgaagcagagcaaacgtattatgcctggcagatgaataaatattatgcagactaa

SEQ ID NO: 240766 - DNA, 462 bp, Klebsiella pneumoniae
atgagcaaacaatatcaaaaacacctgcaggccgttcaggcgctgacagagctgcagtttaacgtcacacagaaaaacgccaccgaacgtccgtttaccggggaatatgacgacaactttgagcagggactgtacgtggatatcgtctccggtgaaccactgttttcgtcagaggacaaatttgattcgggttgcggctggccggcgttcagcaagccggtggaaaacaacgtccgtaacctgagcgatcttagtcatggcatggtgcgcaccgaagtccgctcccgccacggcgacagccatctggggcacgtcttctcggacggtccgcaggatgtcggtggattacgttactgcattaattccgcctcactgcgatttattccgaaaaccgagttagcagcggaaggttatggcgattatctcgccctttttgagaaaggagataaacatgcaaactga

SEQ ID NO: 240767 - DNA, 273 bp, Klebsiella pneumoniae
atgcaaactgacgtggcaattctggccggtggctgtttctggggagttcatgagctgctccgtaaactcgatggcgtgatcaacactgaagtgggctatatcggtggtcggaacgactatccgaactaccgcaaccatcccggccatgcggaagccgtcaaggtggaattttcccccgacacgttgagctaccggaagttgttggaatatttctttcagatccattcatttcatcaaatgtcggtccgagaactgtccgcggccagtttctga

SEQ ID NO: 240768 - DNA, 165 bp, Klebsiella pneumoniae
atgaagagatgtgcacgttgcaacaaaaaaagaagcgtccttgaacggtggctctcactcgataaagaattctgcgacgaatgcttattcgatatcgatgaggaaatcagggaagacaggattatcccgatcagacgcctcaaagatgacaacgaagggaaatag

SEQ ID NO: 240769 - DNA, 1155 bp, Klebsiella pneumoniae
atggagacagatatgtcagaaattgatggtaatttcgtttatcaaaagacattatcctgtgggcgaattgaggtaagcagcgaggaaaccgattatcctcttactgatctctttgatatcgccgaacggcggaatccaaaacgcgcatttctgtttgtcagtaaagtgctgggtcgacatattcctgtctctcctctggtcatgcgcaatgtttatacacagctggcggataagtttcccgggactctggacgggccggtggtatttatcgggatggctgagacggctgtcggcctcggggcgggagtgtttgatgaggtgcgcaagcatcaccctgactgtgtttatctgacatcaacccgccatccggtcgatgccgaactgttgtgcgagtttaaagaagagcacagccatgcaacagaccacctgatctactatccagtttctgctgccatgcggcaaaccgtagcggaggcacaaacattagtgctcgtggatgatgaagccacgacagggaaaacgttcctcaatcttctcgcctcattacgtgcatcgggtgcactccggaaggtacgacgggttattgctgtcacgctgactgactggagcggagaagcactcagtcagaacagccccctgcccctacatacagtatcgctcatctccggcaactggcgctggacacccgaaccggatgccacgctgcctgtcatgccccaggtaaatgtgacctccagagggaacatcccgatcaccggcaaacaatcctgggggcgactcgggatgcagataccggcgagtgacctgggtctccaggttcaggtttcgcacggtgaaaacattctggtactgggcaccggtgaatttgtctgggagccgttcctgctggctgagcgacttgaagcggcaggtgctcaggtcgtgttcagttcgacgacccgctcaccgatttccactggttatgctatccagtccgccattgctttcagcgataactacggactgggtattccaaattatgtctataacgttgctcatcagcagtttgaccggatcctgatttgttgcgaaacgccagcttccagcgtggacccccggctgcttgaggcgctttccgctgtcgctcccactgtagaggtgattacctatgaataa

SEQ ID NO: 240770 - DNA, 570 bp, Klebsiella pneumoniae
  misc_feature (487)..(496): n is a, c, g, or t
atgaatctgacaccggggggcaatgcccccgtacctgctcaggaactgcgcgttagagtcatttctggtggtcctgttgatgcctcggcatttcgattattcgctgacgggaaagttcggggtgacagcgatatggtcttttacgggcaaccccgtaatgaagatggttccattagcttcagtactgaagggaccaatagcgttttcaccgttgatctgtcccgcctcaagcccgacgtgcagaaagtcgcgttcaccgttacctgtgacggcagtcataccgtttcctccctgaatcatctgtccatacaaattgaaagtggcaatacctcgctgatcagtggtcaggtagaactaagtggccgtcaggaagccgctctgatcctcggtgaagtctatcgcaggaatggtgactggaaatttcgttttatcgcccagggcttcaatggcggcctgaaacctctcgctgagtactatggcgtcaacnnnnnnnnnncgtcaacgtcgcggatgagccagtcccagtcactccgccacccgcgcctccggctccgcctaaagttagcctga

SEQ ID NO: 240771 - DNA, 264 bp, Klebsiella pneumoniae; identical to SEQ ID NO: 182594

SEQ ID NO: 240772 - DNA, 879 bp, Klebsiella pneumoniae
atgattgaaatggcaaaaaactatcttgctttagcaagaacggcttcaatatcgcgaaattacgaagaagcttgcggttattacaacaaggtactggaagtcgaccccaccaacgccattgcgtggtttggaaagggagaagccgtagggtggctgtcaacggttcaagctttaaggttggaagaatccttggtttgcttccagaactccattaggtttgcgcaagatgatatagctatagaaaaaaagtgcgctgtaaaaatcaacgagatagccactgcctgctatggtatttgcagagaacacgcacttaaattcatagcattagaaaatatatgggggtcttatattgtccaatcgtctcaaatcattggtgcatacgaatttgccaattcactggacccggaaaacaaagatatacttaggaatgtaattgcaatatgcgaagagaatattaaaggtgtatcttatacggatgaattcgataataacactaataaggctgtttttttatccgctgaatatgaaaaaaatatcagagatatcctttctttatttggtggtaagctgaaggaattggaaccaagctaccaaccatcaaatccagttgctgctaagcccgagtccgcttgctttattgttgctgctacaattggtagcgaatcaggttttattatagaagatctaaggctttttagggatagatggatttcaaattttgaaatcggtaggggctttattaaatggtactataggaatggcccgatcgcagctgatgcgattagcgactctcgtgtgttaagggttattagtttcgtttttatagtacttccatgttgggttatgtctcgttttattatgaggctaattaaaaaatag

SEQ ID NO: 240773 - DNA, 855 bp, Klebsiella pneumoniae
atgacaattagacaacttccggttgctccggcggggcgcccgtgcgcgggtgttaccagtgagccccagccctcagcgcttgagcgctggaatggtgggatcagggctgcatccgataatgacaactccatttctatttttgatgttgttggacgtgattactgggatgagggggtcacggcaaaacgcatctccggcgcactacgttcaatgaacggtgcagatgtgacggtaaacatcaactcccctggcggcgatatgtttgaaggactggcaatttacaaccttctccgcgagtaccaggggaaagtcactgtaaaagtgctgggcattgctgccagcgccgcttcgattattgctatggccggggacgatattcaaatcgggcgcggtgcctttctgatgatccataactgctgggtagtagcgatgggcaaccgccatgattttgcggaattatcgacttctcttgagccatttgataccgctatggccgatatctattcagcgcgttcagggcttgatatcgcgaccgtaaagcagcttatggatgcggaaagctatatcggaagcagtgatgcagtagaaaaagggctggcagacagtctgctttctgctgatgcagtaagcgaaggtgatgactccccgtcttccgcgctacgcaaacttgatgcactgcttgcgaaaacgaataccccccggtctgaacgccggaaattaatcaaagctttaactggtaacacgccgggcgctgttaccgatcccgatggtatgccgcgcgctacccaacccaaccctgaaattttagctgagctggatgtcgcattaagcggcctggctaacgcatgccagtaa

SEQ ID NO: 240774 - DNA, 213 bp, Klebsiella pneumoniae
atgagtcaagaaaggatgtttccatgctgtgataactgcgggcgggtgtatgcagttattcttagtgaaagtgacgctaagtgctacgatgaaaaggttgagacagattctgacgactttcctgtattcacctcctttgaaaactggataagtgaaaatcctgagtttgataacctctggcatgcatgctcttattgtggttcagatagttaa

SEQ ID NO: 240775 - DNA, 258 bp, Klebsiella pneumoniae
atgctcagggttcagggctcccgccaatatatccgcaaggcgatctacacgactaacgccatagaatcactcaacagcgtgatccgacaggcgataaaaaagcggaaaatattcccaacggacgattcagttcggaaggtgatttaccttgcgatacagtcggcgtcaaaaaaatggaacatgccgatccaaaaccggcggctggctatgagtcgatttattatagagttcggtgaccgactgaacggtcacatttga

SEQ ID NO: 240776 - DNA, 1410 bp, Klebsiella pneumoniae; identical to SEQ ID NO: 239295

SEQ ID NO: 240777 - DNA, 483 bp, Klebsiella pneumoniae; identical to SEQ ID NO: 214733

SEQ ID NO: 240778 - DNA, 558 bp, Klebsiella pneumoniae; identical to SEQ ID NO: 120952

SEQ ID NO: 240779 - DNA, 582 bp, Klebsiella pneumoniae; identical to SEQ ID NO: 19374

SEQ ID NO: 240780 - DNA, 339 bp, Klebsiella pneumoniae; identical to SEQ ID NO: 195086

SEQ ID NO: 240781 - DNA, 330 bp, Klebsiella pneumoniae
atgcgtacattaacagcttataacgaagataatttccgccagatagagcagtacaaaggaatatcggtggtacgtttctctgcaccctggtgtccgccctgtcaggccagcgaagaaatgttcagtcagtttgcagaccggctcgatagagatattcaggtggggaaagtcaatgtagatcaggcgccggtgctgacaaccaaatacgagatctgggggctgccgtctgtgctgatatttcatgaagggcaattagttaaacgcataccgggtgtgaaacctgcatcggtatatgctcaggctattgcggacattaaaaaagggcagtaa

SEQ ID NO: 240782 - DNA, 1107 bp, Klebsiella pneumoniae
atgagtaagcttttcaccccctataatctgtctggcctggcgttaaaaaaccgtgtagtcatggcaccgatgacccgcacccgcaccatgaatgacgtgccggatgaggtcgtggctttgtactatgcacagcgtgcttctgctggcctgctcatcaccgaagggatgccggtttcagaagaaggccggggttacctttatacccctggtatctacaacgacgaacacgtccagggctggcgtaaggtgacacaagcggttcacgccaaaggtggctgtattttcgcgcagctctggcacgtcggccgtatgtctcacgtctctcttcagccaggccacatagcgccggtttcagcgggcaccgttcaggcggtcaataccaccgtttttgcgctgaccgaatccggagaaccgggcccggttgtaccaagccagccacgcgcgctggaaacgcatgaagttaaacgcatcactgcagacttcgtgcactccgcacgcctggcgatggaagccggctttgacggcgtggaaatcatggcggcaaacggattcatctttgaccagttcctcagtagcgaactgaacacccgcaccgacgaatacggcggctcggtggaaaatcgtcagcgtttcctgctggagaccattgacgccgtggcggaagccgtgggtaacagccacgttgccgtgcgcctgtcaccgttcggccgcatttatgacctcgcgccgtatgaaggtgaagagcaaacctggtcagccatcaccgacgcgctcggtcagcgggaactggcctacgtacacctttactatcagccggtgtacaccaaagcgccacttccggaaggcttccgccgccgttttcgcaacacgtttaaaggcaccatcatcgctgccggcggttttacccgtgatatcgcagagcaggctctggaagatgatgagctggatctggtggcatttggtgtgccctacatcgctaacccggatctggttgaaagaatgcaaaacggctggccactggcagaaagtgaccgcgccacctactacggcgtcagtggttccccggaaaaaggctataccgattacccggtctggcaggcgcaataa

SEQ ID NO: 240783 - DNA, 702 bp, Klebsiella pneumoniae; identical to SEQ ID NO: 195089

SEQ ID NO: 240784 - DNA, 774 bp, Klebsiella pneumoniae; identical to SEQ ID NO: 195090

SEQ ID NO: 240785 - DNA, 1224 bp, Klebsiella pneumoniae; identical to SEQ ID NO: 195674

SEQ ID NO: 240786 - DNA, 870 bp, Klebsiella pneumoniae; identical to SEQ ID NO: 95286

SEQ ID NO: 240787 - DNA, 753 bp, Klebsiella pneumoniae
atgaaaaaactaaaatttacgttcaaaaatgcggctggtgaagaactggccggattgcttgaacttcctgaaaatcctaaagcgtttgcgctgttagctcattgttttacgtgtggcaaagacctcaaaggcgcggcgcgtattgcgcggaaactgacagagaatgctatcgccgttctccggtttgattttactggtctgggaaacagcgaaggggatttttccaacaccaacttctcatccaatatttcggacctgctttgcgcggtagattatctccgccgacagtacgaagcgccttctttgctcatcggccatagcctggggggatcggccattctgtctattgccggcgaagttcctgaggcaaaggccgttgtcaccataggatcacccggagaactgacacatgtaaaacgtctttttaaggatgatgttgaaaacattaaccagcatggagcctatcccgttgagctggccgggcgggtatttaccttaaagaaacagatgctggacaatattcaggaacacaaaatcgctcataaggtgttcgccatgaacaagcctctgcttatttttcatgcgactgaagatgatactgtgttaattgagcaggccgaaaaaatattcaaagcagcaaagcatcccaagagtttcatttcgttgggtaaggcggatcaccttctgactcatgctcaggatgctgaatacgttgccgatatcattatatcgtggagcgaatgttacctataa

SEQ ID NO: 240788 - DNA, 315 bp, Klebsiella pneumoniae; identical to SEQ ID NO: 161831

SEQ ID NO: 240789 - DNA, 306 bp, Klebsiella pneumoniae; identical to SEQ ID NO: 190402

SEQ ID NO: 240790 - DNA, 276 bp, Klebsiella pneumoniae; identical to SEQ ID NO: 238374

SEQ ID NO: 240791 - DNA, 696 bp, Klebsiella pneumoniae
atgcagttgatccgaaaagccttcaaacgtctgcactatcctgttgatattattgctcagtgtgttcgctggtatctggcttactcactcagcctgcgaaatctggaggagataatggctgaacgcggtatcaccgtcgaccattccacacttcaccgctggattatacggctggtacctctgctggataaggcatttcgccggcataaacgtgccgtgggacgccggtggcgaatggatgaaacttacatcagagtcagggggcagtggaaatatctgtaccgggcggtcgataccgaaggtcagaccatcgactttttgctgacggctaaacgagataccgcagcggccctgcgcttcttccgcaaagccattcgccagcatggcgaacctgaggtggtgaccatcgataaaagtggcgccaatacagcggcactggccacaatcaatgccaacaaatcagaagaagaaatcatcaccatcaggcaaaacaagcatctgaataacctgattgagcaggatcaccgaaatatcaaacgacgaatacgtctgatgctaggattcaaatcatttcgacgggcacagacgctcttggcgggtatagagctgataaacatgatacgtaaagggcagtatcaacacccacaaagtgatggattgtcacccgcagaacaattttatctgttagctgcctaa

SEQ ID NO: 240792 - DNA, 630 bp, Klebsiella pneumoniae
atgaactggcagttagtctctttttttggcgatagtaccgtgctgttacccagcgcggcagcattgtttatcgttttatgtctgcgcacgccttcccggcagcttgcctggcagtggggcttgctgtttggcattaccggcgccatcgtctgtgcatccaagctggcctttatgggctggggctttggtatccgtgagttagattttaccggttttagcgggcactccgcattatcttcggccttctggcccattttcctgtggctgctctgcgctcgcgggacactttctctccgtcgggccgctatcctggcgggttattcattggcgggactggttggctattcccggctggtgattcatgcgcattcaacctcagaagtgatcgccgggttactgcttggcgcttgtggcagcgcgctgtttctgttgctgcagattcgcgcgtcgcgtgttgcggacgcccgcctctcctggggtggcttactcagtttaattgtcataccggttgttttgctgaatatcggtactaaagctcccactcagtcgctactgggggagatagcggtaaagatcggaccactggaaaagccgtttacccgcgcggatctgcataagcatttttactaa

SEQ ID NO: 240793 - DNA, 207 bp, Klebsiella pneumoniae
atgaatgaattaatcaaactggtttccgacatcgacccctttaagggcagtttccctcaagttaaacgctcccctcataatccagatgatgctcgttcaagagcagcaaggaaatattctaacaaacaaagcccaactgagtataagaaaagctatcataaacaatacgcatataatgaattcatgccatttgaatatgcagactaa

SEQ ID NO: 240794 - DNA, 375 bp, Klebsiella pneumoniae
atgtctgatttatttgagggatgcaaatctcccttccgcatttggagtattctggatattccttcttttatctatgaaggaaacaccatccccttccctccgcaacatcgtattgtatttgcttatatggcctcccttgctaatcgctatggtgacgtgagagtttcctatttttctgtgtgtaaacgcacaggtatggatgaaatagaagaagtggcggcaatctttaaatggctggaagccttccgcctcatcaagcgtaaagtaactctctttgatgaagacaaaggcaagaaagaaaccacacgctatgaagttaactatcctgacaatcaatttccttatgaaactcttcccccttcaatggagcgataa

SEQ ID NO: 240795 - DNA, 4746 bp, Klebsiella pneumoniae
atggcagataataaatattctatcgatgattttgaggatgggcaggactaccagattgaagattttcaggatacagacgctgtaggagaaacagcaccccctgctacctccaccccctctaatcgtaatcaggctgctactgtagccctccttaattctaatgaccccgttcaacaaatggcaacctatcaggctgttaacgctgaactggtgaatcatggcaccagccccacaatgcaggatattacagagcaggttacagctaatgagcaagccgctatgcagcgcactacagcccaatacttagcagacccctctatttctgatgaatggaagcagaatgcaatccatgcagtgaatgatcgtaatagcccaatgtataacccccgcgctctgttaggtactaaggaggctgtacaggcaactcccaatcagacagaagaggcagcagatttacggggtttatgggcggcaggtatttcctccgcaatcgccgctcaacgtgaacaacagaaaacgctcaatgctatgaagcagaagagcaacgctgtagcagattattcagcagtggcagaagatatgctccctctggtatctggtgctaaacaggctggactggaaaccgctatgggtggcactggtggagaagcgcttaaagctttcttcctccccggtagctcacgcgctgctatggctgagaagtttaacagccttcctctggaagaacgtagtgctgcgttaacggccttgtctaatgccctctcctctgaggggaaaacgattctactcccggactcaatcgaccagtctaactatgaagccctacagcagattgtagagaatggttcttacactatctcagataaatatattgataacatcatgggcctgttagatattgctggcattggctctatgattaagggtggcctgaaagcaacgggtaaacttgctaaggctgctggggcagtggatgaagcagcagaagccgccagtgctgtagagcgtagctggcagcgccgtttcattgctacagacatccagcctacatctccctctcaggtgattaaggatgctaacccggataaagctcgccagcttcacacaatggctgaggcagatgagacgggggatgtagctgaggcgctttatggtactagccgtactgaggcagtagctggtgatttagctccccagcccggtagcgtaaatggctcagtaaaaaataaagtacatcgcccagagattgcctctgatatcgctgagatggcagacaatgacatcattaaccttgtcactaataccgcctctccccatatctcccagcgtgagaaacaagctttagccgctaacgtgtctaatgatttctttaacgctacggggatgtcatcacggaaagagatgtcagctataacagaagctcctgatggcgggttacacatctccgctgtatatggccctacagacagtggttgggctaacgtacaggatgcgtttaatcaggctcagtttgcattaagtaaatatggtgtagatgaaaatgacattaccatccttatgcggaatggtgatgaatatattcccattgaaagaacagctcaggcccaacttctgaaagggaacaacacgcagattaaaggcgatttccttcttcaagttaatcagcgttatgaatataacgccagtgatttagcagatacacagtttgagaaattcggggtaagttcagtattcaatgtgcttaaccgctttgaatttgctaatggtaaaactgggcatggctctctcacctctcaggtgattgatcctgcttctatgttctctcctgaattccttaaaggggctgtattaggcgatattcagagcgaccgtgtaacagctaagctgatggaaatatctaagccttttgtagatacggttaagaagattccagcagagcggcactttgctatggagcgtcgtattaaagaggctaacctgaaagggcaagccctctctccagtcacgctcaaggctgagggatggagcgctcaggagatagctggtttccagagttttcgtaaaactcaggatactctctgggctttaactaacgctgatttagttaaaagctataaaactcgtggatatggcaaactaacttataaggaaacgggatttgatgttattgcccgtcctgttaaacgctctcaagtgggggacggtgttagagcctatgacccaattaatgatgaagtacgcactttgtcaaaaactgagcttgatgagatgtacgcaggaaacaaaagcattgcagaggccgctgatgtgatggatattgatggcatcaaggttcaacacgtaatcaaccataacagcgctgaggctggttacattcgcccattaagccacggtgaaccaatcctttcatatcggcatgggtattacgctgtacgctacaaacagccccacttcattgagcgtaaactatttgatgagaacggttctcctctgaaagatagtaacggaaatgaaatatggaaaacggtagcaactgctccagatattccctcagctaacaaggccattgaacgatataagaccacctctccgggggaatatcgtttccgaaatgaccttaaaggagaggactatgagaaagctaatacgcaattgcatacagccagcgggctaagtgctcagcgtatccggggaaaacgcttagaagacgctacaggtagtaatatggagcttgatgctgtacacattgagtctccgggggaagcgatgatgaatagcattaatgctattagttctcgtgtctcctatcgtgattggcttgagacatctaaaaagcgcctcatggctacctattctgatgtgatgcctactcatcatgggcgcgctgtttatccttctaatgtgtctgagattaaaggtacttccaaacaagccgcagacgctagggctaccttcgagtatatcagggctatggaaaatggatatactaacttaattgatgatggatataagtcaatcgctaacagctttgctgagatggcaggcactaacggttttggtaaggtagagcgtattttacgtggagcctcagaagcctctcctgttaataaagtgaagtctgttccgtttgtattacagattgctcttaaccctctgcgccaattagttatgcaatcctctcaggtaatccttttagctactcgtttccctgcgtacacaggccatttaattggagataacctccttctcattactcatcacctaatgaatggtggtattcctgaagctgtcctgaagacgttcgggcgcagcaagggagagtgggatgatatgatgaaggctcttaatgagagcggtattacgaaagggattaacaagcatgaccttgccaaagggttagtggacacaaccgttgatgcctcagtgaaaacaatgaaggcggcacgtgacagtaagttgaagagggttactaaagctcctatcaccgtagggaaagctgtagtatccggctctcgtaagattggcttcgatgctggtgagtatatggttcaggcatcctcctttatggctcactatagtgaagctcgcaagggtggcaagttgcttaccaaagcagctctggacgatgtagttcaccaagcccgtaatttcacaggtaacttctcacgctctggcaacttagcgatgaaccagaataccctgtcagtgtttacgcaatacttacaagtgcctgtcaaacttgcgcagctcgtgttaactaataaagctattccactaaagaatcgtgctgctatggcggcgtctgtctccctcctctacggaattgggacagaagacatttacaacctattctcagatgaactacccacaaatgagtttgcgcgtaatgttgtagtggatggcctgttaagcgccagcgtcaacggtattatttctgctgtttctggagatctttctcgcgttgatgttagtgccttgaatcctattaacgcctatggtgtggtggaattcttagggaagcttaatgaaggtggattcagcaaactagtaactgaaagcccagcaggttcccttatctttggcagtaatccacgaatcactaacctgacacggacagcaggaatgttaatggggtttggagatgttgctgaggggattgagcctatgctgtgggggcaattatggagagatgtagctaacctttcctctggtgcttccaatggctataaagctatgttggctcttgaatatcgtaagcagtttgcttctgctggcggtactatcgcagacaacatctccactcctgaggccttcgctattgctctaggattccctgttaagaacggggcggttaattgggcgatagttgaagatatcaatagcaagtataaaactcgaaaagaagatatacaggaagtgttcaaccaacattcccgtattctaattgccgaggggctgggagatgaccagctagcctatcaaattaagatggcccaacttgctatgtcgctctataaggatgacccggaagcctctaagatgtggtgggggatggttaaacagaaagtgcaagatggtgatgaccgtctgttacgcaagattatggaagcgtctaaatgggccactccagaagacactaacaaatggcttgataaggtaccagacatcaccccggaagaacgcgctaattataaagcgtgggcctctatgtttaacaagactcctaaagaagccgctcaggaataa

SEQ ID NO: 240796 - DNA, 525 bp, Klebsiella pneumoniae
atgttatttaaagccccatcattaaaaacccatcgtgtaccaactcgtaagagcagagcattaaagacagaccgatataacgatactaccccggaatactctacacgtaatggatttgctgtttacgcctacaaaggcatagtaattgagaagcacatgaacgtatattacatcggaaggcgcatccagattaaaggatttcctgaggatgtaatgatgagactcaatggtacatttacagccgcctctattctaaaagagttaatcgaccttggtctggagagtgtggatgaaaaaagacatatagaagtaagaggacgccttaagaattggaaatgcccccattgtgaaaccatcaccctgttagacgctaaacataaacatgtggtgtggcgttatatccgtaatgagtggggagatgaggagagacaggatacagggaagcgccgccttaaatgccactattgctttgaggagactctccttgatgaggtggaatatgtctcagacgagacagttttttaa

SEQ ID NO: 240797 - DNA, 1833 bp, Klebsiella pneumoniae
atggcaaatggtttattcgatacttctgatattggcggcagtgttagtggtggcgtctccccacaacaggccgtagctccagctcccagcgctattacctctgctgtaggcagcggggccctaaattctgtagggaatctctttacagctgtggctcaaggatacgcagaaggggctaagaaagctcaggccgctaaagatgctggagtgattagcaactacggccagaagctcacagctttagacgctgctgtagctcaaggttctatgtcacatgcggaggctcaacgccgccaacgtgctctatataactcggctattgctaacaatcctcatctcacagagaagatcacaggcttcactaaagacataacaactaccgagggattgggggatacgcttgctcaagggacagcagtagaccagcagattgtagcagacacaaagagcgccacggctgatgggtttatcaccccaagcatgactccagaggaacaggagaacggccttaacctctatcgccaacgtcaacagcaaatcggggaaatgaaattttatagccagcaattggacattcagaagcagaaaatgagtattcaagctcaggcagagagtattgcggcatcccgtgtacagcgtgctaatgctgctgctgatttacagcttaagaaaaataaaatgtacgctcaacaggctacagcagacttcggcgctaacgtctacgcccatacacaaactcaattagatgagattggtaaaaaactggcggcgggctctattactaatgagcaagctatgtcggaagctaatgctattaaagacagcattatggcgcagacaatgaaaattagaggcgctgctggcggcgattatgtagatagtatttctaagcccatatttgattccattgacaaccgtaataagtttttctctggacagattagcgctgatacccttaaagcccgtctggatagcctgaaagctatcgctgaattacctatgatggctgaccccaatttagccaaaattgctgtagcctctaaactggtggcaggggtagacccttctttgctgggaacctcaggccagtacctgcaacagtatttgaagaagaatgttaaccctagtgtaactcccgccaatcctctgtctactgacccggaagagaaagctgatactaaggtgtacactggttctttagtggatgttacaaataagctttctaataagagccctgctatcgctgaccctaaaggcacgatggaagagctacagaatcacgtaaaccagctattgaaaggggctggcagcttctcgggcgctcatactgaccctaagtcttataatgaagtggttaactatctggctaacccggccttccttgaatatcagaagatgggcggacgcatcgaccagagcaatctggagagcgttaagaatgttatctctgtgaactatctggagaagcttgtccctgccatccagtcccaatgggaacaggctcaaaccactgtaggctatccgcagcaagtgaaacagattggtgctatttctatgccagtgcctaacacgaagaacgccgagaacgttgttcgttatgtatggacaggaaacactattgagtttaaagcggctccgggatatgcagataatgcaggtgtacgcgctaaggtgggagaattgcagcgcaagttagcccccctcattaataaatccgtgatgatgcgtgctcacttagacggctcctctgactattctaaatattttaaaatgagtgaggctgagatgttcggggcgaaagctcaggacagctcctttattaatggacgctaa

SEQ ID NO: 240798 - DNA, 270 bp, Klebsiella pneumoniae
atgaatattagcgacaactcactaactaaagcgtttatacagaataaaataaccagggacggctatttatatgcatacgctcgtaagctctttaaacagggagggcttaatgccctctcttcaagagagcgtgcctatatgggaatgagccactggcagcatttttataattatacagagaagcttgttaaggcgggattagctgtatgtgaatatgatgagcatgggggcattctctacgtttctcctgtagaacgagacaatttgtaa

SEQ ID NO: 240799 - DNA, 558 bp, Klebsiella pneumoniae
atgaatattgggtatgcaagggtaagtacaattggacaggatacagcaattcaagaagcctctttaagggctttgggatgttctatcctatacatggaaaacatatcagggaaggatactaaccgccctgaattacagcgtatgattgataatgtacaagctggagacgtggtatatgttactaagctggacagacttgcacgtaataccaaagatgcattatttattgctgacgcattgaaagataaaggcgtagggctggtatgtatggacttagggcaaacagacataaactctgactttgggagaatgatatacacggttatagctgctgtgggggagtttgagcgtaagcgaatattgcagcgtactcaggaggggagagagaaagctatggctaatggtgttaagtttggaaagcctgttgatgatgaattacatacgagtattgttgattgctggaatagaggtatgaacaagaaagctatagctgaacatattggatgtagccgcactaccgtgcacaaggtaatagaggggattcaatttcggcagtag

SEQ ID NO: 240800 - DNA, 831 bp, Klebsiella pneumoniae
atggctagaccgttctctcaaagatatggacacgttaaagttgaagaagtaattcaggtggagagtcttaataaagactctagaatggcaatctggaactgcatccatgaggagttattaaagtataaacgtcaaaccaatgatacaattgaaactattgctcgaagagtatggattaattttttaaaaaatgattcgtctaaagtccctatatattcatcttcagtaggcgccccagatttagtaggggaaattaagagagtgataataagtgctcattggtactatgtttatgatttggttgagtttattattgatgaaactcgtggaacaaacttcgaagatttatcaatatatttaaattctgttttcaaatcggaagggctagcatactccattattgatggtatggttgttcctgtgtccacccctcttgaggttgagagcatacaggaggggattaatactggcagtgattcttcaagaaaacatttcgaatgtgcattagagttactatctaacagagaacaacctgattttaggaactctatcaaagaatctatctctgccatagaatcattgtgcaagaagatctctggtaatgagaaagggactcttggggattgccttaaaactattgaggataaaggacatattcatccagcaatgaaacgagcattccaacagctatatgggtatacaagtgaccaggggggaatacgtcacgcgttaacagatgatagtgaggagcccacattagaagaagctcgttatatgctggtgatatgtagcgcctttagtaattatcttgtgtctaaaatggctgattaa

SEQ ID NO: 240801 - DNA, 1017 bp, Klebsiella pneumoniae
atgaaattaagtgattttacaaacctttctggtcagttcgtcaagccgagtggtgaggggttccttctgtccagcctggggatctttaccagccgtccaagtgatacgcaaatcattgcactcgatactttggaagatgtgcagcgtgaagtgactaaatcagttgcccgttatggttctgaaatgtcggggcttttatttccccgtgcagctaacgtgactatcaccgcgccgttacatgtctacagctcaaccatcaccagccaggattggcagggcaaaagggcaccagggacaaatcgccagatgaccgctgaagatgtagttgctaatcataccctgaagcactacctgcaaacccgccgtgacgtagaattccagatggcgcagagtcttctgcataacgtgactgaagccacgcatttacgcgaaggcccaaccattcactgggaccagttctggggtattaaccagccgtctgctgtggtgaaaactggcaccagtgccaacgtcattactgagatgcagaacgctgtcacgttgctgaagaaaaatctgggtggctggtcttccagcatcaagcaggtttatctgctagcgagtccgagtcttttcaccgccattcaaggtaacccaaccgcatatcaggctgcattatttggagcgacttcccgcggcatcattttccctgacactttgggtgcatatgatcgatacaacatcgggcgcgtaactgtagtgcaggttgacgatccgctatacggcattgcagatggtgagggctacatgctggcgacgttctccaacatcgtagagggcgacttatctccttatatgacctactgcacgccagcctcacgccacgcagaggttgctaatggtccggtttatccgtcgtaccattacgttctgcgtgataaattcatgaattatgaggtggtcagtgagttatcacagattcagatcccaatgcgtccagatttcgttctgaaaattacgatggatgacgcggcgtaa

SEQ ID NO: 240802 - DNA, 345 bp, Klebsiella pneumoniae
atggcattcgaatatgaaagcaaaaccccacaggatgtattggtttttacggacagcccgattttccacaaacgagaagttatcctcgatctggctgctgacgtgacttgtggtgatgtgattaacccgaccactggcgcggcatatgttgcagccgatgctgataactgtgctgtagcactgcaaaaccaaatcgcaggtgaggcacgtagcctcgttatcagtgatacccaatgtgttttcaacccggcgggtctagttgtagcgactgctgcgaaagatgctgcttacgctgcacttatcaaacagggcaatcgtattgccgacgcaaacactgcaatttaa

SEQ ID NO: 240803 - DNA, 492 bp, Klebsiella pneumoniae
ttgtgtaagcaagcaactggcgatagccagactactaacagcctgaaggctgacccagaagaactccccgatctaactcgtcttttcaaaaatcgtcgtagagacgactcaattgttaaaaccgcacagaaactattggtaatgggtatgactcgcggcaaagtcgcattgctcctccgacttgatcctgagtttgtggcagagttggcggagacgtggaaccctcggtttagacgaattacatatacaaatcaatatgtaactagattaactgtccgccaatattttgagtccggtagtatgctggcaacgatttgccgagatttgcagatgccgctttttaccgtcatatcgcacctccactctgagggcgtgacggatcagcagattacgagccgtatgcctgaccgtacagaccctctatacattgcataccgcaaaaccgtaaaacaccacgcgaacagaaagcacaaacccatccagttgcactaa

SEQ ID NO: 240804 - DNA, 177 bp, Klebsiella pneumoniae
atgaacatttcattcccggatgacacctaccgcacattgctgaaagaggcgaaccaccgcgacatgccaatggcaaaattatgtagtgaactgctgcaaacagcggcaaaaatcattgaaaagaataaaacagataaccagcgaggatattatgacgaccgagaaaccagaaagtaa

SEQ ID NO: 240805 - DNA, 1446 bp, Klebsiella pneumoniae; identical to SEQ ID NO: 109438

SEQ ID NO: 240806 - DNA, 900 bp, Klebsiella pneumoniae
atgtttatggatatcgaaggtcggtatctggatatcaagcgtcgtttgaaagtgctgtttgaccagcggttgactggcctccagcgggaagttaacggcgagcagtcgtggctgatgtgcaataacgaaggtgctgatctgtcgctctaccaggtgaatgccaggacctacgtttacgacatgacggcggcgcagttggccgaccttctccagattgtgcaaacgatactggatgatgcactgctcgatggtggcagccagaatctctgggcactagattatgtcgcagcagagtatgaacgaggaacgcttgaagctttcaataacctgtctcagcaatccccagtctacaccagtcagacgacactgcagcaactactttccagtccggcgtatcagaaccagatcgccagcgcctacatcagcacatacagcgactggaaggggataagcgacgccgcgcgagccgatctcgctaacgtcattgccgacgcgataggccggggaattaatccccgtgaaacagccagcatagtcagtaagcgcctcgatgtttcgatgtcacgagcgaagactatcgctcagactgagcaggtaggagcgctgcggcaggcgcaatggaacgaaacggactgggcggccgacaggttggggcttaagactggcctgttatggctgtcagcgctaaagccaacgaccaggtggtggcatgcagccgaacacggaaaagtcaagacgactgaatgggtcagggagttctattctcgcgacggcaacaaatatcactgttactgcggccagattccggttctgctcaacgacgacggcagcatatttaacaaagggctggctgagaagctggcgaaagaacgtgaacagtggctcaagccagccgcatga

SEQ ID NO: 240807 - DNA, 3303 bp, Klebsiella pneumoniae
atggcagaagtaccgttaccaactccaaccgacaatcaggtgccaagcactgatatccgggatgcagtttatgccggcgccatgctggataaggttgttaccagcaccgaactgaaatacaccgatcgcctcggcggtgagcactacaccgtagatggaattaaggcggaaggggacaaggtcgttgaggaaactaggcagaacctgatccctctcagtcggcagtatatgaccctggaggcagctcaggcggatattgctaatatccccgaagggagcacaacgtattaccgcagcccagatgatagtgcgctggctattgaggtcatcaataacggaggcacgctgagcaagaccggcagaattatgcagtccagagcgtatacagacagtgttttcgacccgctcagtgatgctgttaatgctaattttaactccctggtagctgtcctgacggaaaatatggcgctcaaagaaaccgtgacggctaccgggcaattaaattcagataaaaactcagttctgttgtttaaatctggatcgctggttttcggcggcaatgctcctgcattgatatctgccgtctcagatgataaccagacgatattttctcgcaaaatatatccaggtgaatcattcgcaaatggggtgtggcgaacgccatatcgggatcatacgttcaaagcgtcccaggatgaaattagctcggtgatcatcggtgctaccgccgctattattgttatgcgttcctcgttgacgccggatgcctggttcgacggatcatctaacaccgtattcagtgacggatttactacaatgtcgcagggggcgcaggcgggtgcatctgtaaactctgtggcgggtggtgatggcggcaccgttcgttttggtgttctgaattccgatattaccggagccgggtatgaactaactgccgccggggttactggttacttcgccaatacgtttaacaacattgccgtttactacagagctgttgccccgtcactgtatattgacaccacaatttccggcgtgtttaacggactggcaacggtgactatcgagtctcccgctacagcagtaatcgaacaatatacctaccctgaaaaagaggttatggccccggcaaccccagtgggtgtatataacgctgaaattaaaaacattaccgcgcggtcacttgcaggagtgccttccgagattgctatccagttttcaccaggtgaggttttaacgcaggcggcgttacgcctgacggatgaaaacggcactgagtacccatgtcagtttgctggggatatggatgcgaatctgagacgtgaatcagacattgcgcggtatgtggataactcatttaataccgggaaaattattttctttgccgatatccctgccaatacctcccgtaaattcagactggagacttacggcgctcgcggtaaaacctctgctgagtgggactatccgaagctaaccagaaacctgacgactgaccgttgggaagttacggttggcgattttacgtgggaatttttgacatccaccggcgcccttgcttctgtacggaaagggagtgcctcaataggggtatcaacgctgcgcaggatcattgcagtgaccgacggtgcagcggttgaaaatactaacattgaccgtttctcactgagtctgattagctcagggccggtttttgccgaagtggaacaaacgtcatatcatgcggcgcagggtggtgttcaggcaggggatgttaaaagcgtaacccggtatcgtttattcaatactggcgcaatctatatctataacgtattccgtgcggagcgggaaatcccagccaacaacctatacggtgtgcgcctcgatgtgcagctaagtggcgggtctggcgcgtcatataccacccctgctggtgcggccattgctaccaatgtcccgtttgaggggcataccacatggaacttagttaatgagtttgtaattagtgacgccctgcgtgacaccatttccaacgagaatacgtggggggcaatacgtccctatcctagtgttttgatgctagtgcagggaaccgcacttcgggcgcgctcaggatggcaattcacttcattaaccaacaataatctactgaactatgtcaccccgaaaggctggacatggccggcggggcattggttattcccgtactcagtgggcgcagcagagaacactatcagtaatagcgtattaaaccggccttgcggcgtgttttatcgcagcactccaactcatgttttacgccagcggatttaccagcagctagaacgtctcatggatggagtgttcgacctgtataccaatgaggagaacgggcagatttctgccacagactacagcggttatcggtatcctcaggtatacggtctgtacgatgccctgcgcaatggagaggattttgatacccgttatgggtatttcaaaacctttatcaccgacaaaatcggctcgtacagcaactctggaaacgcatacttaaccggcgcgtggacgctgcaatttagtgggcgtatgtgctttgcggcagtggagatgtactaccgctatgcgcagaaaataaataacaccgcggtaatggatgacctgaaaatattcattgccagtgcgtgcgatggattggcaacaaaaattgaggcaaatggtgccgcaccgctcggggggaatgaaaatatcaaggggcctgctaactccaacatggaagcatatcgtatgctggctatcgggatttatgctggactggataccagcgggcgttatcaggctgcgataaacacgctcgttaatatgatgaaaacgaatagctacgctactcacgcctacccgacgctaatggatacgttcgatgcgtacccgttcctcaaccgttggttgtcgtatgagtgtcatgggtattacgtttaccttcgtgcgtgccggttgctgaataccacgccggagtttgataactcaaattacctgatgagagccatgcaggggaatggaacgcctgagtatctgacattcacccgcgcagaagaccgccgtggtttctgtgagacaccgggggccacagcgataggcttattgatgcagggcagtgtgtctggaacaaacgcagcagcacttttgctggataaattcgagcgcgactggtcaatggaccctatcgctcagccgcacttgtgcgatttccggcagctgacaacaccattgactaccgcatacgagggtttcgagcacgttgtgaatcagttcgcgctgatccttctagatagaaagatcggatag

SEQ ID NO: 240808 - DNA, 273 bp, Klebsiella pneumoniae
ttggcttatcatacctcgtatatggtgtatcgtgacgatctggtcctgcagcagcgtacctattcggtcatccgtaaccatctgctggagatgatgctattaagcgaagagacccgacagcgggtatctattcttgagtatattcaggacaggacccttctgtcgcgtagcagtattctcaatgtattgtcagcattaaagaaaggcggttatattgcctttgcccgcggcggttatttacaaaatatcgtctcacttcctgaaaaattctga

SEQ ID NO: 240809 - DNA, 558 bp, Klebsiella pneumoniae
atgaaaaatgaaccgctttgccacgctccctgccccatcgcccgcagcctgggccgcatcggcgacagctggagcatcatgatcctgcgcgatgccttcgcgggctttacccgctttgacgagttccagaaaagcagcaacgtcgcgcccaatattctgtcgcgccgcctgaaggaactggtcgatgacggactgctggagaaggtgtgctacagcagcaccccgccgcgctacgaataccacctcacgccgcgcggccgcgatttccgcatggtgctgctggcgctggcggaatggggtaatcgccacttcgcccccgaagggcgtcagatgcagctggtggaaatggcaacccagcgccacgtggagccagtcatggtggataaagcgactggggaagagattatcccgggtaaatacgccatggtgccgggccccgccgcctcgccgctgatgaaatatcgtcatgaatatctgctgcgcaaacgcgaaggcgatagcggacaaaaattccagcctgaaccttacagagatgccagcaatgaatccgaccagtaa

SEQ ID NO: 240810 - DNA, 1359 bp, Klebsiella pneumoniae
atgacaaacagatatgaaaattatattgatgatgttagcgatgatatcagaacctgtattgaaggaatgggttgccaacccattttattcatcggctctggttttactaagcgatatcttgagggacctaattgggaagagttacttttccgtttagctgaagactgccctataattgataaaaagtttgcgtattataaacaaagacacccagatttgatagatattggtagcgttttttctgatgcatataatgaatgggcatggggaaaaggtgagaaagaatttcctaatgaattatttgaacaaggaacccaacccaatatttattttaaatataaaatagcatctatattcaattcattaacagaaggggatattgacttatcacataaagaaatcgaactacttaaaaaaatccatccacattcaattatcacaactaattacgataacttacttgaaaaaatctaccccgaatttactcctgttataggccaaaaaatactttatgccaatcacggtagtgtcggtgaaatactaaagattcatggctgttgctctgatcttgatagcattgttataacaagagaggattatgatggatttattaaaaagaaaaaatacttaagcgctaagcttctaactttcttcgcagaacatcctttacttttcattgggtatagcgcagaggattgtaatatcaaaaacatcctatccgatattgatgaattactatctgaaaatggagaagtgattcctaatatttatattcttgaatgggttagcaaacagaatgaaaatgattacccgagaagagaacgactaattcaagtaagccaaagtaagagcattcgaattaagagtatagtggcaaatgatttttcatgggtattctctgcatttggggctaatagtgccttagataatatcaatccaaaattgctgcgagctcttttagcaagaacatacgatttagttagatctgatattcctagaaatcctgtacaagtagactaccgtgttttatcgaatgtaagtcagtcagaaggtgaattagcaaaactttatggtattgcaaattcatccgatgggatggcttttaatgcgagttatccttttacattaaagacgcttggacaagcacttggatttaaaggatggcatgatgctaataagttattagaaacagtgaaaagcgtgacaggtgttgacattaaaacttttgacaacaagtatcattatgccatcatgaatggtaatgaaatccaagcacatagatattctcattaccttcgagaattattagaaaaagttagagatggagagcaattcgagttaggtgtaaaagtgccttaa

SEQ ID NO: 240811 - DNA, 1113 bp, Klebsiella pneumoniae
atgttgattgggcttgatggttcatttcatcgaatagattggaatgaagccgtagatagcatagcaaaaaaattccctctttttgaaactgccgtgagagtgtctttttctgatggtgagcttttttataatcccaaagtaattaaagtgtttaacgatccaatgattaagcctgtaattataaatcaactcaattcactctcaagtgctgatattatagaaagattttcttcgcgagattctttctggcaggaggaatctcttccattcgatttcttaccttcagacactgaagtatattacagtaggttttatgctgctggtgaagcgggtctttattcaacaacaaaatctcagatggggattaaaaaaaacaagtccgacttaattaaacatcatgatagtaacgttatacaagttaaagcttctgagaatgccagcgctattgcaatagctgctggtaacgatgggctatttgaatttggatttaacagatatgaacgagggagtttaaaagaacccaagcatattgcagacataccatgcaatatttgcgattgggcgtttcaaagcgtgataggttctacattaattgaatcgtactttgttaagttcagagaagagaagattaatgataaaaaagtacgagtattcgaccagattatccagactaatgatatttttggttcgagtagtgatgaccaaaattttacttggggttctcgagaaaagttctatcgagcgacagaaagtggaattgagatcgtgaattataatggtaaaaacaacaaaaatcatgacacttttgtaaaaaaaggaaagtttttactatttaataaggattttcaacaagaagagcttgaggatgtcatctctacgggagtagctccgtttggcactataattgaacttgcagaaaaaattattgtgttacgtagcgatggtataacagatgtatttaagggggagctcgttcactggcgaatattccctcggtctgagcactatagcaatcaattgcatcttatatatgaaaaccatatagagatagtttcatttgttcatgattacttcgtagatcaagatattaagatctttgggttttatagatag

SEQ ID NO: 240812 - DNA, 393 bp, Klebsiella pneumoniae
atgccgtacattccaaatccacagcacagaaacacagcttttgcgtttcaaaaatcgcaatggatagttgccgaacccattgaaatcgaatgttatgatacggcccaaaaaaataagtggtcatataataatagcttatggggtatttactgggatgagcaggaaaaaaaagttattgaaataggtattgcccctcctcctatctcatgcaatgtgcatatggctaaatttgtttgcgacagccataataattggcatggctatccagttgcacattggagggcaccgtttgaccgtccagataccaatgtcttgagaatgtggcttgataatggttatattacggcacccaaaatgtctaagataataaggggtaaaaaatgcgccctgtaa

SEQ ID NO: 240813 - DNA, 351 bp, Klebsiella pneumoniae; identical to SEQ ID NO: 168198

SEQ ID NO: 240814 - DNA, 186 bp, Klebsiella pneumoniae; identical to SEQ ID NO: 168197

SEQ ID NO: 240815 - DNA, 1275 bp, Klebsiella pneumoniae; identical to SEQ ID NO: 168196

SEQ ID NO: 240816 - DNA, 903 bp, Klebsiella pneumoniae
atgaatcaatcttatggccggttggtcagtcgcgccgctatcgccgcgacggctatggcctccgcgttacttttgatcaaaatttttgcgtggtggtataccggttctgtcagtattctggctgcgctggtggattcgctggtggacattgccgcctcgctgaccaacctgctggtggttcgctattcgctacagcctgctgatgaagaacatacctttggtcatggcaaagcggagtcgctggcggcgctggcgcaaagcatgtttatctccggctcggcgctgttcctgtttctcaccggcattcagcacctggtgcgtccggagccgctgcaggccgccggcgtcggggtcgtcgtcacattgatcgccctcgttagtacgctggcgctggtgactttccagcgctgggtggtgcgaaaaacccagagccaggcggtgcgggcggatatgcttcattatcagtctgatgttatgatgaacggcgccattctggtggcgctgggcctatcctggtacggctggcatcgcgccgacgcgttgtttgccctggggattggcatctatattttatatagcgcgctgcggatgggctatgaggcggttcagtcactactcgaccgcgccttgcctgacgaggagcgtcaggacattatcaccatcgtgaccgcatggcccggcatccgcggggcgcacgatctacgaacgcggcagtcagggccgacccgctttattcagattcatttggaaatggaagataacctcccgctggtgcaagcccacgtgattgcagaccaggtggagcaggcgattctgcgccgtttcccggggtccgatgtcattatccatcaggatcccagctctgtggtgccagcggcgcagcagggcttttttgagcgttag

SEQ ID NO: 240817 - DNA, 624 bp, Klebsiella pneumoniae
atgagcggcgatattaaagcagtatttgacagcaatttgcttgcaattaaagcgggtaccgttcaggtatttcattttgatatggcgtcccgtgagtttctcggtaccgaggaagtatatattcatgttggtgttggcctgcctgcattttcatgtcttgaagaacctcctgtacaaagtgaatatcaggttgctgtacgttctgaagataatttgtcctggtctgttaccgaggattatcgcggtatcactgtctatgacattaagacgctggccagccacgttattaccgagccaggccccatacccgatactgtaacgacctctgctccatcaaccccatacgataaatgggacggctctgcctggctaaccgacgcagacgctcagcatgcggctgatgttgctgttgctgatttgcagaaaaaagcggcaattgctcaggtaacggcagatatttccattcttcaggatgcagtggctcttaatatggcgactgatgaagaaaaatcacaattagcctctttgcaggcgtatcgggtgctgattaatagggtagacacgtcccttgccccgaatattgtttggccagttacgactatcagggagaatgatgatgtctaa

SEQ ID NO: 240818 - DNA, 261 bp, Klebsiella pneumoniae
atgtcggcggcaaccgataacgtcgggctgttcttcggcgaagatatttttgtcgccttcggcgcgatcatcttcatgcacaactttatgctggagtcgggtgggatccagacagaaccgttgcatattgccctgtgggggatcccgacggcgatctgcgcctttctgatccacgccgcgcgcctgtggcgactcgatcgccatctccagcgcgagctggaccggataaacgccggacaggcgaaaggcggtgcggcatga

SEQ ID NO: 240819 - DNA, 309 bp, Klebsiella pneumoniae
atgcgaggcctgcaagggaacgggacgccggattatctgcggtttatacgtgctgaggaccggcgcgggttctgtgagacccccggcgctgcggctatcggcctgctgatgcggggcggcgtatccggcgttaacgcggccgcgttgctgctggataaattcgagcgtgactggtcaatggaccctattgcacagccacatctttgtgatttccggcagctgacaacgccgttaacagtggcatacgaggggtttgagcatgtcgtgaatcagtttgcgctgattctgctcgacagaaaaatcagatag

SEQ ID NO: 240820 - DNA, 285 bp, Klebsiella pneumoniae
atgaatgaccatatttatgaaacccacgcccggataacagctctaagaagcatcattgcttttatcattcacaccctgcctgaagaacaaaaaggccctctgcttcgtgcaatagaaatcatttcagaagaaaaattgatggataatttcgatttttctcatacgagcgatgttacttcggaaaccatagaaaaaatgaatgctgcttatgcgaatgtttttaaagaggtacttaatttttcttcacaggacgtagagcctgagcaaaaaaaatacctgcaatag

SEQ ID NO: 240821 - DNA, 147 bp, Klebsiella pneumoniae
atgaccaaggcaaagaatattgagtttcgactgagcaaacttgagaaagggccagacaagaaggtgctggcctttatggataataaggctaaagctattgcaggtattttttttgctcaggctctacgtcctgtgaagaaaaattaa

SEQ ID NO: 240822 - DNA, 2520 bp, Klebsiella pneumoniae
atgaatgttaatgataggaaagttttatgtactgttgaccaagctttttatggtgaacgtgaagatcaatttggaaagttaaaagcatattatgaagtatttagtaatggtgaaataataccaataaatcaaagcgagtttttctgcgagacagaacaagtattcgtaacaggtggtttttctgaaattaaggacaagtttaaagacaacttattcgaggccacttgttccccaacaaacttcgaaaaaaaagaaggcgattgcaaatatgttacaagatttaatgcatgtgaggaaataaaaggactccaagtcagtcagattataaatgaaaaactccctttacctgaagatcctattatagtcacagaaaaaaaaccaacaacaaagactattgttattgaagaaaatgattatatatttgggccgttcgattttacatcatatcatgatgaatcatcagacacattcacattaaacttaaaacctataaatacccctctaaatagaatcccacaatatcacattgggaaaattggcattcaaaaatgcattgaaaatatagcaaaaaactctaaaagtaaaatttcatatttatcaaacataaagagaaaccttgaacaaattgatgatgtgattgactttatctccgacgatcaaattatttcgacgtacggcaacaaaatagctcaaaattctgacataagaagctttactaaaggaactatatctcaaatacgtaagcatttttcatcctccaaggaatttagagcgtttcctcaaagatttaataggttattcaattgcttagaaaatgcagaaggatgggatgaaacaagagttgaattattagatagttttatatcaacggaaaaagggaagcagattgttaaaagcttcattgaagaaaatcgggatactttctttaaggaagaaaaagagaatttaactcgtaggttaaacaatgaaacctctaaattaactgaggtaatagcagaacttaataataagaaagaatctcttgaactcgaaataagaaaaaaaacgcgcgaacgtaatgatattgagataaataacacagactcactcccaggacttactgaagaagctcagaaaaaacttgatatacaattatcagaacaaagaaataaactagaaagtttaaattcggatatcacaataaaagaagagagactctctaagctaataaatctagaaaaacttactacagaaatagatgatctcgaaaaagatcgcgacagagctcgtgatagaatgaaacgcatgcaggagcaagttgaagaggtagcctcaaaattaaaagaaagcaatgaggctctaacgagtcgcttggtaaaacttaaacctgatgttgatgctctctgtggtgttagaccgaaaagcaactctaaaaaaagagattttaatgtcactattagaaagcaacaaaataatatcgagacagaagatttacgtgaagagattatagatagtgtactggatgctttaaataaacaaggccgcaaaacagattattcaactgcggccaatattttaacaactatttctcaaacgcaatttactctgtttagcggactacctggaacaggtaaaacatcccttgctaaaatgcttgggaactgtttaggccttcataatcgtttattgaacattccagtagcaagaggctggtcatcatttagggatgttctcggtttctataatgctttatcccagtcatttacctcttcatcaacaggtctctatgaattccttattcacttacataacgaaaagatgagtaatgtggaatctgcggctgcaataattcttttagatgaatttaacttgtctcaaccagaacattattttagcccgttcctagaaatggcagatcctgaatctcaacgtacccttgctaccgggaatcctgacgagccatacttattagttcctgagtatcttagattcctaggtactataaaccaagatgaaacggtacagacgctgacacctagattattagatagagctgccattatcaactttgatgactttgaacataattatgatgttgtcattaaagagtctgaagttaaatcaaatatactaatggaagcaatatctgggaatgattttataaaagcatttcagccaacaagtttagaaatcccgcaagatgttgaacaaacattattatcaataataagtgttttacgtgatgatagattggaatttggcattccaattattgtttcgtacagaaaaataaaggccataagatattattataatatcgcaggtcctttgatgtctatggagagccgatacttagcattggactatgcagtatctcaacatatattacctctactaaatggttatgggcaaggtttcggtaaaaggttagaagcattgttaaatatcctcccagaggaaatggaaagatcttgtcgtttacttaaaagaagtatcaatcatggaagtcaaaatctctttgggtatgggaataatttatga

SEQ ID NO: 240823 - DNA, 1137 bp, Klebsiella pneumoniae
atgaagaaaaaaattgttaaattttcggcattagcattggcaatagggtttttatctggttgtaccataattccagggcaaggattaaatagcttgcggaagaatgtggttgaactaccggatagcgattacgatttggataagctggttaatatttatcctatgacaccggggctgatagaccaactgcgtccggaaaccctgatagcacgccctaacccgcaacttgataacctacttaaaaactatgagtatcgcattggtgtgggtgatgtgttaatggttacggtatgggatcacccagaattgacaacaccagcaggtcagtaccgtagcgccagtgatacgggtaactgggttaattctgatggcaccattttctatccctatatcggtaaagttcaagtagtaggaaaaactttaagtcaagtcaggcaagagataagtagccgattggcaacctatattgaaagtccgcaggttgatgtgagtattgcttctttccgttcgcagaaggtgtatgtaacgggggaagttgccaaatcaggtcagcaacctataacaaacattcctctaactgtgatggatgcagttaatgctgcaggggggctggctactgatgcagactggaggaatgtagttttgacccataatgggaaagacacaaaagtatctttgtatgcactaatgcaaaaaggcgatttgactcagaatcatctactctatcccggcgatattttgtttgtcccacgcaatgatgatctaaaagtgttcgtaatgggggaagttggcaaacaaagtacgatgaagatggatcgcagtggtatgacacttgctgaagcattgggtaatgccgacggtatgtctcagacaatgagtgatgccaccggtatctttgttattcgccaattgaaaggtgataagcaaggtaagatcgccaatatctatcagcttaatgcgcaagatgcttcttctatggtgttagggactgagtttcaattacaaccttatgatattgtttacgttacagcagctcctattgttcgttggaaccgtgtgatgtcgcagttagtaccgacaattacaggtgttcatgatatgactgagactgctcgtttcatcagaacgtggccataa

SEQ ID NO: 240824 - DNA, 927 bp, Klebsiella pneumoniae
atggatttaggtatagatgggtatttaatttccttaatattatcatatgtagtttccactatattttgtctatgtaattctagagatgttggtatttcttacaaactggtttattccaaaacattaaggaaaatcatatcgttttcatttccattaatccccaattactcaatgtggtggcttgttaataattcaacaagatatgtcgttctgagttttgtggggctatcggctaatggattatttgccgttgctagcaaaattccaatgtgtattaatgtttttgtgactgtatttcaacaagcttggcaaatttctgcgtttgaggaatttgagtcacaggatcgctctaagtattactcttcggtttttaggcattactacttatttcttttcttacttgcatcattcttgcttgtcataaataaatggatttttacttatttagtaagtgatgaatattttttagcatgggagatggtgccattcttagttttcggtgtcttgtaccaaacattttcatctttcctgggtacaatatatactgcaaactataagactaaaagtgtattcatgacaagtgcgattggggctgggatttctattggttctaattttatatttattcctttatatggtgctgcatatgcagggttaggtgcggcattgggattctttattatgtgggttttccgtttaagagacacgaggaaaatcgtttacacggagcttaattatcttgaattctttctactaaatgttgtatatcttatacaaattgcacttctctttatttttcgcgaaagctcattatttatggttactgcagtacagtcttttacattctgcatcgttattttcatttccaggagttttatttatactacattgacatttgcgaaaaaaaagtttttaaaaaaacattga

SEQ ID NO: 240825 - DNA, 1095 bp, Klebsiella pneumoniae
gtgtacgattatttgattgttggtgctggtttctttggtgcggtatgtgcttatgaattaaccaaaaaaggtaaacgagttctggtcattgaaaaaagagatcatattgcagggaatgcttttacagaaaactgtaatggtattaatgttcacaagtatggagctcatatattccatacaaatgataaaaaaatatgggattatgtaaatcaatttgctgaattcaacaatttcgtgaattcccctatagcctgttataaaggtaacttatataatcttcctttcaatatgaatactttttatcagttgtggggaactaaaactccagctgaagcaaaaaaagtcatcagtatgcagacagttgagatgtctggtaaggagcctaataatcttgaagaaaaagctatttcattagttggtcaagatatatatgagaaactgattaaaggatatacagagaaacagtgggggcgtagtgcagtagatctacctccttttattatcaaccgactacctgtacgtttcactttcgataataattatttcagtgatcgttatcaggggatccctataggtgggtatactaaacttatagagaatatgctttcagggattgatgttgagctaaatgttgattacttctccaacaaagaaaaatatacagccatggctgataaagtcatatatacagggcctattgaccaatattttgattattgctttggtgcgttggaatatcgttcgctacggtttgaaaatgaagttttggacgaaggcaactatcaaggggttgccgtggttaattacactgaatatgatattccttacaccagaatcatcgagcataaacatttcgaaggtatagagtctagtcatactgttataactaaagagtatcctgttgagtggaagttgggatctgaagcttattatccgataaataatgaaaagaacatggacgtttttaaaaaatacagagcgctttctaaaaatgaaaaaggtattatttttggggggcgattagctgaatataaatactatgatatgcatcaggtcatagcttccgctttaaagaccgtttctgagctaaattaa

SEQ ID NO: 240826 - DNA, 831 bp, Klebsiella pneumoniae
  misc_feature (63)..(72): n is a, c, g, or t
gtgctgccggtcatgttattgatgcaattgaaagtaagttcaaacttgcaaatgtaccagtannnnnnnnnngtacaccattctgcagatggtaatttccctaacggcatccctaacccattgctacccgaatgtcgtaaagatacttctgatgcggtagttaaaaataaagctgacatgggcatagcctttgatggcgattttgacagatgttttctttttgatgagaacgggagctttattgaaggttattatattgtagggttacttgctaaggcttttcttgaaaaacacgcaggcgccaggattattcatgaccctagactgagttggaatacaattgatattgttactaaagcaggagggattcctgttatgtcaaaaaccggtcatgcttttattaaagaaagaatgagaagtgaggatgcaatttatggtggtgagatgagtgctcatcattatttccgtgatttcttttattgtgatagtgggatgattccttggctattagttgctgaactaatgtgtgtgagtagaaaaccgatatctcagctcgtgaatgaccgaattatggcctatcctgcttctggtgagattaattgtaagttaacaaacccttctgagagtataaataaggttctcgaagaatataaaaatttagccattaacattgattatacagatggtataagtgttgaatttgatgaatggcgttttaatttaaggacatctaataccgaacccgtggtaagattaaatgttgagtcaagaggtcggtcctctttaatgattgaaaaaaccgaagagatattgaagatacttcaagcataa

SEQ ID NO: 240827 - DNA, 543 bp, Klebsiella pneumoniae
gtgtcgcccaacaggctccagcgacagttcaatccggatgctccggatgagcgttgggtaacggacataacctacatcaggacccacgaaggctggctgtatcttgccgtggttgttgatctgttctcacgcaaaattatcggctggtccatgcaatcccggatgacaaaggacattgtcctgaacgcactgctgatggctgtatggcggcgtaatccccaaaaacaggtgctggttcattcggatcagggcagtcagtacacaagccatgagtggcagtcgttcctgaaatcacacggcctggagggcagcatgagccgtcgcggtaactgccatgataatgcggttgcagaaagctttttccagttgttgaaacgagaacggataaagaaaaagatctacggaacgcgggaagaagcccgcagcgatatttttgattacatcgaaatgttttataacagtaagcgtcggcatggttccagcgatcagatgtcaccgacagaatatgaaaaccagtattatcaacggctcggaagtgtctag

SEQ ID NO: 240828 - DNA, 570 bp, Klebsiella pneumoniae
gtgattgattccaccgggctgaaggtcttcggtgaaggcgagtggaaagtcaaaaagcatggccaggaacgccgccgtatctggcgtaagctgcatctcgccgttgacagtaaaacacatgaaatcatctgtgcagacctgtcgctgaacaatgtgacggactcagaagccttcccgggtcttatccggcagactcacagaaaaatcagggcagcatcggcagacggcgcttacgacacccggctgtgtcacgatgaactgcggcgtaagaaaatcagcgcccttatcccgccccgaaaaggtgcgggttactggcccggtgaatatgcagaccgtaaccgtgctgttgcgaatcagcgaatgaccgggagtaatgcgcggtggaaatggacaacagattacaaccgtcgctcgatagcggaaacggcgatgtaccgggtaaaacagctgttcgggggttcactgacgctgcgtgactacgatggtcaggttgcggaggctatggccctggtacgagcgctgaacaaaatgacgaaagcaggtatgcctgaaagcgtgcgtattgcctga

SEQ ID NO: 240829 - DNA, 135 bp, Klebsiella pneumoniae
atggaatggaaaggattcgaatggaatgcaatcgaatggaatggaatcgaacggaatggaataaaatggaaaaaactggcaagaaatggaatcgaaatgaatggagtgttatggaacggactcaaaaggaattga

SEQ ID NO: 240830 - DNA, 2313 bp, Klebsiella pneumoniae
atgaggtttttttctcggcggagcataataaaaggttttatgccactccctttctatatgtttgcaacaagttctcatgctgaaagatctcggactaatgagagcccccctactgtggcgtttaattatgagaaggacttcctttccaaattttatggtataccaacggaaaagattggttttttagaaattggcactgatgttacggatcttgatttaatcattgataatgagaataataaaatatggtggtgttccgaaatatcttccacaataaacggatggagttttccaccaaataataagagtaatcgtctggccttgtctactcaggatggaattatatatgcccatgcctttgttcatgcgcttgatgttaattcaattgaagaattaacctatttgccctgtctgtctaacactgtcgtaaaggttataacagggccgagaaaaggtatttttagatttcatattggtgatttctctagccatctgctacaagatcctaataatggtatttttgttccttcttctaaggacaaagaaggtcgattaggatgttgggttagagattatggacaaagttctgcatatatcattgaccgctctatatatgtaaacgttaattggtttggagcagacccgtctggtgccggctggtcttctgatgcgatctacagtgcatttcaaatctcaaactgtgttgagtttgacggcctttataagtacaaaggtagagcgataccttcgggtaatttttctattaaaggcaataactctacaattaatatagataaagatacaaccttattttgttgcctaaaaaccattggcatgattcatgttgagaatattaatcttaatggtggtaaaatttgctttgatttttttagagttaaacgttgtgattatactgtaactagaactctaaagaatattaacttcaaaaattatactttcatggcaatccgcttgccaatgatcgattgcccatggtggactattgagtcatgtgtttttattggttgccttagtaatggtactattggtttatggaataatggaggagataataactcgataaggttcaacaagttttataaaaatgaagttcatatttcaacctctttacctcatagccataatcttatatttaataacgatttcggacagtttgaagagaatgatattcctcgtgctaatatctggattcgcgtacctgataatataccaccatttacaggtggaaccggggtgctttctattgaaaacaataaattcggtaatgaaaatgaatgtgtgaatgatgtaaaacttcttcttgctaatattattgccgaagattgtctaccaaattacaaaagctgtctaggtggaattcctgcttgtcatattatatttaagcataactttcatttgtcccgtgctagtaaaccagcgcattggatgcgtagtgtaggtggttggatgcctcaaaatctaatttttgaattagataacttgcaatatagctcatttatgcacggtgaccgttatttttgtttcatggatcaccataattctgattattatgcaatacaaataaggcctttggcctatagagatagtaatcttatttttcgcggtgaagtatctaacaatgtgaatatttcttttgatttcataggggttagcagttctatctgggatggggaccctgatactcattcctcttactcggcaggtattggactagctactaaggatcttacggaatgcatacttcctagagtcgatattaacgaaggtgctatcgttattccaagcaatgactcattgggtttcaacgaagcgataaatattactttatcaaattcaaattcgttagttagccaaaaattatctcctattgtaagtgcttcaccggcctggatccaaggggagttgtttctaccgaataatacatcgctttcagaagtattaattgatgtggtttatttttatgattttaaacagaaagatttgacttttaataatcgattccaagttttggtcaagaaaaatcaatggacatcatattcttttcccctaactgcacgacgaaccgatatccattatattgggataagaccatcatttgaaactaaaacattcccttttagtgtaatctgggggcgttctaggctttatttaagtcgtgctccgggtgttgttggtaatcataagtttgataatttaatattaaacgatttaccaactaatcctgctgggttgccttctggagcattatggcgcgacaaggagaactctaatattctgaaaataaaagactaa

SEQ ID NO: 240831 - DNA, 909 bp, Klebsiella pneumoniae
atgtttttatctttggatgtttatgcaatttattatgatgcttgtttacgttctaaggtcaatactataatcaatatattcggattgattttttcacttggtatacgttgggcaatcgctttttttaaataccctgcggaatggttatttgtgccgattgttttgacttcttttgttccttttttatgtcgttttatcttttttcaattatatgagggagcggtaaagctaaccaaaaagaaaaagggattatatactaaacatctgttatcttctggtagcgctttcgtacttacttctatttcagttgcgttgtatacgaggatgtccatttttttgttaggatacttacaaggtaaggatgtagtaggtattttttctattgctgcaactctagcaacatcttggtcttttatattatatgcttttataacctccagcttgccatcgattttttctgaaaaagataagctattggctgaaaaaaagaccgcaaaccttaatgttctaataattatgatgtcctttggggtcattttcttagcaataattcttgctaaaaaattcatcttatatttttatggtgttgaatatactgatgcattttatcctctagtaattttatgcttttctacaatgctatcagcgttaggtgctattgccgcaagatatattgcttatttttcaggctattcatttctatccaaaaaaactttagtagttaccatgcttagtgttattttaaattatctatttatatataaatggggtatgcttggggctgcagtttctacactacttgtagagttattctcgttgaccattcttaattatttttttgcacgtggcgttgtatataaattacataaaagaacggttgtatacggtataaaatttaaatttaaataa

SEQ ID NO: 240832 - DNA, 882 bp, Klebsiella pneumoniae
atggcaaaagcgacaagaaaagacctgacgtggtttgatattaataattatgattttatcaatgatttgacattagttggtctaattaaagagcttgagtggcgggaatgccttttcaacgaattagccaatccggatgattcttttgattatgaaaatgatatcaaattcaatagaatttttaacggagatgcaaatattgaagttcttagcgatgaagaatgtgagaatttggaatttataaactcagtacaagaacaaacaccttctttaaaaaatctatatggtgagctaccagcactaccctgcagagaaggagtccatcctattaccttcacagagctgtccatgtatggattttccgctatagaccaaggtttttttaaaagagatgaagattatacctatctaaaatctagtgccatgatggcgagtgtaacaggcaatcttgaagactgttttagctcgagcgtattgacgtccattgatctggatggtgctactgatgatgaaattatcactaatttagctatccttcttcccttgtggaggaagcagttagatctccctgagcaagagcacattgcacaaaaaagaattggcgtaaggactatacagaagctcgtatctaacagagttcttccaatacttgatttacttctttggggacaggtgaaaagtaaagaaataacaaatcctatgctgtctgctttagtttttagcgacgatccgaaagatacacaggcaataaaggattcaataaagccatttgcagttgaagcaatgagcgagaagtatacgcgactgctgcgcctgtatgccaacaaagataaggaaatcgcttcatgtagattgtctgaggtgatgcatagaatttcgtag

SEQ ID NO: 240833 - DNA, 198 bp, Klebsiella pneumoniae
atgtcccacaatctaattcgactcccagaggtactgcgtcgcactggttacagtaaggcatggatttaccggctcatgagtgagcaacgtttcccatcagcagtgaaaatcggttctcgtgcaatcgcattcgtcgaaagtgaaatcgatgattgggtgaaccagcgtatcgctgaatctcgcggtgaggtggcgtaa

SEQ ID NO: 240834 - DNA, 435 bp, Klebsiella pneumoniae
atgggaaagaaaaaccgccctatacaacaggcggctaactcagatacacgcatgtctgatattacgccgatcaccaaccatgaacaagcaccaaagcgtacaccaaagaagcaccgcgcccgcgtttatatgctgcgtaccggcgttgagggatggacagaaaacgatattctgcgctactgccgcctctcgtctggacggaactacgctagcgaaattgagcgccgccttgatattcagctagagcgtatcgacgaaaagaacccggatggtatcggcgcacatttacgctaccgctttacctgccgcagtgatgttctcaaggttattcatcttgtgaaccacaacgccgccgctggtggttattacggcctttctaagcaggatatctccgacattctgaacctctacccggacaacttcaccgccgcataa

SEQ ID NO: 240835 - DNA, 180 bp, Klebsiella pneumoniae
atgaataagctcaccagcacaccacagcctaatcactcctaccgcgacgctcacggccagatagtgagcgtgatcgctgtggcgcacaaccgcgtgacgttctaccgcaagggctaccaattcacttgcgtgcagcccattgagcgtttcatgaaggagttctcggaggtaaagcaatga

SEQ ID NO: 240836 - DNA, 264 bp, Klebsiella pneumoniae
atgaatataaacgctatataccgccatcctgctgaacttgagtccgaggcgatgttatcccgtgaacaatcttaccctgacgatttcacgctggcggaacgcacagcagagcgtatgacccgagttcacaatgggctggctcacgttatgaccgatttattaccactcctcgaagttgagcaagcagtcattgtgcattgctggctggataaagtcctggcgattgtcgatatggccagaattgatgcggaggtcagggtatga

SEQ ID NO: 240837 - DNA, 840 bp, Klebsiella pneumoniae
atgattgactctggaacaacttggcgccaaggccaaattcttaaacatgaagatgctgtttccctcgggttaatcgccgaaggggatacaggcgttaaagttgtcgtcattagtcatgactgtgatctacagagtgcttctgaacctaaaattgagcttatagctggccccttgctgaaaggggctggtaattttactcgtgccaaacatccaagaattttgcatttacattttgaaaatgcttcggatgctaacttaaatgctattgaacttaagcatgacaataagatatggctagccaaagaaacttttacatgttcagaatgtgattcttctttcactatatcatccgaagaaaaacagggtttaaaacaatggcttgcggcacgatacgggcgacctgcttttccggacgtctttgagagcagattaagagcgtttgatgtcaaaaaattcagattcgagaaagagttggcgaagataatcaatcagcactctaaatatttaataggcgttttctttgatttgggtgaagatcgtttcagcgatttggaggagggcattccttacgaattaaatattcatatggtatatgacgcaattgacggcggacctgaggctaggattgaggctgagcaggctgtcgcgcaagtaaacacgctgtttacaacctatcatggcgaaccttccgagagcgaacttatcgctttaatgtcatgcaatgctgtgcccgatactgaatttaccctatatgcgttacgtagaatggaccagtggcgcgtagaatacattagcttgataggggatgaggtaggggactatataaatccctctatttaa

SEQ ID NO: 240838 - DNA, 645 bp, Klebsiella pneumoniae
atgcgtcaatccatgactggtagtaactatgaaacacccggttttgctccttctatagctggggcgtttatagttgcatcatctttgttcttaagtagcacgggttcgaatttttcggttaaagatgtaaaccagtggcgtggctacgtgcaacctaaggttcagttcgggttgtcaaaatctggaactgaaagtgaagttgaaaatgatgtagttgatatcagaacgatatccgatcatttgaataacgtcagaaatacacttgctccatcaatgtcggaacttgcaaaggatttaggtatcactaggcaggctctttacaaatggttatcaggtgaaagtcaacctgatgatattgaaaaagctagttatatcattgagttgagtcggttgtcagatcgttttaatgaagcgggaatcgtcaatgcgaaactcatggctaagatgaaagctttcgacggattctctataattgatttgataaagcggggagataattggcagcaatcagttagtaccctgattgaagaagctcgtaatcttaaagacgctggtgttaaagcaaatctgacgggtagtaaagcttcttctaccgatggttggatgtcatcagtttccatcccaggttcaggagtaagggagtaa

SEQ ID NO: 240839 - DNA, 807 bp, Klebsiella pneumoniae
atgagtgacaacgtacgtatgtccaatgcacccgtatactacgtgttagcgcagataaagtttacgcctgtaaaggcgatgaaaaagtatgtggatgacatacaggatgcgttacgtctgcaaggctatcctctctttgagagtcgagaatctacgcaactgaagtttgaatttaatacccctactgaaccggctcaacctgcttttgaaacggtccagcaatggtatatgtctgacttgaaacgtacttcggggtttgtattaggaaacgatttcatcacctttcacactacggagtacgatacacatcaaccattcattaaagagctaatgaaggggttggcagttgtgatggaacatcctaagccagctttggttactcgtttgggattaagatatcttgacgcggttttacctgagaatggagaaacaattgaacaatatctatgtgaaggcttgcatgggatcgatttagagttaaatcaaattcagtccatcaatgaattagttttccagaccgaagttgggccaatcgttgaaaatggtttccttgtaacacgtctgcacaaaatacacggcaaattaggattcccacccgacatggttcccattggtgtagatatgattcagcgcttcagaactgaacatgagctttggcatggtatcatcgataccgatcactatgttgaaggtaacttgcctcctgctattgatttgattgaaaaacaattcacttctctacatggtgtggtaaagggtacattcaataaaatgatctctcagtatgccattgacaagtgggcataa

SEQ ID NO: 240840 - DNA, 183 bp, Klebsiella pneumoniae
atgatacaaggctacctgctggcctacctgacggcgattgccgtttggccagtcacactgtcgttaattggtctctctgcaacaggggcattctttacgcggcgcagggggctgagtgtagtccttgtcgttctgttcatgctggtggccatcactgcgtggcagtttcaacgctatatgtaa

SEQ ID NO: 240841 - DNA, 672 bp, Klebsiella pneumoniae
atgatatttgcacagcacgtcgttgatgggaaaacacgcgtagatgcatatcgtctggctgggtacaaatgcgaaggcgagaacgcttactttgctgccagtcagatatacagaaatatacaggttaggcgctatattcacgccatacgaaatgagcgccaaaaacgatatgcggcagaactcgatgatgtgatcggtcagttgaccgcaatcattaacgctgacccaaacgagatatctcaataccgtcgcgttaactgccggtactgctggggaaacgatcacaagaatcaatggcgagatatcgccgagcagctatccgctgagcgcaaggctgaatcggatggtgccgcgccgccagatacatccggcggaattggctttgtcgacaacgccgatccaaatccagagtgccctcgctgtaatggcgaaggggtaggagagcctttctttgctgacactcgcgatcttgaaggtgacgctcgctatctgctgcagggcgtgaaactgggcaagttcggaatagaaatcctgacggggataagaacagcgcccggaaagagcttgctcgccttatccttttgcggtcgaccagtggacgccaggctcaacttgatattgagcgtcttgagctgcaaaacgagaaactcaagcgggaaatcgatgtgctga

SEQ ID NO: 240842 - DNA, 126 bp, Klebsiella pneumoniae
atgagcaactcactgcaaattctctgcattaaagatacagagggatactggactgaaggtgaaatgtatccgtcactgccagagatgacgggcttttcaaacccaatgcaggtgattgaaaattaa

SEQ ID NO: 240843 - DNA, 975 bp, Klebsiella pneumoniae
atgggtttaggattaaaagacgctattgaacaaactgctgagcatcatcagcgagacacgaataaattgtctttaccggataactattggcatccgggctttatcactgttttggctgcctacgttaatcatcataggattactgaaaataattgcacgtttacccgtcctggttatatgcaagctatcaacatgcatggcgctctttggggggaagatcagtaccaacaggaacgtctaagagttggtactaattatagcttagtcaccgcattgaataatgttgaagctgtagacatagcaacgggtagtatcaacagctgtgttagacaattagcgtttccaggtaaagggagaactgattatcccaaaggccttactgatctgacgcatgttatcggagagttgcacgacaacgtatggtcacatggaaaatctacaggattttcttttgctcaacgctctgcagttcctcttacgcaaagaaaagagcattatttggagttttcccttgcagactatggcttgggctttctgaaggaactccgtcgcgcaggtataagcggcatcttatcgcataaggatgcaatcgcttggtgtatacaaaaagggcactcttctaagcatgctgatctgcaggatgactgggcccagcagttaccccaagattttatggggggaagtatgtttggtagtggcgttgccgtaaaagaaaaagagaataatcatcaagggcttggcctttatcatttgatgaaattggtaaaaacttacaatggagaattgcaactggctacaggaaatgtatgcttagaggcaatcggtgatgaagtgacctacactcaattgaaaagtgagtggcctggagtggctatttcttgtcgttttaagattcatgaactagctgttgataaagataatgaagaaaatgatcctcagcttatggaaatcatgcaggcgttaggaggagagtga

SEQ ID NO: 240844 - DNA, 252 bp, Klebsiella pneumoniae
atgaaaagcgccaagataccgggcaacttccgtaacctgtttatatattcgcccaacggcaaaaaggacagtctccagatcattccgcagtcagaagtagcggccaaggaagagtttctgaatatcaaaaacgtgagccgggatgacatgacggcagcgtaccgcgcactgccgcaaatactgggcatcattcccattcataccggcggcattggaggcgttgaaaaggccaacgaattaatgccattgtaa

SEQ ID NO: 240845 - DNA, 2199 bp, Klebsiella pneumoniae
atggcctttaacccggagctggggagtacgtctcccgctgtgctactcgataacgctaagcggctcgatgagctggtcaatggggacgcggctaccgttccagaccgtgccgggcaaccgctggattcctggcgcggaatgatggcgaaaaacgatgagatcaggcagaacctgatccctctcagtaagcagtacgcgacgctggaagcggcgcaggcggacattgtgaatatcccggtgggctctacgacgtattaccgtagccctgatgattccgcgctggctatcgaggtcattaacaacgccgggacgctgcagcctaccgggcggaaaatgccgtcacagaaaaccgttgatgatttacttaagcatgttgaaaccacaaacctaattttccagctcgttgacatcctcgggtatcgccagttttatgccctgacatcaggtgaattcgggacggcaaaaacgattattaaaccagatggcattgaactggagggctattctctgaccgtatctgatgacaatggaatatatatcgaaaatattcttggtcaacgcgtcgtattagttgatgaatatgggaatgtggcaccaaggagtttgcgcgctgcgcgagatggttcgttcggcacagatacggcaatggtgtcaggaaatggccttaattttaactcaggtggctcccggattgatattacaggtccagagtttttaaaggtctctgattttcttggccggtctaaaacaattattgatgcgagcgggaatctggtcggcggcggtagcggtggcgatataacgctgcaggacagaattaacattctgaacgcggaaaacctgaactattacagtaaagttcgcagtcggtataacgctgacatagagcgacttgtgttcgctctgtcgatgatcatctggtacgggcagtctctttccagcaaccaggagggataccctgcgctcagcaaaacgccgtacagcaatcttggcaatctgatgctgggaaactcacctcgaccaaatacccggacaggggcaggattcaccccggtggggtctgccatcctcaacccgctaaaggccgtcgttcagtcaggtgacgggtcgtatgtgatgagcgatgccgatgttgctgcactgcctgccgggtcgggtaatgagggtgaaggggccgttgctgcggttaacatgctgcgcacgctgtttctgcgtcaggcagcattgctaaccgacccttctcgcctgcttgttctggcaagctgtggagtcaacgggaggaccgttgaggctctgtccaggggggccgttccggagctgtataaccgcattcgtgaagctgtgtctaaaataaaggccatcgcggatggcgacagcaagacattcggcatcggtgctttctgtttcctgcagggagaatggaattacaaccctgggtacggcggggactatacgcgggagggctataaagcgaaggtgcgtcagctttatagcgatgtgattgccgatttttgcgcaggacagagaccgcctgcgatgttcacctatcagactggcggcacttacaccattgatacctatgagctggcgatcgggatggcgcagctggatatggcaacggagggagggaacatctatggagtctgcccgtcgtatccattccccaataaggatagcgggcatctgaccagtaacggttatcgctggatggacatgtttttcggcaaggtcatgttcagggttctggttcttggtgagggatgggagccgttacactgcacaggcgttgaagttcaggatgattacgcactccttaactatgcagtcccgtatccgccactgcagtgggggacaccatatgatgggcgaacagctaaaacctatgctgataaggggtttcgggcgactgatgcaaatggcgcgctggacattactgccgcagagattgttgctgatacggtggtaaaactgacattttccaggcgagtctccgggaaaatcaaaatctggtacgcagataaaacatcacataacggaaatggctgtctcaaggacagcgatccattcctggcaactgaaaattacgtgtataccgcaggtagcggccaatatgcggacgaaaatattcctgaacttgtagataaaccatacccgctggaaaactgggcatgggcacaaattatcgagacaactgtatag

SEQ ID NO: 240846 - DNA, 753 bp, Klebsiella pneumoniae
atgggtattactcttttcactaataatgcgttttcgtctgtttcagaccctgacgaatactcgccagggtttgatgtgacgtcccttcgtcgcgccgaaatatttacttatacagggattggtaaaaatcttatgccgggggaaggcggccccactgtagttggttccccgacgtttatcaccgactcgccttttgttcagttatcaaataacgcgaacgcggcgcatttgagcctgggaattaatgattccgcccaacaaacctggtttttgctctttgatccgaataatgattccacgcagagaattatcgctggtagcttttcggggactgctgccgttatcccaccaggagtatctgtgattgtagatgaggctggcgcgctggccgccatgcagggtatccactacacggacaatgacacttacggaaccgcgcgcgcaactctgagtgcatttaataaaacaaagccgatgcttctttgtcttacccttgacggccagaccaccagactgaccgacatgaccaacaatgtttcagcgtccctcactctggcaacaggtcgtgagcgagccccggccccccttcgcatcggtaaaggcggagttacatactggggatcaacctctgcaaccagccgacttggggcttatatggttttcgatcgcgtattatctgatgctgagaaaattactgttcatgactatttactccgttgcatacaggcgaagtatccatcattgattttctaa

SEQ ID NO: 240847 - DNA, 678 bp, Klebsiella pneumoniae
atggctaaaacgactttcctgcaaattcccgtagctgttaacagcggcatcgcgtcaacttattccgagcgcgacgataaaacctgccgttgggacccctcgcactattttgactggagggtttcaacactggcagacagagctggtgatatgttaacggctctgggctcagctatttcagaatcagcgctgaatggtattaaaaccatgaaaagctctctgacagcaaatggcggagtgacctcagaaaatatcttcccatccaatgcaactaaggggtttgcttacgcatttatttttaaacgcgacaatctgaatcaggcaaccttccttattgctggccctcatttacggctacaggctcagactgataataagctgtactactacaaaacaggcgcatccacacagcagggaggtgtttcgttatccagcggcattgacctggtgattgtgaattacgatccagtgacggacatagagacggtatacgtgaatgacggtaccatgaccgtaaccggggcatcagcaatcacgtatcaaaacgcccccctgacactggcggcgactgccgcgaataatgttaattacggagaaattctcatctttgatgcagtgaagtcagcatctgatattgctgcgattaaagcttactacagagcacaatacggaaattaa

SEQ ID NO: 240848 - DNA, 588 bp, Klebsiella pneumoniae
atgccatggctgattccggtgatggctatctgcatgtttttcggcgcgttgggccagattaactcatggctggttggccctatctacatgcttcaggaagcttctcgtgaggataacctgttaggcgataaaattgcgcaattgcatcctgtctggaaaacgcctgcttttgcgctaatggttcaggcgattattgttacggtattgtgcttctcaacctttatctcgccaagcgttgcggcggcctactggatgctgactgcgctcaccacgataacctattttatcccctacctggtgatgttccccgcgttctggcgcctgcgcaaaacgcagcctgacacaccacgaagtttcaaaattccggggaaagtgctacctgccgtactacctgcattaggttttatttctatcgcctttgccgttgtgttgctgtttattccgccatcacaaatcgatatgggcgggtatttccagtatgccggcaagattattggtggggcattactggcgattgttgtcgctgaatggatttaccatcgcgctttaaaacgcaatacacgtctgggtatggtgaaggggaaataa

SEQ ID NO: 240849 - DNA, 192 bp, Klebsiella pneumoniae
atggcgtttgatgacagccagaaatgggttaatttctttggtaatgcgatctacttcgctccgcgcccgggcaaccaaagcttctacagccacgacttctttttcccgatgacgaagcgttcccagctctttagtcagttgttcgattcgggaaataatggcagacacatctggtgtactggcgacaagtga

SEQ ID NO: 240850 - DNA, 1176 bp, Klebsiella pneumoniae
atgagcgagttgagctatctggaaaaactgctggatggggctgaggttgagtggaaaacactaggcagtatagctgaactaaagcgaggcacatcaattacaaaaaaagatgttatcgatggaaccatccccgtagtcgctggcggacgcacaccagcttattatcataatactagtaatcgcgacggacaaacaattgttatcgcaggttctggtgcgtatgcgggattcgttagttggtgggaggaaccaattttcgtatcggatgcatttactgtaaaacctcataatattttgttaccacgatattgctatcattttttgatgaatatgcaacaacaactccatgattttaagagtggtggtggtgttccacatgtttatccacgagatgtatcacctattttgataccaatcccctgcccggataatccggaaagatcccttgccatccagtctgaaatcgtgcggattcttgataaatttactgcgcttacagctgagcttacagctgagcttacagctgagcttaccatgcgtaaaaaacagtacaactactatcgcgaccagttgctgagcttggaagaggatgaaatagagtggaaggcacttgatgatgtttgtgcttttatatctgctggcggagatgtgcctgaaaatagtgtgaaaggtcaggtaaaaccaactaacgaatatccctatccaatctacgctaacgcaacagatgaaaaggggttatatggctacactgattcgtacaaaattgatagcgatgcggtgacaatttctgcgcgaggggcgaaagtaggataccatacagtcagagacgcaaaattcacgcctattattcgcttaatagtattagtcgccaataagaatttagtcagaacacgatatcttaattatgttttagatatgacagctatcgggggtacagatgggggaatcccacaacttacagttccgatggttaagaaaattaccgtcccaattcctttcgcaagtaatcctaatagatcgcttgccgaacaagatcgtataatcgcaatcttagataagttcgaaatcctgactaattcaatcagcgaaggccttccgcgcgaaatcaacctgcgccaaaagcagtacgaatactaccgtgatttactgctcagtttccctaaatcaaatgtatag

SEQ ID NO: 240851 - DNA, 3114 bp, Klebsiella pneumoniae
atgactgattataagaccattgctgaatccaataattttatcgtccttgagaaatacactaatgttcaggataccagcgacagctaccagagcgaatcggaccttgagagggagctgattcaggaccttattaatcaaggttatgagtttatctccgttaagtcaccgacggcgatgctggcgaatgtgcgggaccagcttcagcgtcttaatggtgtggtgtttaacgaaagtgaatggcggcgcttcgcagagcagtatctggacagccccagtgacagcagcctggacaaaacccgtaaaatccatatcgactatatctgtgattttacgtttgatgatggtcgtctggaaaacatctatctgatagataaaaagaacctgctgcgcaataaggtgcaggtcattcagcagtttgaacagaccggctcacacgctaaccgttatgatgttacgattctggtcaacggcctgccgctggtgcaaatcgaactcaaaaagcgtggcgtggcgattcgtgaagcctttaaccagatacaccgttacagcaaggaaagctttaacagcgataactccctgtttaaatatctgcaactcttcgtgatttccaacgggactgatacccggtactttgccagtaccactaaacgggataaaaatagctttgatttcaccatgaactgggcgaaatcggataacactcttattaaggacctgaaggactttaccgccactttcttccagaagcatactctgctgaatgttctgtttaattacagcgtgtttgacagcagccagacgctgctcgtcatgcgcccctatcagattgccgccactgaacgaatcctctggaaaattaacagctcatttaaagcgaagaactggtcaaaaccagaaagcggcgggtttatctggcataccactgggtcaggtaaaaccctgaccagctttaaggccgcacgactggcaaccgagctggactttattgataaagtcttcttcgtggtcgacaggaaagacctcgattaccagaccatgaaggagtatcagcgcttctctccggacagtgtcaatggttcggataatacagcaggcctcagaagaaacctggataaggacgataacaaaattatcgtcacaactattcagaaactcaataacctgatgaaagccgaagctgacctgcccgtctatcagcagcaggtggtgtttatctttgatgagtgtcaccgcagccagtttggtgaggcccagaaaaacctcaaaaagaaattcaggcgcttttatcagtttggttttaccggtacgcctattttcccggaaaatgcactgggggcagaaaccaccgccagcgtcttcgggcgtgaattacattcttacgtaattactgatgcgattcgtgatgaaaaagtactgaagtttaaggtggactataacgatgtccgcccacagtttaagtcccttgaaacggaaacagacgagaaaaaactcagcgcggctgaaaaccagcaggcctttctgcacccactgcgtatccaggaaataacgcaatacattcttaataacttccgccagaaaacgcatcgtaccttcccgggagcaaaaggcttcaatgccatgttagcagtgagcagcgtggacgcggcaaaagcttattacacgacatttaaaatgctacaggaagaagctgagaagaaatctggcagctataaacgtcttcgtgtggcaaccatcttctcttttgctgctaatgaagagcaaagcgctattggtgatattaccgacgaaagttttgataccagtgcaatgaacagcagcgcaaaggaattcctggattcagccattgatgactataacaatcactttaaaaccaatttcagcaccgacagtaacggctttcagaactactaccgcgatttagctcaacgagtgaaaaatcaggatattgaccttctcatcgtggtgggaatgttcttaaccggctttgatgccccgacgcttaacactctgttcgttgacaaaaacctgcgttatcacggcctgatgcaggcattttcccgcaccaaccgtatctatgatgcaaccaaaaccttcggcaatatcgtgactttcagggacctggagcgtcccaccattgatgccattacactttttggcgacaaaaacaccaagaatgtggtactggaaaaaagctacgaagagtacatgcagggctttagcgatgcggcaaccggcgaagctaaacgaggttttatgtctattgtttcggagctggagcagcgtttccctgaccctgccagtatcgacagtgaaaaagagaaaaaagccttcgtgaagctgtttggtgagtatctgagagccgaaaatattctgcaaaactatgatgaatttgccacgctgaaagcgctgcaaaaggtcgataccagcaatccggaggcactcgaagccttcaaagccgagcattatcttgatgatgaaaagctcgctgaattacaaaccatccgcctacctgccgaacgtaaagttcaggactaccgctcagcttacaatgatatccgggactggcagcgacgtgaaaaagtagcaaacgacagggatacatcaaccacggactgggatgacgtggtgtttgaaattgacctgctcaagtcgcaagagattaacctggactacattctgggcctgatttttgaccacaaccgtcagaaaaagggtaaagaagccctgactgaagaggtccgacgcttaatccgctcaagtctgggcaaccgtgccaaagaaggtctgattgttgactttattcagcaaactaaccttgatgatatgccggataaggccagtatcattgatgcattctttacctatgctcagcgtgaacagcaacgggaagcggaagcgttgattaaggaagaaaacctcaatgaagaggcggcaaggcgctatatccgtacatcactcaaacgggaatatgctaccgaaaatggaacggagttaaatgagacgctaccaaaactcagtccactgaatcctcagtacaaaacgaaaaagcagaccgtattccaaaaaattggggcgtttatcgaaaaatttaaaggggttggaggaaggatttaa

SEQ ID NO: 240852 - DNA, 582 bp, Klebsiella pneumoniae
atgtcgactgtagtcgctggtagtgtcaaagctggcgtgttaacggggtcggtagaggggaatcattctcaacgctggcgggtaaacggatccgctaccggtgctcatcctcaacgctggcggacaaacagggccgctgccggtgctcatcctcaacgctggcgggtaaacgtggccgctgacggtagctatcctcaacgctggcgggtaaacggggccgctgacggtggctatcctcaacgctggcgggtaaacgtggccgctgccggtgctcatcctcaacgctggcgggcaaacggggccgctgacggtggctatcctcaacgctggcgggtaaacgtggccgctgacggtggctatcctcaacgctggcgggtaaacgtggccgctgacggtggctatcctcaacgctggcgggtaaacgtggccgctgacggtggctatcctcaacgctggcgggtaaacgggaccgctgccggtagtcatcctcaacgctggcgggtaagcgtggccgctgtcggtggtcaccgtcaacgctggcgggtaaacaggggcgataccagtgaccatcctcaacgctga

SEQ ID NO: 240853 - DNA, 132 bp, Klebsiella pneumoniae
gtgaagttgcttaagcccgtggatgatatgcttaagatttggcacccgattgaagagcagctggcctatggcgggctgttaatatctgaaggtctgcctttattgcgcaagggagggagtaacgtagattaa

SEQ ID NO: 240854 - DNA, 285 bp, Klebsiella pneumoniae; identical to SEQ ID NO: 94185

SEQ ID NO: 240855 - DNA, 594 bp, Klebsiella pneumoniae; identical to SEQ ID NO: 94057

SEQ ID NO: 240856 - DNA, 324 bp, Klebsiella pneumoniae; identical to SEQ ID NO: 94061

SEQ ID NO: 240857 - DNA, 618 bp, Klebsiella pneumoniae
atgaaatcattcacctgcagtacggcagatcggcctttacccggacgcccccgggtgtttgatgaagccaattttcttgatggagctataacgctttttcgccgtcacggttttagcggtgtcagtatcagtgacataacagctgaaacaggcctcaccactggcagtatttataaggcttataaggacaaaaaaggcatatatgttaaagctctgcaacgttatgtattacttcgtgaagagagcctgaaagtccgtctcgagaaagcttcagatggaagagaaaaaatcgcagttctgctgaaggattatgctgaattcagtcagggaagagacggaaaactgggttgtatggtcgtttcaggtatcacaaacattgaccaccttggtacggtcgctgatattttaaaaacacagctattaaagcgtcggagtgctcttgaggaccttatcgaacagggaaaacaggatggttcgattgccactaccactaatgtaaccgctgcagccgaaataattctggcattactacaggggatgcgtgtaaccggaaagatttcagtcctgaccggcaatattgatgattttatagctcaggcactaaagatactggagtaa

SEQ ID NO: 240858 - DNA, 1023 bp, Klebsiella pneumoniae
atggtcacttttgagacagttatggaaattaaaatcctgcacaagcagggaatgagtagccgggcgattgccagagaactggggatctcccgcaataccgttaaacgttatttgcaggcaaaatctgagccgccaaaatatacgccgcgacctgctgttgcttcactcctagatgaataccgggattatattcgtcaacgcatcgccgatgctcatccttacaaaatcccggcaacggtaatcgctcgcgagatcagagaccagggatatcgtggcggaatgaccatcctcagggcattcattcgttctctctcggttcctcaggagcaggagcctgccgttcggtttgaaactgaacccggacgacagatgcaggttgactggggcactatgcgtaatggtcgctcaccgcttcacgtgttcgttgctgttctcggatacagccgaatgctgtacatcgaattcactgacaatatgcgttatgacacgctggagacctgccatcgtaatgcgttccgcttctttggtggtgtgccgcgcgaagtgttgtatgacaatatgaaaactgtggttctgcaacgtgacgcatatcagaccggtcagcaccggttccatccttcgctgtggcagttcggcaaggagatgggcttctctccccgactgtgtcgccctttcagggcacagactaaaggtaaggtggaacggatggtgcagtacacccgtaacagtttttacatcccactaatgactcgcctgcgcccgatggggatcactgtcgatgttgaaacagccaaccgccacggtctgcgctggctgcacgatgtcgctaaccaacgaaagcatgaaacaatccaggcccgtccctgcgatcgctggctcgaagagcagcagtccatgctggcactgcctccggagaaaaaagagtatgacgtgcatcttgatgaaaatctggtgagcttcgacaaacaccccctgcatcatccactctccatctacgactcattctgcagaggagtggcgtga

SEQ ID NO: 240859 - DNA, 663 bp, Klebsiella pneumoniae
atggacttcctggagcatctgcttcatgaagaaaaactggcacatcatcaacgtaaacaggcgatgtatacccgaatggcagccttcccggcggtgaaaacgttcgaagagtatgacttcacattcgccaccggagcaccgcagaagcaactccagtcgttacgctcactcagcttcatagaacgtaatgaaaatatcgtattactggggccatcaggagtggggaaaacccatctggcaatagcgatgggctatgaagcagtccgtgcaggtatcaaagttcgcttcacaacagcagcagatctgttacttcagttatctacggcacaacgtcagggccgttataaaacgacgcttcagcgtggagtaatggccccccgcctgctcatcattgatgaaataggctatctgccgtttagtcaggaagaagcaaagctgttcttccaggtcatcgctaaacgttacgaaaagagcgcaatgatcctgacatccaatctgccgttcgggctgtgggatcaaacgttcgccggtgatgcagcactgacctcagcgatgctggaccgtatcttacaccactcacatgtcgttcaaatcaaaggagaaagctatcgactcagacagaaacgaaaggccggggttatagcagaagctaatcctgagtaa

SEQ ID NO: 240860 - DNA, 891 bp, Klebsiella pneumoniae
atgtcccttaccgacgcaaaaatccgcaccctcaagccttctgataaaccctttaaagtctccgattctcacggtctgtatctgctggtcaagccgggtggctcccgccactggtatctcaaataccgtattagcggtaaagaatcccgcatttcgctgggtgcctatccagccatctccctgtctgatgcgcgacagcaacgtgaaggtatccgtaaaatgctggcgctgaatatcaacccggtacagcagcgggctgctgaacgtggctcacgaacaccggagaaagtttttaaaaacgtggcgctggcgtggcataaaagtaacaggaaatggtcgcagaacaccgccgaccgtctgcttgccagcctgaacaatcacatctttccggtcatcgggaacctacctgtatcagaacttaaaccccgtaatttcattgacctgctgaaagggatcgaggaaaaaggtctgctggaggttgcgtcccgcacacggcagcacctgagtaacataatgcgccatgcggtccatcaggagttaatcgatacgaaccctgcagcaaaccttggcggcgtgaccacacctcctgtcagacggcactatcctgccctgccgctggagcggctgcctgaactgcttgaacgtattggggcatatcatcagggccgtgaactgacccggcatgccgttctgctgatgctgcatgtgttcattcgctccagtgaactgcgtttcgcccgctggtcagagattgatttcacaaaccgagtctggacgatacccgcgacgcgagaacccattattggcgtgcgttattccggccgcggggcaaaaatgcgaatgccgcatatcgtccccctctcagaacagtccatcgccattctgaaatag

SEQ ID NO: 240861 - DNA, 603 bp, Klebsiella pneumoniae
atggcaggggcattgttttcactttctgttggcggggtgatgtttgcaacagctgttgttattagcatctttagtgctatgctatatgacagtatagttaaaagacgttctaaaaatattaacccaccagagtttacaggatcacctcaactagcgtcttgcaattgttcaggaggtactgtcctgctttatcttgattttgatggagtcctccatcgaaggatgaatgagacatttgaaagaatgcctctactggaaaaaattttaaaacaatgtccagaattacatatagtcgtgtccagcagttggagggaaacaatgactttagaagggcttaaatacctttttccggtagcattcagacacagaataataggtgttacaccttcacttcaggaagtaaaggataccgaatatgttcggtacagagagtgccttttacatgccagacatatgggggtcaacaagtttattatcattgatgatgaatcacaccgttttccacctgggtgcgaaaatctggtgtcaacgaattacagtgaggggatgactgaccaaacagtagcatctgtcattatgaaatattgtcagtacttaacatga

SEQ ID NO: 240862 - DNA, 486 bp, Klebsiella pneumoniae; identical to SEQ ID NO: 94213

SEQ ID NO: 240863 - DNA, 267 bp, Klebsiella pneumoniae; identical to SEQ ID NO: 94214

SEQ ID NO: 240864 - DNA, 2157 bp, Klebsiella pneumoniae
atgcaagtaaaaaataaaaatgacttaaaccaagaaaaaccagagtttgatctaggacgtttcttcggcgatgtaattgatcatagaaagttaataatttctgtgacgtcactttgtacacttttggcattagtttatatattattttccacacccatatatcaagctgatgcattagttcaagttgagcaaaaaaaagggaatgctattttaaatagtttaagtcaggtattgcccgatacgcaaccacagtctgcgcctgagattgctttgctgcgctctcgcatgattcttggcaaaacagttgacgaccttaatctacaggcaagtatcaagcaagactattttccaatttttggacaaggatggtcaagattaattggaaaaaaagaaggaagtttgcatgttaatagattttatctcgcaggagagagcgaaggaaaatcagatataactgttattgtgaaagatgcaaataactataccgttgtcatcggaaaaaaaagtataaatggtaaagtaggtcaattattagatttaactgatggttcattaaatatagacaaaattgatgctttaccaggaacaaagtttaaaatctcatatttacctcgtttaaaagctataactgatttacagacaaaccttgtcgtggcagatctcggtaaagatactggtatgttgaatgtatcttatactggagataatgctgatttaataaagaatattgttgatagcattacgcgtaactatttagagcaaaacatttcaaggcaggctgcacaagatgctaaaagtttagaatttcttagccaacaattaccaaaagttcggagcgagcttgattttgctgaagataaattaaatctctatcgacagcaaaatgattctgtagatttatcattggaagctaagtcagtattagatcagattgtaaatgttgacaatcaattaaatgagttaacatttagagaatcagaaatttcgcagctttatactaaagaacatccaacttataaagcattaatggaaaaaagaaaaacattacaggatgagaaagcaaaattaaataagcgagtttcttcaatgcctgaaacccagcaggaaattctgcggctgagcagggatgtagagtctggtcgtgctgtttatatgcagttattaaatagacagcaagaacttaatattgctaaatctagcgccatcggaaacgttagaattattgatgaagctgttacacaacctaaaccagtcaaaccgaaaaaattattagtgctaattcttgggatttttataggtgttatcgtttcgttgggattagttttccttcgtaaaattttacgccgaggtattgaatctccagagcagcttgaagaaataggcgtaagtgtatatgcaagtatacctgtttctgaaacgttcgctaaaacacctcagaaaagaatggttaacaagtttagggaagagggtgttggttttcttgctatagacaatccagctgatttggcaatagaggcaattagagggctgcgcacaagtcttcattttgcgatgatggagtctagaaataatatacttatgatatcgggagcaagtcctaacgctggtaagacttttgtaagctcaaatttagcttctgttattgcgcaaactggaaagaaagtattatttattgatactgacatgaggaaaggttatacacataaaatcttctcagtgaacaatacaaatgggctttctgatgttttgtcaggtaaaattaaacctattgaggctgtaaaaaatattccctcagccggaattgattttatatcaagaggcatttcaccaccgaatccagcagagcttctgatgaaccgctattttggtgaattactcacatgggctagtgaaaattatgatttggttgtgttagatacccctccaattctcgctgtgacagatcccgcaattataggtaattatgctggtacaactttacttgttgctcgctttgaattgaatactgtcaaagaaattgaagtcagtataaagcgctttgaacaaagtggagtcattattaaaggatgtatccttaacggagttgttaaaaaagctagtaactattactcctatggctataaccactatggttatacttatgacaacaaaaaatag

SEQ ID NO: 240865 - DNA, 132 bp, Klebsiella pneumoniae
atgttatttggacattggataggccagaaagatattcccgacccctatcgcaagagtgaagaagcatttagctcagtatatactattatagaaaaatctgctaaatgctggattgaaaaactcagtgcttaa

SEQ ID NO: 240866 - DNA, 1608 bp, Klebsiella pneumoniae
atggaaagaaacgttgaattaatattcaaaacatctcctttacttatcgcaggaaagaagctatttctttctgcctatgatggggaaatgtttgagtatgatttactaaacgaaaatttatactcacgtcagtttgattttgtgtttgcatgcgatctattcagtttatttcaagagactgtgaatgaacaatatcactgtagtatatacatgaatggacagctaaaagaagtttttatagaggggttgattgaggatatcacactgatttatgacaaaaactcgtgtgagcttttcctttatacagataaaaaaacaatggcaattagtttatcctctttaaaacaagctatgatggatgtacgggaaatatccactggagatgctatacagccagggagtattcacatggacaatggtacaatagtcgatctctcccgtaaaaccataagctatgcctatttgaatgaggtttttacttacgatgcgattctgtctatttctgaagctggtgtattgtgtcaggttgagacggaatttggtatggatgcttatcttgtctctccgaaaaatgatcagtttaaacgtcttgagcttaacggtgcaaatgtttacgctgcatgttatgacaacacttcaacacagtattatttttcggtagctaaaaaaggacaacagcaaattatcaccttacgcgattcaggtgtacagcccgtctgcgcctctgaagaattgtatggaaccgtgacgccattcattgctgatgatcaaatagccttatatataaccgggagtgccgagggtgtccgtattgtttttcccaacagaccagactctgaccatacactttccattcctttatccagtcggaagcggatttattacgaaaataacttattaaaagtcacatctttagtgtctgaaataccggcaaaccttaacatactatttttccatggaggaccggaatcctgtgagtgggactctccccgactcccagggctcattaaggaactgccggataaagacattggttttcatataatcaattatgctggctcgtcaggttttggaaaaaattaccggacagttgcggatggtatgactctgagccttagtttgcatccccttatacaatgggttaacgaaaagttaaccggcagcaggcttatcctttgtggaggtagttttggaggggcgatggtattagaactaatgagccgcaaggaagaacttgcggtttctatagcgggctcaatcatcacaaatcctctactcgacttagattttcatatcaaccgtgtccgcgaacatcaagagaatattactttttttgaaacgaaattttcagaagaggacagattgttaatttctgtagaacgattcgcttccatcttaaaagaatctccggtagaaaccttaatgattttaggccgtcgtgatgaaattttaactataaaaccagctttaaagttacttaatttattaagaggtaacaacaaaataaaaacccatattgatgatggtggccattcttcgcttgataagtttatcggaagagagaaggaaatgatttgttttattaaaaacattgttacttcgcagtaa

SEQ ID NO: 240867 - DNA, 1185 bp, Klebsiella pneumoniae
atgcgtaacaaaatttatttaatgaatgcgttgttcctgttccctatgtggatgtcaaaaacattacagccactttactgggatttagagaataaacttgatttgttttcggcctcttacgtctctatggccattgccggtacattttctctcctctatgccggtattgttcgtaagctgggcatccggacagggcttatcatcggatatgttttctatgccgtcggcctcatattgcgtgcctatcctgtcaacctcacagttgcaatcctgacggggctaatagctgggataggggcaagcgtgacaggactggccctgaaggggctgctccttgaaataaaagaagagaagagaaaaaacgtcatgcttcagactgataatatctatactctgtcacaaagtctgggtgcgatggccgcaggagtactggttagtgctttatcttttatgtcaggacatggatatcaacaggcgctaattattacaggattgcttactctctcagctgttatatttatcccaaagctagaaaaacattcaatggcaatacctcacaaatcatatgatatgaaagtgaaaaaaaactcattctctaataacagaatgttatatagcgctatattccttgcattctttatacatggtgcttgctgggcagttgtgcttcctcttattcctgtttatttaaaaaattcaggtataagtgccacctggataggtataaccatatcggcaggagtcattgctgggcttctattaaaaaatatatatatctattttaacaaacaatcaggtagtacgctgtcactgagtttatttaccctgttaacctgtttatctatcagcctttccttccaccttttcggcgcaggggcagcgatattttatgctagtagcattgtcttgttttatatgttcaggacggtcctttccttaattattgattttatagaagtcgatattgctggtaaaggtaatgctatgtctgtattcggtatacgacagacagcttttctttgtggcgatgttgcaggaggaatagcaatgcctttcctctacaaaaatggttttcttgaaaaccatacgctcatcttttccctggctgttatactggcgtctttccttgtcgcctcatgctcaaaattaagtgagaagctcgcatggaaagaaacgttgaattaa

SEQ ID NO: 240868 - DNA, 561 bp, Klebsiella pneumoniae
atgcatcgctcagttattttatataacatttgtcagtgctacaaaaaaattggcgattatgattctgcaattcagtgctataaagaattgcttgaaattgattatgtatttccggaatatcatctggaaatggggctgtgttacgaacagcagggaaattttaaggactatcgtgcatgcgttgaggaggcaatacgtataaatccttataacagtgacggtcattactacttaagtcttattatggcctctcttgaggactataatgaagcagaaaagcatgcgagggttgcatgggagcttgctggtgatgatatgactgcttataattatgcttacctacagtctatcaacgggtcatatcaggatctggataagttacaaccagtcaattctccagattatattcccgagtggattgtgcttaaagctgaaaaaatatctcagacatcagtagacgatgcagttaatatacttaaggaagggataaaactgttcccgctacacccagagttaaatgaaaacttaaaaaatattcagggtattcaggcgaatgcgtaa

SEQ ID NO: 240869 - DNA, 732 bp, Klebsiella pneumoniae
atggatttaaaccaatacgtggattgtattccactcgaatactttattattcgcaaatatgtagttagctcgctgggtttaaataatctgagtattcatgataaaaatttcctgtaccccttagaaaatgtaaaccgtgaaacactgtcactgacagaccgaatcgatgcagacaaccaaattcgttattttctgagtgatagaactctccggaaagtcagtgaactggctaaaaaaatcgcagaaagtgagcctgaaaaaatcactatttcccccggacatactcattcagtactcatgcgccacttcattcgatcacttgaaaggatgcaggtaagcgtacaatttgacagcaatcctgatttttcaaaagatgccctgttaacagcaaatgaaaccgaactaatccaacagcttataatggccgccagaggtgactacgatctggtggttcgttgtataaaacagatcattaattgtggagatgttttcagtgctgaaacgcttctggaacatggtctcagatatttccccgattttgaatcaaaacaagcaaatttgatcggaacaataaaaaactgtgttggtaaacctgttgaagcggagcattattatcagatttttaaaaaatcagagtctcctcttgcacctgtccgcgcaaactaccctctttcgatgctctatttgcgacatcataagctagaaaaaagaaattttgagacaggaaaataa

SEQ ID NO: 240870 - DNA, 267 bp, Klebsiella pneumoniae
atgccaggcccggccgtgcacatccttacatcgatcacaaagatgtccggggaggccattgctgtcagacagctgccgcaaaccaataccggcttggcatctgagagcaggtataaaaactcttatatttataactttctgttttatgtcatgaacggcaataattattcaaaattatatctccaggagcatcaactgatttgctctgctgccggagaaccgaaaaaaggcatactcggaaatgccgtacctgagccgtcaggctga

SEQ ID NO: 240871 - DNA, 777 bp, Klebsiella pneumoniae
atgttgatcctcgattgctcctcacgaactcaggcgttgcatacattatctgccgggtttggctgtccccctgaaaagctgaaaaaagtgctgctttcgcttgatcttgaaagtaactacgagcttaatcctcgccagttggttgatgcacctcagtatctgagagagtacgtctgtgcggaactgggcgaaccgggaccattcacacgagctctgtggtttcatggtacccggactttcgcaggtaatacttttcccgcggggttactggcgctaaatcagtctgaatcactcgccatgaaaatgttgctcgacctggctccgaatgagatggtccgtaaacaccttcaggaatggaatgttccgggtggtgtcccggatgagatgtttcagctcagaactggcgatagaacgcactgggggccttacggccatctggttcgggaattacatttccacgccagtgaaaatgggcaacatgattatctcaggctaccggagctggtagaggatgtctgtaacgcatactttgagaactacgcccacgatcttacgccgcattacctcaaggtgcttcacccctgtattgtctggttccaggcagatattgtttatgaaaagggtacgcttgaaacggcacttgcatatgcttatacatcagtccggaatctaccgccggaaggaaactcaactttcggtatagaccgtgaggggaaatcagtgtccaggtcgtcaattgctaaaatagagtatctgccgcacgggcaaattaaataa

SEQ ID NO: 240872 - DNA, 885 bp, Klebsiella pneumoniae
atgtcagataaaaaacgtatagccattaccggtgcatcagggaaaattggcaggtttacagtagagtggcttgagaaagcgggttatgacctgttcctcatagatcaaaaagacccgttaacagatgcccatcctgcgatgatcgcaaatttagaggattttggtgcaacactcgatgcgctttcttccgtcggtgaagatgtctattcacgaccagaacctgcagcttttgatgccgtagttcatctcgccagtattccacacccaaggatgattcccgattctgaagagttcagaaacaatatgctggccaccttcaacgtttttgaggcatccaggcgactggggattaaaaatattatttggtcatcaagcgaggttactaccggagtgccttacgaccagtgggagcccccgtatgtgccggttgatgaacattacccgccacggggaatcagcatttatgcgctgacgaaagtgctgggtgaagaaatggctcgtcagttctgccttaataatcctgatatgcgtattacctgtctgcggctttctaacgttatggcgccggaagaatacgctcagtttgaaagctggcaggacgatccgaccgtcaggttatggaacatgtggacctacgttgacgtcagggacgttgcgcaggcaatagagaaagccctcgaatatgacgtcaggggtaaagatgagttctttattaccagtgatgttacctgcatgcatacccctacacaggagcttctcgaccgctactatcctaaagttgagcagcgtaagcaatttacaggtaatgaatcggtgcttagcagcgaaaaagcaatgcgtgtcctcggttaccgtcctgctcaccgctggaatgatagcgtctga

SEQ ID NO: 240873 - DNA, 804 bp, Klebsiella pneumoniae
atgagtgaaaaaaaactggctctcataaccggcgcaagtaatggtatcggcctggcgcttgcggaagaatttgctgctaatggatacgaccttgccatcgtcgcccgggatgaaaacaaactttcagcggcgcgcgatcatctgcaaaaacactactcagttaatgtacacgcgttcagtgctgatctgagtgtgtatgaccagataactgatctgcaggcaaagatggatagggccggtttaaatctcagtgcgctggtgatcaatgccggtcaggggctcgggggcgcctttattggtggtaccgatcttgaaaaagagcttaggttaatccggcttaacgttgatgctgtggtccatctttctaaaatttttatcccgcggctcgttgaaaagggctgcgggcacgttcttgtcacctcctcgctctcaggctcggcgccaattcctttcgaagcggtatatggagcgtcaaaagcattcgtcaactccttcttctacgccatacgcaacgagctgatgggaagcggtttatcaatgacgcttctgatgcccggggcaacggaaaccaatttctttaaaaatgcaggacaggcaaacacgacggtaggatccatgaagaaggacgatcctaaagaagtggccaaacgcgcctggtatgccctgatgacagggcatgaatttgtttacggcagcgagtatgccgaatatgagggcgaagtgatgaacagaatgatgagtgaatcgcataaagctcagcgtcaccgcatcatttctgaacccaattctgccatgaaaaagtaa

SEQ ID NO: 240874 - DNA, 705 bp, Klebsiella pneumoniae
atgctgctaactgaagaatctatccactaccatgccgctgaaaaaaaatttacgggcgtactggttcgttatatctccaatgaaacactcccgggcattcttctcgccccgaatatgatgggtaccgcagcatcaagcattgaacatgcacacacgattgcaagaaaaggctacgttgtgctcgttgccgatctgtacggccatctgcccgattcggcagagaaggctgctaactgtatgaattctgttaaggactcgccggccgagcggctgatacttaacgcagcgctggctcgactggcggagctacggtatgtaaatgcagataagctcgctgccgtagggttctgctatggcgggcattgcgtgctcgagctggcccgcagtggagcacctctggctctcacggcgtgctttcacggtacgcttgatacgcgtatccctgctgagaaagggagtatcagaggcaaggtagctgtattcaacggggcagatgatccttttgtaaccactgagcagatacaagccttcgccggtgaaatggcatcctgcggatgtgattttcagctgacaaattatgccggcgcggtccattcttttacctaccccagggccgatgttccgggtaaaacgcattacaacgaggccgtcagaaaccatgcttttggtattatgtttaccctgctgagagaggctctgggctaa

SEQ ID NO: 240875 - DNA, 840 bp, Klebsiella pneumoniae
atgaacgataaagtaatctatacagataacgttgctgtaataaccggtgcggcaaaaggtatcggcgccgcagcggcaagggcactggcacaaaaaggcatgaagctttgtctttttgaccggaacagagaggcgctcactcaacttgccggcgagctggaggcagaaaagctactgatcactggtgatatcacccgagaggaagaccttctgcagctcagggacaccgtttacagcgcctggggaaaagtgaatcttcttttaaataatgccggtgtgaaaatagccgccggggcaagtgattcccccaatatctggcgaaagcagatggagattaacctgatgtccatggttgccacacagcatatatttctgccagaaatgttaaaaatggaagataaaggtgcgattgttaatctgggctccaaggagggtattacgaccccgcctgggttcgcagcctataacgcctcaaaggcagccgtaaaggtgctgacagagcagctgtctcatcagcttctgaagcaaaccggaaccaggctcacggctcatcttctggtgcctggctatacctggaccgatatgaacgatcccggcatggatgagcacagcggtaacaagcccgatgaagcgtggacggccgcccaggtaatcgattatttcctcccgcgctttgaacgtggtgatttctatatcatttgccctgataacgccgtgaccagtgaaatggatgcccggcgtatcctgtgggccgcaggggatatgctggataaccgtccggccctgtcgcgctggcaccctgactggaagagggcgtttgagcaatggatggcaaaatga

SEQ ID NO: 240876 - DNA, 1203 bp, Klebsiella pneumoniae
atgtctgaacaaacgctatcacggcagcgtgaacgtattcatccccccatgggtctttttcccgccatgcttgcgctgggcgcgggcggattgtgcatcggtacaggtgagtttgcaccgatgagtcttctgccggacctggctcagggtaccggcgtttccatccctgccgctggaggctacataagcgcctatgcggcgggcgtggtggttggtgccccggcaattgcggtgcttggtgcgcgccaggcccgtaaaagactgctgctgatactgttaattattgcgcttgccggttatgccctgagcgcactggctacgggctataacgctatgctcggggcgcgcttcatttccggtatgcctcacggtgcctggtacggtgtatccgcgcttgtagcggcctctatggtatcaccgcagcataaagcccgttatatcggttacgttatgctgggacttgctgtcgcgaacgttgccggtgttccgcttgttacatgggcaggtcaggcgctgggctggagaatatcattctggatggtaacagctggtttggtgcttacggccataatggttctgctttttgttccctccgtggctgcggacagggccgcttcaccgctgaaagagcttggcgcgctgaaaaatcctcagattctgatgacgtttgccgtcgcttcagtcagctttgccggcatgtttgccgtttacagctttattacccctgcgctgacggaggctgccggattttcaacctcatccgtgccttggatccttgtactctggggagccggcatggttgcaggcaacattatcgggggcaggctggcagatattgcgctgatcccatcgatatttggcatcatcacctggaatatcgtctttctggcgctgttttcccttacgggaacgctgcaggccccggtcctcatcgtgctgtttatgctgggatgcgggttttcgctcgtgccgtcgcttcaggcgcatatgatgaatattgccggtgaagcacagacactcgcctcttccctgacccacagcgcgtttaatatttccaatgcgcttggcgcagctgctggcggtttcgtcatcgcttcgggaggaagctggatctctacaggatgggtaggagctgctttctccctcctggctcttattcttatgttcatatcggtacgcattactgacgggagcaaatcatga

SEQ ID NO: 240877 - DNA, 1137 bp, Klebsiella pneumoniae
gtgtttcatatctggacccttattccagcgttttatgtgctgtttcgctttatcagaccgctacccgctccattttgggtaaaaatagttaccgcaagcgtaatggttgtcgcctctgagtttcatctccttacgaaattattcacagggaatatgttttcccctgagatatcaagaccgctgttgctgcttaccacctggtgtttcggcctgaccatatttatggctgctctgttattactgcgcgacatagccggaacggtgcaccggctagtatcaggacgtcagctgaaatggcattcttctttctggtttatcctgcctttagtcgcggccatctttacaactcaggcactgaaaaatggcaccgccactcctgaagtaaagaagataacggtaaagctgaaaggattacctcccaactttgaaggctaccgtattgtccagttgactgacctgcatgccagcagacttttgccgcagagctgggtacaggacgtggttacaagaacccgctctcttgatgcggatatgattgttataactggcgatctgattgatggctggccagaaacacgttactccgatattgagccgcttggccagttgcaggctaaagacggcgtttttgccgtaacgggtaatcatgaatattattttggggctgaagactggatccagacctttgagaaactgggtcttcactttctaaataatgacggataccgcgttagccgcaacggcgactcgctttatcttgcgggcgtgacggatgccgttgcgccactctacggtctgccaggccctgatcccacaaaggccttgaggtcttcccggccaggagacactgttatccttcttgaccacagaccagaaaatgccagagttgccgcggaaaaagggatcgctcttcagctttccgggcatacacacggcggcatgattgcaggactggacagccttattggacctgccaataacggttttgtgtcagggctttataaagtaggctccatgtcactttatgtcagcaacgggtccggcatctggaacggtttcccttttcggctcggcaaaccctctgaaataacgcttatcactcttcatagtgaaaccagcaacatgatagttgaatag

SEQ ID NO: 240878 - DNA, 654 bp, Klebsiella pneumoniae
atgcgcgatcggccagtgggaaggctgagacttaacgtattgagtgacggtgcccgactcatcatttccaggcatttacctcgatttataagcaagtacccggaaatggaaatcgaaatctgcgttgatgacaggatggtcgacatcgtccaggagggatttgatgccgggatccgctttggcggaacagttcctgaagatctcgttgcagtccgtctgggaggtgagctcagatgggtagcggtggcatccccacgctatctttatcagcacacccttcctgccgttcctgaagacctgcgcctacatgagtgcattcagctacgcacgggacaaggggtgatttataaatgggaattccgcaaaggagatgactatcgtgtgatcgacgtcaggggacagatctgcgtgagtgaaactgcactggccattgaactggcactctctggggccggaatcgcctactgcctggaagacagggtccgcgaccacattcgtgacggcagcctgcggatcgtgctaccggaatgggggccacttgaagagccgatgtatctttactatccggggcaccggcggtttccgcagggtcttaaggaactgattgaagtgttgagagaagagattgaggccgataacaggatatcgccatga

SEQ ID NO: 240879 - DNA, 261 bp, Klebsiella pneumoniae
atggctatgataactcttattcataaaataagtaaatttatatactttatacttctgttcgttatccttgcgagagtgataccgcggccagagtattatttgagctatgaggtggcaaggagtataaataatttaattttcgacgatgtgaatgctgatacaatgtatgatactttcttttatatcactctaatgacagtgctttcaccttctggggtgctttacatagcgacgataaaactgttcaagataataaggtga

SEQ ID NO: 240880 - DNA, 165 bp, Klebsiella pneumoniae
atgtggtttatgaactggattctcacacaacataagttaaatgcgcactgtatatatatgggtcttccccgatcatggggggaaaaattcgctcctactgtcttgttcggggtgaaacacttatatgatagcaaaaataagaatgataccaagaacaaatattga

SEQ ID NO: 240881 - DNA, 1197 bp, Klebsiella pneumoniae
atgaactcatcatcttcattcgcgtcccagaaattcgaccgtaaacttgctcgcacggccatcgaccgcattaaatcaagcctcaaaaaatttgactctgtagccgacatcaacacatttcggcaaggttaccatgatgcgtaccatgtccaagggcaacagtcgggtgaaacggatttgttgactgccatgctgggcgtcgaaaagctcaatgatatcccggcacttgcccttgtcgtcgatgaaggtttgtcctggaaccaggttattgatcgccgtaaggctatggctgaccgcctgtctgcatttatcaatcaccatgcggcgaaagcacatttccgggtgccggataatctttatgctcagtgtgtgaacctcatcgagttagtgcagccccttgcgattgtagaagacaagtatgaatcaaattatcaggagatggttcaggcaaaagatgaaggccgcctgattgatgaattccaccatgtgtttgatcatttggttgggtctgagaatcctgagcaaaaacatgtgtaccgagctatcgctttacacttcctagcccaagaggacaaccttatggccaaagttcgttcttcgcctgcctgggagttgctcattcttgaggttggcaccattgctacatgctggattaacaccggagagcccattaaaacctggcgtggcatcatggcactgtcgggaatgtttcagcttggcgagatatacgctggccatcagctagcacaatcactttttgataaggctgatacgacccgaattgataagcagctggcgttagaggtgattgagatgacctttgaacaatatcgacagcgtcggacccaggggccagtatttgcgcatggtgattccgaaaccgatctctatcgcaattacaacactatcctgggagaggctattcgtaacagtgatgatccggtggaagtggatcgactaacgcgtaatttggtaaccatacagcttgagggcgctgaaaagcgcatggaaggctttgcagcctgcgcactgtgcatcctgaccccggattttttgccgctgcacggtgttgatcccgaaaacgagcgcctgcacgcgctacgccataaaatttctgccttcccagatactgaagcctggtgccgtgagctggcaacgaccccccaaattaaatcccttcaggcgcgattttactaa

SEQ ID NO: 240882 - DNA, 258 bp, Klebsiella pneumoniae
atgacaattcaaaattgcccagtatgccgtggcagagacggcctgttcgaagttacctgcccggagtgcgatggagcgggttacagcccggaagaggacaaaccctttgcacaatgccacacttgctatggtgatggtacgattgaaacgtcagtctgtccccgctgcggaggtgtgggcgaagtagacgatgatgacgacgaatatgaagaggaagaggtaggtgatgacgacgacagggacgatgaggaagactaa

SEQ ID NO: 240883 - DNA, 1128 bp, Klebsiella pneumoniae
atgcacaagaaagataattacgaagatgctattgagcttgagaatcaagatgaacttgaattgaactctcatccgcatcagatggacactgatacggaagttcggattgctaaagaacaatcaagcgtctttgagttattgagaaaagaaggcaacggaaagctagtcttagcacctgactttcaaagaaaagatgtatgggatagaaagcaccaatctgagttgattgaatcaatattaatgggcatcccgataccattaatttatctttttgaaaatgaaaatggaattcgtcaaattattgatggaaaacaacgtgtatcggctttaaaagaatttttaaacaatagattccgtttgacagacctgtcaatgtttcctaatttgaaagggatgaaattttcagatatcccgcaattacttcaatcaaaactcgaagactatcaattgcattgctacataatccaaccgcctactccagaacatgtgaagttcaatatttttgagagggtcaaccgtggtggtataaatcttaataagcaagagatgaggcatgcactatatcaagggaaatccacgaaattaatacaagaacttgcagaaagtgatgagtttaaactctctactggtggtggagtgaagcctgaaagaatgagagacagatatctagttctgcggttcatcagtttttatttattgatgaccgaaaaaaaagcttttattcaatatcgttcagatattgatacttttctggcctcaacaatgaaatttataaattcaaaggctagtgatcacataattgaaaaagtcaaagaagcttgcttaaaggggatgagaaacatctatcgtctaatgggcgatgaggcatttagatttaaaccaaaagcaggtggtaacagaaggccagtaaatatggggcttttcgaaatgtttgtgtttgcatttagttttgtcgatgcagataagctagatgattatgatattgaagattatataaatgattataaaagtaattttgaagagcttggcatattttcaggttcaattgacacaaatgaatatgtaaagattagatttgattttgcagctgaaattacaaagggcttaaaaaatgcttactcaggttaa

SEQ ID NO: 240884 - DNA, 1050 bp, Klebsiella pneumoniae
atgcttactcaggttaacattaaaaattttaaaagtattaatgatgaaaaattaaagctaacacctttaacgatactaactggaactaactcttcaggaaagtcgagtgtaattcaagcaatcatgttgatgatcatgaatagtactgaaagcaaccaatttagtatggaaagtttgcttagatatgttggcgaattcaaaactataagaaacaagagaaccaatgcaaaaataatcgaaatatcattgcatgacaaaaataatgaagtccatactgttatttttaacgatgatggcattacaaaaaaaagcgcggaattatattattatgagcaggcaaaatataaacaattccctgaactgctttatctaaatgcaaataggcttggtgcacaagactttgttcctacttctaatcgtagagtaggagaacaaggtgaatttttattttctacttttgaaaaaataaaaactgaaatagcagaagagtccttgataaaattcgaggattctaaaactatatcatttcaagttgctgagtggttaagctatataaccggaaccacctcagaactcaaaacagagaaggttggtgagcaggttaatatttactttagcatcaaggatttagagggtgatgtatcccctttcaatcttggcgcaggcatgagctatataagtaaggttattataatttgcctaatggccaaaaaaggcgatttagttattttggaaaatccagaagtacaattacatcctaaagctcaagctcacctaggcgaattccttacctttgttgcaaatggtggcgttcaacttatagtagaaactcattgcgaacatttattaaataaaatagcgtatcaaatttttgatgataaattttctaataacgatttagttatacactataaatcaaatgttgaaaacaactttacaacacttttaatagatgagaatggaagttatacagatttgaatggtcaaccaactagctttccatcaggattctttgatgcaactcttaatgatcttttgagtatgaggtaa

SEQ ID NO: 240885 - DNA, 747 bp, Klebsiella pneumoniae
atgttagggaagatggttttagacaattccttgttaatcgcttatgaaaataaaaaagaatcaaaaacatttaaactactaatgaggaagttcacacatccttacgcgactaactggaaacagattaaagctgcattaaaagaagggcttgaactacctaaccatgttcaaatattgtctcaaatggcacagttgccagagagtaacgatgatctaattacgttggcctcaaaaaccatattcaaaataattttaactgaggacagttccaaagcctttccatatgtacatttcaagaatgacatgtttaataaaaatattgttttttcattatctagtactgatagcagacaagacttgatcagttattttggaatgatgtgcagcaacgccacaaaaataacaatttgcgataactatttttctgaaaactggatggaaaacaacaagttattctatcaagttcttcccagaaggaggttgcacattgaatatgccgaagttgcatcaggaattagtgcaagagcaaatagctcagaaataactaatacatttctgcataccatatgcacagattggacatcaagcgtatcagcacttcaaaaatactcaaattgtcacgaccgatatctgttaattgagtcacctggaagcaaaatagaagttatgctatcaagcggttttcaccatctttggaaggctaatcctaaggagattacttgtgtctttacagaaatcctactgtaa

SEQ ID NO: 240886 - DNA, 1101 bp, Klebsiella pneumoniae
atgattcctgatattgaacttagagatattcagccaaagggaaacagtgatgtcccgtcgtcttcgcacatccagactggattaccgattccaaaaacagtgcgggttcagttctttagccctgacgaatgggagtcgtttacagaggaatgggcaagttatctcaaaaatgaatatgttgcagccagacgctttgggggttctggtgatcttgggatagatattgctggtttctgttctgacaagggattcgaggcggtatgggataactatcaatgcaagcggtatggacatcctcttcggcctggtgatatttgggttgaaattggcaagattatttattactcatatcttggcaaatatacccctccacgaaagcatttttttgtttgctctcagggaatcggaaccagtcttgaacagttgttgaacaagcctactgagttgaaagaaaaatcgattgaaaactgggataattactgtctaaagggtattacttctactgctgaaattccgttgactggtgcattaagagcttaccttgacgcatttgatttcactattttttcatcaaaatcgatagttgagcttatcgaaagtcatgccagaacgggttttcactcggttcgctttggtggcgggttgccgtatcggcctaacccatcttctccaccaaccataccgacggaaaatgaaagccgatacattcgccagttgcttgatgcctatggagaccatttaggcacaaatttaccagacgctgcttcgttggcgtcacacaatcaatttcgtagtgactatcttcgccagcgcgaacgtttttatcacgcagaatcgctaaagaattttgcgcgagatactgttcctgcggggacatttgatgccttacaggatgaaatctaccatggtgtaattgatgtctgcgaagattatcacttgagtgggtttgcgagaatgaaagaaactatgaagcacgctaccactatcgcggtcacatcgaatccgttggtcacttcaattaaaacacaagatcgccaaggcatatgccatcagttggctaatgacgatcgcctgatttgggtgccagataatgaatcataa

SEQ ID NO: 240887 - DNA, 486 bp, Klebsiella pneumoniae
atgaatcataaaaaacatccagagcccttcaatagtcctttcgaaaccggaatacgttcgcttgcgattctggttgcagccttccctgagtcttatgatttgcaacggctggttgaaatggattatctcgttgtgcattccggtgatgctgatggtcctgacagtttgcatgccccactaccgatgcgtgcgggcgaactactagtcaggcatggtgtgattgaaaagggattgatgctcatgatgagcagggggctcgtgcaacgtgtttcaactagtgatgggttcaactatcttgctggcgagctcgcggcaccttttatctcttctcttacgactgaatattcatgtcgactaaaagtttgtgctgaatgggtaattggtgaatttaaagacctgcctacgcaggaaatacggaacattacacatcgcttgtttcagcagtggtcgagtcagttccaaagtattcagtcatctggaggatga

SEQ ID NO: 240888 - DNA, 1827 bp, Klebsiella pneumoniae
atgagcgataattatttgcagcttagaaaaattttgttccgtggccaaaccaaagaatccgttttatctttttcatccggtattaatgtgatttgtggggcttccgataccggcaaatcattcctagcagaaactctggattttatgctgggtggaacggagctcagggtaattacagaattagctgcttatgcagaaataactctcgattttgtcaccagtgatggtcgaagttggcgtctacaacgtgcagttactggcgggaatttcaagttaactgatttggatgagccagactcgaaacctatcgtgctaaaacagaagtacgtccggggtaaaacggataatatctccagttttttacttgaacagattggcttgccgaataaggagattttgaaaagtagtaccaaagctacgactcagggactgagcttccgcaatctggcgaggcttgctctggttcaggaagatgaaattcagcataaaggctctcccttttggagtgggcagttcacaaccaaaaccgctgaactggcaacggtcaaacttctgctgacaggggttgatgattctgcggtcgttgcagtaagtggcgatggtgtaagcaatacgtctcagattatgttgattgatgagttaattgcggagttagccattgaaattaaggatatgggagaagagcgtgatgatctggcctcccaactgactcgccttgaacaatctattgagagtcaacgtgaatcgcttactgccgcacagcagcaactagagcggttattacagcaaaggggactggcctttgatgagcgaaacaaaatccagggacgactggatgagatatccgaactacttgccagatttacacttctgaatgagcattatgttatagatatcaaccgtctgaaatccattcaggagagtgggttaatcttcatgcatattaacgtggttccttgccctcattgtggagcgagtcctgctcaccaacacctggaacaaatatgtgatggagatgtagattcaatcattacttcagcaactgccgagatgcaaaagaccgaacgacttttggctgagctgaattgtacagtcagagatcttgtcagcgaaaagcaacgccttgagaagcaatgcattgtccatgaagaggattatttgcgtctggataaagccattcgggaagctattgctcctgaagttgacagtttcaggcattcgtatgctgaactgatcgacgaacgggccattgtccagcaatctattgatttgttctcaagattggaccggctggaaagcaggaaagtgaaattacaaagtgatactccggtaaaaaaagaaaaaagtgcggtgcaaaacggcattccagagtctgttgcccatagtctgtcgttaaaaatctcctctatattaaaagactggcattttcccggagcatgccaggtattttttgacaaaaatacttcggattttgtaattgatggaaaacctcgcggtagccggggaaaggggctacgagcaattacccatgcggcagtcagtgtcggactacttgagttttgccaggaaaatgggctatcgcatccgggattcctagttctggattcccctctactggcttactacaaaccagaaggtgaagatgatgtggctttgcaaggtactgacttgaaagagaaattctatgattatcttgtgaagcaccataatgaagatagtcagatcattattatagaaaatccgcatccaccgcaaagcatgaataaacagattactatgacggtattcactggtaatcctagggttggccgtttcgggttgctttga

SEQ ID NO: 240889 - DNA, 936 bp, Klebsiella pneumoniae
atgtctgttattcgtagattagctgcggttttacgtcaaagtgactctggtatcagcgcctttcttgtgaccgccccgagaaagtacaaagtttacaaaatccctaagcgtacgacggggtttagagtcattgcccagcctgccaaagggctaaaagatatccagcgagcctttgttcagctctataacttccctgttcatgatgcttcaatggcctatatgaaagggaagggaattcgtgataatgctgcagcacacgctggcaaccagtatctcctgaaggcggatctggaggatttttttaactcaattacaccagcaattttttggcggtgcattgaaatgtcatctgcgctgacacctcaatttgaaccccaagataagttttttattgaaaagatccttttctggcaaccgataaagcatcgcaaaaccaaattgatattgagtgttggtgccccttcttcaccaatcatatccaatttctgtatgtatgagttcgataatcgaattcatacggcttgcaataagctggagataacatacacacgttatgcagatgacctcacattctcgtgtaatatccctaatgtactgaaagctgttccttcaacacttgaggcgttactgaaggatttattcggaagcgagctcagacttaatcacagcaaaacggttttctcatcaaaagcacataaccggcatgtgactggcgtaacaataaataatgaagagaaattgtcactagggcgcgatagaaaaagatttatcaaacacctgattaaccagtacaagtatgggctccttgataatgaggataaagcttatctgaccgggctgttagcatttgccagccatatcgaacctgggttcatcacacggatgaacgaaaaatactcattagaactcatggagcgcctgagaggacagagatga

SEQ ID NO: 240890 - DNA, 1653 bp, Klebsiella pneumoniae
atgaccaaacaatacgaaagaaaagcaaagggtggaaatttactgtcagcgttcgaactttaccaacgtaataatgataatgtgcctggtctgggtgaaatgttggtggatgagtggttcgaaacctgtagggattacattcaggatggacacgttgatgagtcaggaacgtttcgtccagataatgcgttctatcttcgccgcctgacgctaaaggactttcgccgtttctctcttcttgaaatcaaattcgaagaagatctgacagtcattattggcaacaatggtaaaggtaagacaagcatcttatatgcgatcgcaaaaacgctgagttggttcgtcgcgaacatcctgaaggaaggtggtagtggacaaaggttaagcgaactgactgacataaaaaatgacgctgaaaacaggtatgccgatgtcagcagcactttcttctttggcaaaggacttaagagtgtgccgatcagattgtcacgctcagcccttggtacagcagaaaggcgggacagcgaggttaagcctgcaagggatttagctgatatatggcgagtcatcaatgaggcgaagacgatcaacttgccgacgtttgctctttacaacgttgagcgatcgcaaccctttaaccgcaatacaaaagataatgccggacgcagagaagagcgttttgatgcctatagtcaagcactgggtggcgcaggtcgtttcgatcatttcgttgagtggtacatttacctgcataagcgtaccatatcagatatctcaagttcaattaaagaacttgaacaacaagttaatgacttacagcgttccgttgatggcggtatggtttcggtaaaatcacttctggaacagatgaagctaaagcttagtgaagcttcagaaagaaacgatgctgcggtttcctcgaaaatgataactgagtctgttcaaaaaagtgttgttgagaaatcaatctgctcggttgtacctagtatcagtaagatatgggttgaaatgacaacgggttctgatttagtcaaagttaccaatgatgggcatgatgttactattgaccaattgtctgacgggcagcgtgtatttctgtcgttggtggctgatcttgcgcgaagaatggtcatgcttaatcccctactggaaaatccattagagggacgtggcattgttttaattgatgaaatagaacttcaccttcatcctaagtggcagcaggaagttatcctgaacctgcgcagtgcattccctaacattcaatttattattacaacacacagtcccattgttctttctactattgagaaacgctgtattcgtgagtttgatcccaacgatgatggcaaccaatcattccttgattctcccgatatgcaaacaaagggaagtgagaatgctcaaattcttgagcaggtaatgaacgtacatcctacaccgcctggtattgcggaatctcattggttaggtgactttgaactattgcttttagataattcgggagaactcgataaccagtctcaagagctttacgaccaaataaagacgcactttggcatcgatagtgctgagttgaagaaagcagacagccttattcgcattaataagatgaagaataaaataaacaagataagggccgagaagggaaaatag

SEQ ID NO: 240891 - DNA, 651 bp, Klebsiella pneumoniae
atgaaagagttagctcggctggagagtccggagattctggaccagtatacagccggtcaaaatgactggatggagattgatcagtctgcggtatggccgaaattaactgaaatgcagggtgagttttgtgcttattgtgagtgccggttgaatagacgtcatattgagcatttcaggccaaggggaaaatttcctgctctgacgtttatctggagtaacctgtttggttcttgtggcgattccaaaaaaagtggcgggtggtcacgttgcggtatatataaggacaatggtgctggcgcctacaatgctgatgatctaataaaacctgatgaagaaaaccctgacgactacctgctatttctcactaccggagaggttgtaccagctatcggactcacggggagagggcttaaaaaagcgcaagaaactatccgtgtttttaacctgaacggtgacataaagttgcttggtagtcgcagaactgcagtgcaagcaatcatgcctaatgtcgaatatttgtattctctgctcgaagagtttgaagaagatgactggaatgaaatgctcagagatgagctcgaaaagatagagtctgatgaattcaaaacggcgctaaaacatgcatggacttccaaccaagagttcgcatag

SEQ ID NO: 240892 - DNA, 2364 bp, Klebsiella pneumoniae
atgagtcagtttgatatccgtgatgcaggcgattacatcgccccaaaaggcctgtatgagcagaataaagcgcgcccgtttctgggcagtgtcaccagttcacacagtcagctaacggcaggtgcctgggaagagatccaactggtgtacaccgttggggccagcggcctcgcggatggcgcgtggcttaagcttgcctttaaattttactcggactgggcgctctttcagaccagtgaccccgctggagcaaactatgtcagtgccgagtatcaggccggccccctgttgccgggacagagccctgccacagtgcagcacctcaaagtgcgcttcgaccagaaaggacatgagcgaccgttccagaaagcgattctgattgatatcgtcgacggctacatcaaccccggggataaaatcattatccgtctgggcgaccgccgccggggcggaggtgggacccgcgtacagagtttcgtcgagaaagattttcgtttccgcctgtttgtcgacccgctgggcagctcaaaatttgctgaagtgccgggggacacgctgctggatatcgtacccggcgtacccggatccctttccgtcattgccccccggctactggctccccgcacaccgttctccgccatcatccggctggatgaccgctggggtaatacctgccgggaactgccattgtcaggacggctggcactgacctcatcggaaggggaaacgcaataccatgacttccagctggccgggcagggctgggcgattgtgcgcattagtgatttgcagctttctgcaggagagtggtcagtcagcgcgacactggatgcactccccttgctggaaggaaaagcatgggtcacgaccgaagagaccgcgacaggcctgcgcccgctgtatgctgatcttcatgtgcattctgatgacaccgtcggcaccaatgatacgttgtataacctgagttacggacgagatgtcgccggtctcgatattctgggatataccgcaaacgactttaacgtcaccgaagcgcgctggaaacaggcggtaaagctgattaatgagttgaaccagccagagagctttgtctgctattccggtaccgagtggtgcggcaatacctgtgccggtggcgatcacaacgtggtatttcttgaagatgatgaaccccagttcccgtttgataatcaggggcgactggtacgctctttcgagtggaacgagtttaccgccggcaccatcaaaccgggagcgtggccgctggatgagctctatgctgcctacgcgcgcgagccgcacaagcacctgcttatcccgcacgtcggagggcggcgctgcaacctcgactggcaccatcctgaacttgagagactgattgaagtgggctctgcatggggacagttccactgggtctacgctgaagcgctggagcgcggttaccggctgggcgcgacggctaacagtgatgaacaccagggacgctgtgggggcggcgtgcccgccacggcggtattcggttcacgtgggggactgactggcgtactggcagagcattttgaccgtaagggcgtggctaccgcgctgagggcccgccacacttttgccactaccggtgaacgcagctatgccgaactgcgggccggaaatgcactaatgggtgacgtggctgcgtacagttccgctgagaagctgagctatcgccttttaggcgatgctggctgggaagcgataacgctttatgatggtgaaaaagaggtatggcaccgggatttgcacgcggaaatgggccgttctcagcggcagttccgtgtacgcctgagtggcgctcgtattaaagaccgctatcgtggtgcgtactggacaggacatattgatgtcatcgggacgcctatcaatggcttctccctgaccggcgctgaccaccctgaacagacagtatggcgcgagagtcatacgcagattgggttgcggacggataccaatggagacagcgacacggtgacagtcagcacgggtgggctgaatggggcaacggtacgcgtgcatcttgagatctgcagctatatcaaagtgggcgatccgcttacgcctcaacctcatacatgggcccccgtttttgatgctgagattgatggcaaagcccttctgttatcaggcaaagagaccttcacgctagcgggcactgagctgcaggttgagattgagctggtgacagaacagccgctgccacgtgacctccggggtgatttacttctttcagaaatcaatctgcccgaaaagtctgaacatgctctgttcatcagtgcgagacagaaagaccagtcgcgtatctggacctcggctctgttccttacgcgttag

SEQ ID NO: 240893 - DNA, 747 bp, Klebsiella pneumoniae
gtgaagttaacgccaaactggggctgggcctcgttgcccgctctgctggtggtctggataattgtagccagtcactatccttcttacgtcctcccgcaaccctgggatgtctggcgtgaagccgtgcgctggttcagtgacggctcgatatgggctcagctgggcgcgagcctgctggaggagttcgccgggttcgttgtcgccgtagtgctggcgatgatcctgggcgtcagcgccgggctgtccgatcgattcaaggattttctcactccactgaacagcctgtttatggccatcccgcccattgcatgggcaccgctcatgctgcttatttttggcctgggcatcgtctctatcgtggtggtgattgtcatcgccgcgctcttcccgatgtgtctgaccattcaggaagggatccggggcattcgcggcggggaagtgcgcgcggcgcgcacgctgggtgcccgtccggctcagttgttgctccatgtttatctgcccagctcattgccgtttatcactgccgctttgcgtattggattcagccaggcgtggcgtgcactggtggcggcagaaatgcttggggcctcccggggcattggctggatggtggcgatgggcggtcagacgggtaacagcagtcaggtactgctggggatctgcctgatcgggctcattgcctggctgatggaaaatcttgtgtttcgccgcatcgagcagcgctaccagcgctggcgtgcccaataa

SEQ ID NO: 240894 - DNA, 993 bp, Klebsiella pneumoniae
atgggtaaattattacttgctgtgctgatatcaggggttttatttaacgaggctgacgcagcggagtcgcagccgctgcgcattggctgggtttatgcgctggcaaacgcaccggcgctgattgcagaaaaagaaggtttttataagcaggaagggctgaatgtcgagctgaagtcctttggcgacgggccggttatcagtcaggcactggccgcgcacgagctggatgcggcgtatatcggtgcgaccccggtgtttcagtggttctctcgcgggctgaaggggcaaatcattgccaaagtgaacagcgggcaggctgcgctgatcgttcctgccaaaagtggcatttcaacgctggctgacctcaaaggcaaacgtatcgccggggtgaaaaaaggcagcgggatggatgtcctgcttcgcggagtcgtgctgcggccagccggcttaatcgcggataaagacgtgcaggtgctgactatgccggctggcaacatgcctgctgcattgcagcagggcgtggtagatgccgcctttacctgggaaccttttatcagcgaagcgctgttgcgcggtgatgcaaaagtgctgcttgacgtgaataagattcagccgggttatccgtggtatgtgctgatggcgctcccggagacgttaaaggatcgccctgacgacgcggtgaaactcatccgcgcgcatcagaaggcggtggacttcatcaaccagcacccggcagaagccgatcgcattatggcagacgcgtttaagctgcagtccatcaaaaccacagatggcaaaacgctgtcgccggaggcactggtagaggaggcgcgtaaacgcatccagtggtcagtgtcactgacgcagaaggacggggcgttctttgaacagctgatgaaggattcccggtcgctcggctatatgcaaaaagcccctgcgctaaatgaatttgttgatacgcagtggctgaaaaaggcagggatcccgcagtga

SEQ ID NO: 240895 - DNA, 795 bp, Klebsiella pneumoniae
atgacaacttctgcctcatccgcactggcggtagacaatatcacttttcgttaccccggcaacgcaccggtgttcagcaatttcagtttccatgcgcggcagggcgaatttgttgtgctgctggggccttccggctgcggcaagagcaccctgcttaacctgctggcgggattcaccgagccggaaaagggggccgttaaaattgacgggcagcggactacgcccgagaacaaccagctgggttacgtgtttcagcagccgcaactctttggctggctgagcgcgctggagaacgtccggttcggcttgcgcatgcagaaacgtggagacgtcgcttcccagcgcgatcgagcgctgtcttatctgaagcgggtgggactggcacatgctgcccatcagtttccgcatcagatgtccgggggaatgcaacagcgcgtgtcgctggcgcgtgcgctggcactggagcctgacgtattactgatggatgagccgttcgctgcccttgatgccattacccgcggtgatatgaacgaagagacgttgcgcctctggtctgccatcggacagaccaccgtatttatcacgcacgacattgaagaagccgtcttcctgggcgatcgcgtcatcgtcctgaatcgtgctccgggcggcgtgcacagcgaactcatcgtttctttgccgcgtccgcgcagcaatctggagacgcggcagcttccggcttttgctgcgtatcgcaatgaattactaaagcgcattacggacgtgatgcagcagtcccacagtcactcactctaa

SEQ ID NO: 240896 - DNA, 717 bp, Klebsiella pneumoniae
atgacactggtgcgtgaaaacatgacatcgctgtaccggcagattgccgatacactgcagcaggaaattgcagccggccactatcagccaagcggaaagctgccctctgaatctgcgctggaagcgcgcttctccgtcagcagggtcacggtccggcttgcgcttaagatgctcactgagcagggtattgttgagcgtaaacaggggaaaggcacctacgtgtcaggcaaaaaagtagcgcacggcatcaacgttatgcgcagctttcatgagtcccttaagcagcaggggctgaacgcgagtatgcgtctgctggctaaagaacagatccccacacccgagccgttactcaccctgtttgagatggcccggtctctgacctttatctcacggttgcatctggtggataacgagccgattgccgtgggttacagccattttctggctttccctcatgcgctgagctggaaagagacggagcaggaacccacctgggctttgctggaaaaagcaaccaagagtgcgataagtcgctctgatatcgccatccggctggactttgccgataaggcacttgccgaagtgctgggcatcgctaaaaactcaccgctcttcctgctggagaggacatcctggtttgaaaacggcccgtgtgcggaaagctcgcgtttcttcatacgtcctgaacgttacgagtttacattgagcaacggttaa

SEQ ID NO: 240897 - DNA, 123 bp, Klebsiella pneumoniae
atgagcgagcagcagaccttatttggccccgataatgtattcaaaatggcgccgacacaggatttcaactttacttgctctttgaagaatacggcggctaccgtacaggtcttcatattttaa

SEQ ID NO: 240898 - DNA, 417 bp, Klebsiella pneumoniae
atgccggatcttatccgcaaaatcctggccggcggactcccggtcgaactctgtctggccggcaaccagacggcacaggcagacgccagcagcctgctcggtccctggtttgcactgaccgtgggggatggacgatttctccagacttttgacaggatcacattctcgtgcctgtggcgcctattccgtgcccgctcggccgcagatcaggatcacgcccgcagctggcagagtccgatcgccgggatatatttccccgaggccgataacgcgcaggttgtgatgactctgggcgatctgaggctgtttctgacctggcaggaatcgcgctgtttttcgcctgctatcaggcggaagtcatccatggcggcctgcaatccctaccgcgtgggcagtatgaagcggcgaccgtgctga

SEQ ID NO: 240899 - DNA, 408 bp, Klebsiella pneumoniae
atgcccgtcgattttctgaccaccgagcaggaactgaattatggccgctacgttgcggaacccaatgacgtgcagctggcgcgctattttcatcttgatgaacgggatcttgctttcattaaccagcggcggggaaggcataaccggctgggaatagcgcttcagcttaccagcgcccgttttctgggcacctttctgacagatttaacccgggttctgccgggtgttcagcaatttgttgcggtgcagcttaatatccgccgtccggaagtcctcacccgctacgctgaacgggataccacactcagagagcatactgcgctgattaaggaatattacggttaccatgaatttggcgattttccctggtctttccgcctgaagcgcctgctgtacacccgggcatag

SEQ ID NO: 240900 - DNA, 918 bp, Klebsiella pneumoniae
atgtttaatccaagtatagcagttgtcatggctacatataatggtgaaaagtttattaatgaacaaattcaatctattttgaatcaaacatgtcaacatttaactctttatgtttcagatgatggttctacagacaataccattgaaatcataaaagaaattgctttaaatgattctagactaaaatttataggtgtgaatgaacaccccggtgttgtacgaaattttaatcgagcatttttagaaacgcatgaggatattgtatttcttgctgaccaagacgatatctggccgaaagatcgtataaaaaaaatgattgattattatattgagcaaactgatgatactgatcaaccttctttgcttttcactgatatggtcctagtcgataagaatagtgaaatattagcgagcagtttttataaagaattagaaatcgatcctcattataatcaagagttgaaatatcttacctggcgctgtacttcgtacggatgcaccatgatggtaaatagaccattacttaaccaagccctacctttacctcaagatgaagatgtaacaatgcatgataattggttgattctctgcgctgcaaatttaggtaaggtatactatatggattatggttccgtattttatagacagcatgagtccaatcacacgggagggagacgtagatcgctaatacaaaaaataaagtctttcaaacttcagctaaaaaaaatcaatacagcaagaatcaagcgggagaaacagattgatgtccttttacagagaaaacttgctcatccggaattcattaaattctcttcgttagataataaattagatttctttaagagcaatattttgagctataaaaaagaaaggcgattatattctatattttattttctttctatgtttcgtaaataa

SEQ ID NO: 240901 - DNA, 597 bp, Klebsiella pneumoniae
atgccaccaaagaggacattaaaaaattgcggtaactcatcgagcgatgtttttcttaaaaaactaccaacacgtgtaaccctgacatcattttttgttgcttgctttactgtatcatcgttttccataactttcattgtcctgaatttccataccttgataggttttccatccatgccatatcttgtttgcttaaatatgactgggcctggtgaggtagcttttactaccgctgctattactaaaagtataggtgaaatgagtaaaattattatcgcagccaagattatatcttctaaccttttgaacaccatgttaataccatttaacggtgtatcaaataaaggaacgactggcaccccattaacatcttcagttctagactgtaatatattgaaggtgaagatatcagggataagtattactgagcaggtagtatcagttaacgacctgattaactctttcatttccttttcatcactcattttcatggcaatatatatacgatctatcttgccgcttttggcatcatcaattaatttttggaaatcacctttatattcaatatcatcagaatcgagtttagtgggattataa

SEQ ID NO: 240902 - DNA, 207 bp, Klebsiella pneumoniae
atgccgcaccctcaattattgactaccattgcaaccactggcatacatatcgatatatctaatgattcatatcaccctgatctgcttgaggagttaatgtctattgtagtgaagtcaggtgggcatctaacagtaaagggtatgcaccctgagctaatgttaaaacttgctcaattaggtggaaagcatctgaccgtgaaatggtaa

SEQ ID NO: 240903 - DNA, 579 bp, Klebsiella pneumoniae
atggataacttgtcagaggaattacacaaaccccacaatggtagacttagggcttgtgttgctgggttatttgatacagaaaggaacaaaagatggattgactgttcccatgctattgctgtccaccataaatggtctgtggtaacccttcaacatctaggctcgctggattctcgcctaattaatgatgatgctgaactcgtcaaaactggatatccaaagaaccaatttcatgacttaggtgatcacatcacttcttcatatctctgggttttaggcgtatatgaattagtaagaacattggatcagtttgcgagaaatgccgattctccattgaatcatgtacgtgacgtgattcagacctataagcaaaagatcaatcgtttaagaattccattagctaaaatggaagcagcaaaaagtaacactgatgactcaccaatcgcatatccaggattgaataaggatttaggccttgcatggcgtttgaatgaacatgaatggatcactcgtcgtgaattatctgatgaagctctcgcattattcgagtctataaaatcttcaatgtctaatccctga

SEQ ID NO: 240904 - DNA, 876 bp, Klebsiella pneumoniae
atgagtaaaagaattaaaagtaaaagagacctgccaaaacagttcgatttaaaaaaatatgaaatgcttgggtcactatcagacaaagacctttttaggcagatttattggcgaatggaatggaaagaaaaaaactggagtgaagaccttgcgacatattttttagagcatggctgtaatcttccattgtttgatcacgatccgtttggagaaataaagagtgagcatggtgatgcgtattacgaacagtttaaaggtgggcgggaatttgtagagaagtatcagagtcatgcaaaatctaaaaaacacctttctacaggttatggaattggtgtgctatcaaggttagaagttatgcatttttctcagggatatgaccaacggggggacagagtgggaaaaccattttgtattcctgatgaggaagttaacgaacttttgaaggatgatattagtaatcacggtaaactagtatcttatgcatctgatccggttagcttgattatgggagatgtggccctttatctttcagtagatttgtctgtccctgatgaaatattaatttctgatatgaaaaatctcctgccaaaatggagggaggaattagaggttagtgcagaggaaatacaggttaataattcgtggccaatcatcagaaagaaaataattgaatataacgttttgccttacattgatttgcatttatgggcaaatgttaagggtgtttcaattcctggtggagtactcgctgtctccttgttccctgatggcgataaagagcagttcgctattgcacaaactattagaccgtttatagatagattgatgaactatgagtcattagagaaaatcaagagagaaatttctaaagaataa

SEQ ID NO: 240905 - DNA, 351 bp, Klebsiella pneumoniae
ttgacaaatcaggcgaggctctggccggaaggtgaggtatttacccgtgaagtgttgataccgacaaaggacggtgctttacccattgaggtgacttatgttgtccctccgttcgaggtcgtcgttgctctgtggcagaacaaggaacatgaaaaaacgtatccgctttttcgtcagtttattcagggctggagcctggaacaaaatctcaccgataacgtgcttaaagcctttttgagagcttacccgggaaccgcaaataaaattatgcatggctggcaggaacatatgcaaagcgcactaacggaaaatgcgcatctttttgctgtgcagagccagacccttaactga

SEQ ID NO: 240906 - DNA, 189 bp, Klebsiella pneumoniae
atgttaaaacatgaaactctgatagctgcaattgaggccgctgcggagctgcgtggatttagtcttaatgggcaggaacggctggttgtccgcacctgtattgatactgcaatggcagataaagcacgacacaataggcggatggcggccagtactttccactggcagaaacctattttgctaagatag

SEQ ID NO: 240907 - DNA, 690 bp, Klebsiella pneumoniae
atggccggacaattagatgatgcagcaaaacagattttaggcacattgttagctgatttcagtgatcgaggattgaccgcacaggacttaaaaaaggggtatgaaggaccgaatattgaagcccttgctactgctgtatgtagtgtggctgattttacctctgttgattttgaggttgcattcggtgatttagaaaaagctaaaatgataaaaacaggcccaatggcgatgtatgataacgacagaagaaatagtgccgttttcataatgggatcctatagcaagcgtgaattcgtttatttaacagaagcggggtataaggaatcgcgtaaaattccaaatcgcccacaacgtgttcagcgtatagtcaataatctgaccattacaggcggtcatttcagcaatacgcaactagggcaaggagaagctgtttctcagacccaagccatcacaactagttctgataccgaaatagttgcaaagctgatctccatccttgaaagccagggccaagtagttaacaacgatcaacgttcagacattgaagcagctgtcgcagctgctaatgaaggagatggtaaagaagccaaatctttgctggctaaggtttgcggtccagtctgggaatcagtacaaccggttatgtggccgattgtgggtgagctggtcaagaaaagccttggactttga

SEQ ID NO: 240908 - DNA, 126 bp, Klebsiella pneumoniae
atgacgcgattaacggccaaagatttcccgcagcagttgctcgaatattatgactactatgcccacggcaaaatcagtaaacgcgagtttctccagctggcgggaaatatactgtcggcgggatga

SEQ ID NO: 240909 - DNA, 567 bp, Klebsiella pneumoniae
atgaagacgttgactttcctgctttcaacggtcattgagctttacacgatggtcgtgttgttacgcgtctggatgcagtgggcgcgctgcgacttttacaacccgttttcgcagtttgtggtgaaagccacgcagccgattgtcggaccgctgcgccggattatcccggcaatggggccgattgacagcgcctcgctgctggtggcatttattctctgcgtcatcaaagcgatcgtgctgtttatggtgatcaccttccagccgatcatctggatctccgctctgcttattctgctgaaaaccatcggctcgttgatcttctgggtactgctgttgatggcgatcatgagctgggtcagtcagggccgtagcccggtggagtatgtgctgatgcagctggcggacccgctgctgcgccctatccgcaacctgctgccgtcgatgggcggtatcgatttctcgccgatggtgctggtattgctgttgtacgtaatcaatatgggcatcgccgaagtgctgcagggcaccggtaatgtactgctgccggggctgtggatggagctatga

SEQ ID NO: 240910 - DNA, 390 bp, Klebsiella pneumoniae; identical to SEQ ID NO: 219905

SEQ ID NO: 240911 - DNA, 837 bp, Klebsiella pneumoniae
gtgatcgatgacccattaccaaagaactggcaagatctccaaacaggtgtccaacgtatattccgtaatgttggcttgcatgcagaagttgaggtcgatttagaaaccccgcgtggctcggtaaatgtggatgttcacgctatagatcttaggagtgtggacaaaatcacatacattgtggaatgcaaaaactggggtagttctataccgcagactgtggtccattcgttcaccacagtaatgcatgaaaccggcgctaacattggatttatcatttcaaagcatgggcttcagcagggagctaatcagtacactcgaaacaccaatattatagggatgacataccttgagttccaacagaggtattttgaggcttggtggaaaaggtacttttgtccacgtatcggcgatgctgcggacgagccacttcagtacgtcgaaccaatcaactctaagcgagatcgcgaatatgctaagcttagccttcaagaacaagagaagttcgatcagttaaggcaagagaaaagtgtatccgtaatggctctctctatgctcaatttcgggtttatatcgaaagcattaaacactggcaacttgctggatgtcccaaaggatcttgatgattttaagaccagatttctcgcccaaatttgtcctcacattgaatggcattgcagtacgtaccgagagctcctagagagcatcttagaatacttatcagacatcaaagcagagttcgatgcaatatttggtaaggccatctttgaaccacaaagtagtatcacgggggttactgctgatggtccccctttggaagatggtatttatcatcattaa

SEQ ID NO: 240912 - DNA, 834 bp, Klebsiella pneumoniae
ttgaaactttttgattatctgaagatggagtttcctggtctgacgcctgaagctaccaaaatccatcttgcgcaattgaatgattataaagaggatccgttggttaaattccgtgaagggactttcgatgactggcaatgctggcagaagcgcctggaatttagccgcagatatgtcgtttcactgatcaggatcccgtggactgaaacttggctatttgcgggagcatttcagcagacaggcaatgcgggaaagagagcctatcctaatcgtgaggaactgtattatcagtaccaccttcagaaaattcttgagactgaagaatacgtaggaagactgtatgtaagctttaaaaatacagcacgcaacttcattcgcctcggtgaaaatattcagagcgaactggttatcagctccattaccccggcacgtctgaccttcggcgattttccaggctaccgcaacgtcgtattggatcggaacagcataggagcgatcctcaaacttaatctgcaatcctggcgcaccgcactgtccatagttaaaggcatctatatattaacagatcgggatggaggaaaactctacgttggaaaagccgatggaatcgaggggatatggggccgatgggaatattattttggttccgggcatggcgacaatgtaggacttaaggaagctttcggcacaggcgatgaaaatcggttgcagaatatcactttctcgatcctcgaaatcatggattttaatgccgaaaaaggtgaaattgaccgccgcgaaactcactggaagcaaatactgctctcgcgggagtttggccataaccgaaactag

SEQ ID NO: 240913 - DNA, 678 bp, Klebsiella pneumoniae
gtggatcagaatcttagaaatattcataaacatatgattagtttgggatgtggatcgttaagacatgccaactatttggggcatttctacgatatggttaatgattactgggatgaattggctgtacttcaagctgcgcatgccggtgaaatattcttgaaagctagattagcccaagaacatccattattaattttcgataccattccaaaatcaacgagtaaacatgttgatagtcttggcctgctaaattttgaaagtttactacaagacggaagaacgattgattattctgagttgccagaaaaagtatgggccgcaacaggtttgaaattcacacctgaccaattacgactttataaagaattcggttatcttcgaaacaaaatacaacatttcgcctctcctaagggagatatacaaagtcaaattacaaattatatctatggatttattgacccattcataaattcgcaatggggtttatatgcacttgatttttgcgatgacaccgagccgtatgaacaccttgttcctgttctggcttgctgcgacgtggagtttttgattcctccaggtttaggagcaaatgtgatgcaattattagatgctggatctcctgcctatattcgtaagatgagaaagcaggcgattgaaaagggttatatttttagttaa

SEQ ID NO: 240914 - DNA, 705 bp, Klebsiella pneumoniae
atgagtgtcgtttttgttttagctgtagcattaatcacgaagtttcttttcccagattttcatcctattgcaatagtttctgaattattgaatgtcaaaaaaacaattgataagcataaagtagagacatggcttgccttaatatctatagcctccataatttcttctttaatttgggttcttattatttggtctaagaacatagtattaggatttttttgtgagaaacagcaccatgaagatatatttcacgcaaaaaaattgcgtatcttaagaaagaccatatctaactcaacacttgatagtatgttgttggatgctatggagagtaaaccaaagaaatcaattttagttacgctttcttcaaggaaagtatatgttggaatagtgaatggcattcaagaacctacagaaagcgaagcgccaaatagctatatatctatttttcctattatgtctggttatagagataaggatacactctcgataacatttactaattcatatccgtcagaagtatcagtctcatctgcagcgactgctgattcaaagaaaattcataaaatagctaacatggacattctaatcaaatccgatgaaatttcccatttatcttggtttgattttgcagtattcgacgaggttaatggttcctttgaggaaggaacaatcgatctgagaactaatgcggctgattctacttaa

SEQ ID NO: 240915 - DNA, 282 bp, Klebsiella pneumoniae
atggcaaacaataaaaatcatatcattggagaagtgcaaaaaggttatgctcgcatccgagtcggtgatcggggtggggcgtacattccctctgaggaaattgcaacgctccctgaggttcaagacatgcaaaaacgtgctgcagcaatagtgggtcgtaacaccaagattaatggtgcatatattgctgggcaagaggcagttcgtagatatgcatccattgcaaaaggcgcaactgttaaagaacagacgttagaacaaaaagataaagcgaaggcataa

SEQ ID NO: 240916 - DNA, 135 bp, Klebsiella pneumoniae
atggacaaggacaaggacaaggacaaggacaaggacaaggacaaggataaggataaggataaggataaggacaatgaaataataaatgacattgtcaaatacgcggaagccttccagaaactaacaaacccgtag

SEQ ID NO: 240917 - DNA, 360 bp, Klebsiella pneumoniae
atgatgaccttgaaatattattttaggcactgcttatggggatggtgtggctatggctatctgatatattttatagtgcgcgatatgaataacggtcacatttttcctccctatgctccttatatgccatttgtggttgcatatcttgttttaagcgccttcctgtacccattctcatattattcttcggagaaactagcccttaagataatgaccaaacacttttgggatcgtcacattggcgtgaacagcggtgtgtttggcatgttcattattgtgtggttgttttgcatgccgctatctgtacccttattcatagtgtatttatgcatacgtgaaaagattaaagtaagtgcttaa

SEQ ID NO: 240918 - DNA, 789 bp, Klebsiella pneumoniae
atggcaaaggtccattttattggtgccggacagatgacggaggcgattattcgcgcgtcattaagcaacggtacgctgcgggcggacgcgatctcgctggaggatatcgacagcgcgcgaatcgaggctctgcactcccgctatcggttgtcgggcgacggtggcttaagtgaggcctctttgctggtgctggggatccggccgcaggacgatctgacggcggtggcgagccgcgtgcgcgcccagctaaacggctcgacgacggtggtttctctgatcgcaggagtaacactggaaaagctggcctccctgtttggtgagacaacgccgattgccaggacgatccccaataccctgaccgataccggatttggctatagcggcgtaaccttaaacgcccacgccagcgcggctgatatcgagccgtttctgcgcggttttggcaaagtgctgtatctgccagagcggttgatcgatgtctttaccggttttggcgtcgcggggcctaactatatttactactttattgagtcccttaccgatgccggcgtactggcggggctgtcgcggcctcaggcgacggaggtggtgctggagaacctcctcggcgcggtcgagatgctgcgccaaagccagaagcatccgcgtcagcttctggatatcaataattcgccggcgggagtcgggatccacgctctgtatgagctgaacaacagtgattttgccgcaggccttcagcgcagcgtactggcggcggtcaggcgtacccgtgaactgggacagcgctaa

SEQ ID NO: 240919 - DNA, 540 bp, Klebsiella pneumoniae
atgacgcaaataagctcggaaccggcgcataacgccgccaccttaaacgatgaggtgaccctggcgctgcgcgccattactgaaaaacgcgcggctaccatcggttacctgttggacgaaagccgacaacggcatatcgcggatgattttgcgcgtgaagccatacgccactatggccgcgatatcgggcataagctgcgtgcgcaaatgcgcgatcgccaggatttgcaggagtttgccgggctgtttacctgcggtctggaatctcaggtttatgagatggaggccgttagcgccagccgggccgaatttatcgtcctgtttcattactgtccttacgtcaactgctggcggcagcaggggcggggcgccagcgaaattgagacgctatgcgatatctgcatggaaggggatcatgcgttaaccgatgcgtttccgggactgcgtttagaggtgcagaccgcgctggctcgcggtgatgccgcctgtcggctgcgtttttatcagtcagagtcgcatgaggcggaatggcaaccttaa

SEQ ID NO: 240920 - DNA, 753 bp, Klebsiella pneumoniae
atgtttagcctggcgttcattcgggacaattttacgtttattttaagcgcgctgccggttacccaggtgataacgttattgtccttactcttttccactctgctgggcgcggcgctggcgtgggtgattattcgtcaggttcccggggttcaatggggggcgaaggtatttctctcctttagccgttcggtcccggtactagtgatgctgtatttctttttttacgtctggccgtggatagccgccgggctgtttggcggcccgcaggacaatatgtaccactataaactctcgccactggtggcggcggtcaccgcgctatcgctgattttcagcgcgtttttcgccgaaacctttcgcgcaggctggaacgcggttgataaggggcagcgcgaggccgcatggtcaattgggctaagcgggttcacgcagttccgacgcattatttttccgcaggcggcagtatccgcactgccgaacttcaccagcgtgctgatcgatctgattaaagacacctcgctggtttacaccatcaccgttattgatctgatggcgaaagccaatatcgccgccgcgcgcgggtttcattttgtcgaagcctattgcgtcgtgctggtgatttatatcgtgctgtgcctggcaattgccagagcattgcgcagtgtagaacggtttctgcgcgcccgctggcaaggaaacgtaaaaaagagtgttccacggttatcattttggggaaggtattttgaaaaataa

SEQ ID NO: 240921 - DNA, 699 bp, Klebsiella pneumoniae
atgaacaataacccgctctttaactggcaggatatcgccggaatattgccgaaactgctggaaaatttacccgtgaccctcgggataacgctggcctcactgctgcttggtttgacgatcgcgctgctgattgtgctgctgcagtttagtcgctttaagccgctcagcgcggtggcaaacgggtataccgacattctgcgtggcgcccccctggcgctgctgatcctgctgtttttctttggcggaaaattaattttgactgcgctggcgctgccgccgctatggattagcgataccacctttgcggtgttgtctatttcggtcagcatcagtccctattttgcagaaatgatgcgctccgcgtggcgtgcggtggataccggccagaaagaagccatcatcagcctcaatattccctggcataagggaatgctgcggattatttttccccaggggctcattattgccattcccgtttttggtaatcttttaattaacctcgtgaagatgacctcactggtcaatattattggcattgtagatatttttggccgtgcacaaaagatttcgcaaaatagctatgggtctaaacaggttgcggcgtttattagtgttattatcgtttactgggtgctgaatagtattattctctattttaccactcgtattgaaaagaagtatcagttcctgctggagtga

SEQ ID NO: 240922 - DNA, 741 bp, Klebsiella pneumoniae
atgataattattaataaggtcagtaaaagcttctccggtgaaagagtgctaaaagaggtctcgctcagtattcattccggcgagattatttgcattattggccccagcggctcagggaaaaccacgctattacgtacacttaatttcctggagccagccgatagcgggcaaataagaatagatgatgtggcgctggattgcacaaaagcgggcaaaaaggagattgaaaagctacgggcaaaaaccgccatggtttttcaatcgtggaatttctttcataatctgaccgcactgcagaatattaccgaaggcctgatttacgctcaaaagcgcccgcgtcaggaggcgcaggatattgctgaacaactcttaaagcaggtggggttattgcataaaaaagacagctatccgcacagtctctccggcggccaaaagcagcgtatcgggattgcgcgggcgctggcaataaaccccgccgttctgctgctggatgagccgacttccgcgctggatccggaaaaagttggtgaagtgctggagcttattcagacgattgccgctgcggggcagacgatgattatcgtgacccacgaaatggcgttcgcccgccaggtcgcttcccgggtggtatttatggaaaacggcgaaatcgttgagcagggcccggcggaacagatatttggcgcagcacagcaggggcgaacccgggcgtttctggcgcaactgcactatcatgcctga

SEQ ID NO: 240923 - DNA, 210 bp, Klebsiella pneumoniae
atgaaatccatcaaaactttcgttgcagttgccgcactctctatgatctctttcggtacttttgctcagagcatcagcgccagcgcttccaccctggaccgtgcagaagccaaaattgccgcgcaggccgcagagcaaggtgcgtcttacaaaatcaccagcgctcaactcaataaccgcgtacatatgaccgctgagctgacgaaataa

SEQ ID NO: 240924 - DNA, 189 bp, Klebsiella pneumoniae
atgaaaaatatcggcgtagtcaccgcactgctgttggccgctacactttcgtccggcgtgatggccgcagagaagagccagacacatccggaggcgggttccaatatcgatacatcgatgcatcagaatcatattgatgtcagccatgcctttgataaagagagcctgaccgcaggcaatcttcagtaa

SEQ ID NO: 240925 - DNA, 162 bp, Klebsiella pneumoniae
atgaggctctctaccgcggttctcgccctcagctgtgccctggcaacgatcaccggctgcacctcgtcaaaatcgtcaccggaacgccatgcctacgccttcgtcgcccaccggtccgattttgtcggcggcaacttcaccgtcaaccgccaggaaaattaa

SEQ ID NO: 240926 - DNA, 819 bp, Klebsiella pneumoniae
gtgtcgctgtcagaatccgagtcgctgtcggagtccgagtcactgtcggaatccgaatcactgtcagaatccgaatcgctgtcagaatccgagtcgctgtcggaatcggagtcggagtcagagtcagagtcgctgtcggaatccgagtcgctgtcggagtccgaatcgctgtcggaatccgaatcgctgtcggagtcagagtcactgtcagcatccgaatcgctgtccgagtcagagtcgctgtcggaatccgaatcgctgtcagagtcagagtcactgtcagagtcagaatcgctgtcggaatcggagtcgctgtcggaatcagagtcgctgtcagagtcggagtcgctgtccgagtccgaatcgctgtcggaatcgctgtccgaatcggagtcactgtcggaatccgagtcgctgtcagagtccgaatcactgtcggaatccgaatcgctgtccgaatcggagtcagagtcggagtcgctgtccgaatccgagtcgctgtcagaatcggaatcactgtcagaatccgaatcgctgtcagaatccgaatcactgtccgagtcagagtcgctgtcagagtccgaatcactgtcagagtcggaatcactgtcagagtcggagtcgctgtcggagtccgagtcgctgtcggagtccgagtcgctgtcagaatccgagtcgctgtccgagtctgtatcagaatcggcatcggcatcggcatcactttcgctgccgccagggtcggtatcgctgtctgagtcagaatccgaatcactgtccgcatcagaatcagtatcatcgttcggagaatgcgacgaatga

SEQ ID NO: 240927 - DNA, 231 bp, Klebsiella pneumoniae
atgagcgaacaaagagcgttcccatgctgtgattgtgaaaaagagttctatcttgtttcccttagtgacgaagatgctgagagctacgacgaagcagtctctatggaccgatatgatgattaccttggttgcatggttccaaatgttagctcatttgaagcgtggcttggcgagcatgaggaatatgaagacaattatcatgcctgctctgattgcggttcagatagttaa

SEQ ID NO: 240928 - DNA, 3258 bp, Klebsiella pneumoniae; identical to SEQ ID NO: 229284

SEQ ID NO: 240929 - DNA, 186 bp, Klebsiella pneumoniae; identical to SEQ ID NO: 183405

SEQ ID NO: 240930 - DNA, 135 bp, Klebsiella pneumoniae
atggggaagaaggaaaggccgcaaagcggccgttttttcataggctccgcccccctgacaagcatcaccgaagcggacgctcaaatcagtggtggcgaaacccgacaggactataaagatacctatcatttctga

SEQ ID NO: 240931 - DNA, 204 bp, Klebsiella pneumoniae; identical to SEQ ID NO: 188309

SEQ ID NO: 240932 - DNA, 564 bp, Klebsiella pneumoniae
atgcatcatgaccttaaacaccgtattcaggcgatgcgggacaaactggaagggcgcgcccctgtcgctgaaattcagggtagctcgcaactttttgtcaccccctccccggaatgtcgccggctggttgagctggctgatgtccgggaaaccgatcgcattctggaacccagtgccggaacgggcgccatactgcaggcgatcagggatgcagtcccccgggcgaagtgtgacgccgtggagctgcacgccgggttagcccgtcacctgcaggcgcatttcccggaggtccggatctggtgcggagattttctcgaatatcatccggagcgccggtatacccgaattatcatgaatccgccgtttaatcgcggtgatgatatccggcatatccggcgggcattaactctgcttgagcctggcgggattctgacgggcatatgtctggacgggccgcgtcagcaaaaggcgctggagtccctggcggacgtctgggagccgttgccacggggaacattcacgtatacccaggtagcgaccgccattctcagaattaccgtctga

SEQ ID NO: 240933 - DNA, 924 bp, Klebsiella pneumoniae
gtggcaaagcaaaagttcaaaatcaccaactggcccacctacaataaagccctcatcaaccgtggctccataactttctggctggatgatgaagctattcaggcctggtatgagtcagcaacaccttcttcacgaggcagacctcagcgctattctgaccttgccatcacgactgtgctggtcattaaacgcgtattcaggctgaccctgcgcgctgcgcagggctttattgattccattttttctctgatgaacgttccgctacgctgcccggattacagctgtgtcagcaggcaggcaaagtcggttaatgtcagtttcaaaacgcccacccggggtgaaatcgcacacctggtaattgattccaccgggctgaaggtcttcggtgaaggcgagtggaaagtcaaaaagcatggccaggaacgccgccgtatctggcgtaagctgcatctcgccgttgacagtaaaacacatgaaatcatctgcgctgacctgtcgctgaacaatgtgacggactcagaagccttcccgggtcttatccggcagactcacagaaaaatcagggcagcatcggcagacggcgcttacgacacccggctctgtcacgatgaactgcggcgtaagaaaatcagcgcgcttatcccaccccgaaaaggtgcgggttactggcccggtgaatatgcagaccgtaaccgtgcagtggctaatcagcgaatgaccgggagtaatgcgcggtggaaatggacaacagattacaaccgtcgctcgatagcggaaacggcgatgtaccgggtaaaacagctgttcgggggttcactgacgctgcgtgactacgatggtcaggttgcggaggctatggccctggtacgagcgctgaacaaaatgacgaaagcaggtatgcctgaaagcgtgcgtattgcctga

SEQ ID NO: 240934 - DNA, 1203 bp, Klebsiella pneumoniae
atgacctaccgccaccgcgttgccaccgtttttctgttcggcttttttctcgatttgatcaatatgtttatcgccagcatcgcctttccggcaatcagccgcgcgctggcggtttccgtctcgcaactggcgtgggtcagtaatgcctatattctcggtctgacggtcgttgtgccgttcagcgcctggctcagcgagcgctggggggcgaaacggctgtttttactctcgctggggctgttcagcctcggcgcgctggcggcagggcttgccaacagcctgagcgaactgattttatggcggacgctgcaggggatgggcggcgggctgttaatccccctcggccaggcgctgacgtggccgctgtttcagccgcatgagcgcgcgaagctgtcggcggcggtgatgctggtcggcctgctggcccccgcctgctcgccggcgatcggcggcctgttagtcgaggcgttcagttggcgctgggtcttttacgccagcctgcctgtcgctctgctaacctttgtgctggcggtgcgatggctgaacgacacccccggtccggttcgcccgactcgctttcttccactgtcgctgctggccgatcccctgctgcgcttcgcgatgctgatctacctctgcgtgccgggaatgtttattggcgtcaacgtggtggggatgttctacctgcaacgcgtcaccgggatggcgccgggggcaatcggtgccctgatggtgccctggtcgctggcctcgtttgccgccatcacctttaccggcagatatttcaaccgcttcgggccccggccgctggtcatcatcggctgcctgcttcaggcgatggggatcatgctgctgctgaagatcgatgcggacagcccgctggcgctgttgattctggcctttacgctgatgggcggcggaggcagcttatgcagcagcaccgcgcaaagcagcgctttcctgcatacgcctgccgaagagatgcctgacgccagcgcgatatggaatcttaaccgccagctcagcttctttgccggcagcgccctgctcgccctgctgctgagggtattcccgccggcctacgcctggcagggggtatttattagcgccgccgtcattaccctgttgccgctgctgttttgcctgcggctgaataatcgggcgattatccatcgcctgcacaccactctggagaagtcatga

SEQ ID NO: 240935 - DNA, 888 bp, Klebsiella pneumoniae
atgcttaatcttcagcgcgtgaccatgtttatcgccgtggtagatgccggcagtttcacccaggccgcagcggcgctggggcagaccaaggcggtggtcagctttaacgtacggcagctggaaaatgagctgggggtgacgctgctgctgcgttcgacgcggcgtttgcggctcactgacgccggggtgctgttctatcagcgcggggtagcgctcctgaacgcggcggaaaatctccaggatgaggtgcgggccagccatagcggcttaagcggggagctacggatcaccaccacgccggagtatggcgcgcaggttatcattccagcgctggccgcgttcgcccgtcgtcatccggcgctgcgggtgcgccacgtctcctcctcccatcatgccgacctcatttcagaacgatttgatgtggcgatacgcctcggtacgctggccgattcccgctatcgggcgacgcggatagccagtttcgcgatcctgcccgtcgcctctccggcctggctggcaagccatccggtgcagacgctgtccgatctggcgcaagctgagtggattattcacgagcgcctgccgacgccgctgcgctggcagctgcgcacggatcaccagacagaggtggatttcgcgatagccagcgcgccgcggttttctgctgatagcgctacggcgctgatgagctttgctctggcgggatgcggcgtcgccttgctgcccgcatggctggtagccaaaaaggtggcgcagcgggagctggtgccgctcctgccggaataccatttcccacagcagggtgtgtatgccctttatcccgactctcagcatttgccgacccgggtgcgggcatttattgacttcctgcgcgagaaggtcggttaa

SEQ ID NO: 240936 - DNA, 408 bp, Klebsiella pneumoniae
atggagttacgaaacgaagcattccacctgctgcgccagctttttcaacagcataccgcccgctggcagcaggcgttgccggacctgactaaacctcagtatgcggtgatgcgctcggtagcggagcaccccgggatcgaacaggtggcgctgattgaagcggcggtcagcaccaaggctacgctggcggagatgctcagccgaatggaagcgcgcggcctggtgcgccgggagcacgatccggccgataaacgccgccgttttgtctatctgaccgacgaaggcgaggcgttgcttaaccgttccattccgcagggcaatgaggtcgatgacgagtttctcggccgcctgagcgatgacgagcgcgagcagttctcccgactggtgcacaaaatgatggcgccctga

SEQ ID NO: 240937 - DNA, 549 bp, Klebsiella pneumoniae
atgcgctcctcctccagcaactggcgaacctggaaggggtcggcggctatcgactgcagtgagactccgggcgcctcctgcatcagcccgggtaacagcgggggcatcagccagtgttcgctccagtcgctgaggccgatgcgaaaaagctgctgcgcgcgcgccgggacgaactctgcggcgccaaacatcgccgaatgcaggttttccatcagcggctgcaggtcggtcatcagcgcttgcgcccgcggcgtcggcagcatgcctctggcgctgcggacgaacagcggatcgtcaaacatctcgcgcaggcgcttcagcgccccgctgatagccggctggccaagatggagcacctctgcggtgcgggtgacgctcccttcgcggtacagcaccatcaagaccgtcaacagattcagatcgatacgactaaaatcattttcaatgattttcttcattatgataatcaatttgaatgtgggttatcccggcagcatagtgaatctcaccccgataaatcaaccagcgcaatgcgcgcggagggagtga

SEQ ID NO: 240938 - DNA, 426 bp, Klebsiella pneumoniae
atgactgatatcaccgaactggcgcagagcctgaaagcggcagcgatcgatgcgaaagagctcgccattatcgccaggtattcgaaaggccgtgcggcggcggagaaattttacgccctgactacgccaaacaatgtcctcgcgctggtagaggcgctggagagggcgcagcgcgccaacggacaccttcgcgatcagtctgctgagtgggaacgaaaggctatcagcaactttgaggagtgcgcgaagttgagtcagcgagttgaagaactggagtcccgcgccgtcactgtaggaaacctgcaggagagcgcctacagagctggcttaactgctggctggaatcttgtgctggctaataacagcgacgggttcaataaatggctggctgctcatgccgctggcatcaaggtggaggctgattga

SEQ ID NO: 240939 - DNA, 222 bp, Klebsiella pneumoniae; identical to SEQ ID NO: 234723

SEQ ID NO: 240940 - DNA, 138 bp, Klebsiella pneumoniae
atgattaaggattttagcgagtcgttaatgttattatatggaggtgtagtcatttattcattttttcacaatgagttctactacgtgattctttttgcggcgttcgcgttttctttaattaatcgtctttgcaagtga

SEQ ID NO: 240941 - DNA, 870 bp, Klebsiella pneumoniae
atgagaagaggtgctttgtgctttcctgcgaagatagagaagcacgatgatggtcgagggtttaaagctactgaatttattggtagaagagaattgaattattattgtctatattgggatgaattggttataccagacaatagccttatttctatcgggattgatggggagggtgattttattaatgccggatttttgagaaggcctagggttaattatgcggactatgctggcagggattcaaactatgatcatatgatttatgtacagcaaaaggttgcgcaggagcttaaaaaggaaaaaaggtcaactcattggtttatggggcatatcggttctgatatagatgtttatgatggtgtgtctacaccttcattaataattgaattcacccgtgcgctacccgtgcccgttagcaatgttcatgttgatgatattttaaaatttaaggagcacagaagagatgagattgatgccgttcatgaatttatcaatgaactatatatcgaagtgagaaagtcttcaaatccaaacctggaagaggcaaggtcatttaatcgcattgagtcagctttaagagatttaaataaaagcttttttgaaaaatggaaagagctaagactttttgacttgtctgttaacaaggaactgaatggctcagatatttattctgcttttcttggtcttcaggcggcttatcttgcggctcaaaatcaaatagcccctgcaataattcatggtgcaacagccgccctacccagcgtactgtcaaggatttcctttaaaagcattagggaaaaagataccgaccgcagtaaattgaaatatatagcaaaagcttctgatgttggaattgtcaaactgatatag

SEQ ID NO: 240942 - DNA, 273 bp, Klebsiella pneumoniae
atgagttttcagaaaacaatcaccgtcacgccggtcaaaaattacgacgctctcggcggaatgaaggtggcaggagctagcgaggagctgaaaatcacgttttcagctgaggggctggtcagcctggtcggctcactatgcaccgtgcgttacagcatgaccacagagggagttgcgtctcccggttatggcgagattgagttccagtattcgggaactggctcgccgctggatgaggcggaggcggcgctaaaatcagtcttaatgggctaa

SEQ ID NO: 240943 - DNA, 2913 bp, Klebsiella pneumoniae
atggtcgagaacgacacttcatcggttgagtatcagctatcaaccagcactggcccttttagcatccctttctacttcattgaaaacgggcatattgtcgcggaactgtatacacagaacggtgacgactttaacaaaactacgctgactattgatgttgattattatctgaacggcgccggcgataagaatggcggtcagctgactttgctctccgcacacagtggcgctacgctactgatttatcgtgatcccgatgcgacccagttaaccagttatctggcgaccggtaagtttcctgcgacaagccatgaacgcgcgcttgataagctgactatgcttatccaaaaattcggttggtggtgggactctttggctctgaaaaagccaaatatcttcgctaactattatgacgcgctcaataaccgtattcgtaacctgcgtgatccttcactggcgcaggatgccgcaacaaaaagctacgtcgatagtagtgatatcgatctgcagcagcagataaccagcaactttaatcgttcgctgcgtgtccctgactcctgtataagccagctaccatcggcccaagaccgcgcctggaaggggttgggttttgacggtgctggtcagcctaaattgcaggaccctgcagggacggggctatggggatacgttccggccataggttcgtttgagcagggatcgctactcactcaacgttttgaggttcttctgtgggaatccacggacgaatactggcgctgggatggcgtaatgcctaaggtcgttttacctggtagcacgccggcgacggctggcggtacaggaaagggtaagtggatcgacgttaccgatgcgactcttcgctcaaacctgggttcaagcgaattgcccgggggatcgcttgtcgctctcgaatttggcactgtcgcggggttgttgcaggggcggacatatcctcaggcgcacggagccgtgggtaacggtgttcatgatgatactgatgcattatacgctgcatttaaatcatcagcagaggcagtccatatccctcgcgggacatatttaataaccagaaaattaaaatgcctgctcactaaaaatctgcgggtcacttgcgcaccaggcgttgtatttaaactcgctgataacgctcgctgcaacatgatggtttttgtcagtgaccggaaacatgattttgaatggtttggcggcgagtttgacggcaactgggccggtcagggtgatgagactctgaatagcaatggtacgttcaaagacctttcacacggatttattgttagcctgtttaataacgttcgtctcgacaatatgtatgtccatagttttcgtggtcactccatgaaccatgctggaaataaaaaactacacgccagcaatctgcggtttaattcgcacattgcgcaggcgttcccatttggtggctcgcgtggcgacggtattactggctgttccgaggatgtcctgattgagaatgtttacggttttacgactgacgacatggtagccgtatttgccggtattctgtgggtggaaggtggaacagagtctgattcagaaatggtcaccaatcttgattatttgacctgtaaatctgtcactttgcggaatatcaatccgtggaaaaaatacagcgacctggatggggcaacggaggtttatacctggaacgccattgtagttggcacccaaggtggagcatctattgagaaggtttccatatctgatgtgaagggttactgtcagtatagcggcatccgccctggcgtatcacagccggttggctcgtctccggctacagattactggggcagtattggtagtctcattatcgacaatgtcagcattcgtgttgcgggcgctgccgataaccagcacctgtataacacgatccggattggttccctgacagcagcagcttcagggacggaatacgagtgcgtcattaaatccgctaccatatcaaatgtgcagttgttcccgtccggtaataccaggacgctgataggcgtagggtatacgacaatctataacctcaatctgaataatattaataccctcgggcaggtggctgatgatacctacaacatgttgcgctgtactggcaacaggcagattgcacaactgaatattgatggcgtgacccataacccgccgacaaccagttccgataccgttgctcaggcgcagctggctctcagttgggaagtgacgtttggtgtcgctgcgaagatttacgcaaatggcctgccggttcgccgtaatgctgcggacactgcgtatatttctaacgtcaatatcgtttccggtgctgtggctccgcaaatttacggctacgatgtcgtggtgcgcacgccgacaaatttctacgcccttccaaaagtgaagggggtccattgccgtgaccggtatctggggagggtccgtgtagccccatctggactgtgggagtttgaggagttttccactaaatatgaggactcaacgtatgggcgaccgtcaccagcactgatgtcagggtactcaaatatcacctgggaagacggcatgtcagtgagaacgtatggctcgccgtacggagaagttgagggctggcgatataaccgtgacggcaactggcaaatgctgggcggatacctgacaaacaacacggtggcaatgattgacgtgagcactgttccctctaaatttgcgccatataccacggttacatcaccgatttacaacgatgcgtcctggccactcagcaatggagccgtgacgttgtatacgggccaccctaacggcagggctggtgcgtatgaggtagttgatggcggcaccgcaatatatcgccgcacctggaacgccacggcaggcgcatggaacccgtggttttcaatatcattaacataa

SEQ ID NO: 240944 - DNA, 186 bp, Klebsiella pneumoniae
atgctcatcagagtggactattctggtcttcttgatcttcccattttcacacgttatcagtacatcgccatcgtcggggagaaggtctcctgcgtctttcttatcaaccactacctctccctcaacaaatactgtataaatttacagtatatatactaccaactgacagtgagcgcaaatttttaa

SEQ ID NO: 240945 - DNA, 237 bp, Klebsiella pneumoniae
gtgctatcgaagctggtgccgctaaacgcgatggtcaccgccgacgcatcggcggaacagctggaaaagaccagcttaaccggcacgctggcgccgctcgccccggcatgtccggagaacgtctgcgaggagacggtgcctaaatcgatactgttcgacggctccacggccacctcacaggaaggcgcttcgatggtgcccgtgacgttaaaattgaccgtgctgctgccctcataa

SEQ ID NO: 240946 - DNA, 1128 bp, Klebsiella pneumoniae
atgaaatttgaactggataccaccgacggtcgcgcccgccgcggtcgcctggtgtttgagcgcggcgtggtggaaacaccggcctttatgcccgttggcacctacggcaccgtcaaagggatgacgccggaagaggtggaagccaccggcgcgcagattattctcggcaacaccttccacctgtggctgcgcccgggtcaggagatcatgaagctgcacggcgatctgcacggttttatgcagtggaaaggaccgatcctgaccgactccggcggtttccaggtgttcagccttggcgatatccgtaagatcaccgagcagggcgtccacttccgcaatccgatcaacggcgatccgattttcctcgatccggaaaaatcaatggagattcagtacgatctcggctctgacatcgtgatgatcttcgacgaatgtacgccgtacccggcggactgggattacgccaagcgctcaatggagatgtctctgcgttgggcgaagcgcagccgcgaccgtttcgatagccttggcaataaaaatgcgctgttcggcattattcagggtagcgtttacgaagatttacgcgatatctcggtgaaaggtctggtagagattggctttgatggctacgctgtcggcggtttggcggttggtgagccgaaggaagacatgcaccgtattctggagcacgtctgcccgcagatcccagccgataaaccacgatacctgatgggcgtcgggaagccggaagatctggtggaaggggtacgtcgcggtatcgatatgttcgactgcgtcatgccgacgcgcaacgcgcgtaacggccacctgttcgtcaccgacggcgtggtgaaaatccgcaacgcgaagcacaaaagcgataccgcgccgctggacgccgagtgtgattgctatacatgtcgcaattattcacgcgcttacttgcatcacctcgaccgttgcaacgaaatattgggcgcgcgtctcaataccattcataacctgcgctactatcagcgtttaatggctggtttacgcaaggctatcgaagagggtaaattagagagcttcgtgaccgatttttaccaacgtcaggggcgcaccgtgcctcctttgaacgttgattaa

SEQ ID NO: 240947 - DNA, 912 bp, Klebsiella pneumoniae
atgatccacgccgcccacaacggtaagaaagtcaccgtagtggtggagctgcaggcgcgcttcgatgaagaggctaacattcactgggcgaaacgcctgacggaagcgggagtccacgttatcttctctgcgccaggtctgaagatccacgccaagctgttccttatctcgcgtaaagaaggcgatgaggtggtgcgctacgcccacatcggcaccggtaactttaacgagaagacggcgcggatctacaccgactattcgctgttaaccgccgatgcgcgcattaccaatgaagtccgccgggtgtttaactttatcgagaacccgtatcgtccggttagcttcgactacctgttggtgtcgccgcagaactcgcgtcgtctgctgtatgagatgatcgatcgcgagatcgccaatgcgcaaaacgggcaaccgtccgggattacgctgaagctgaacaatctggtggataaaggtctggtggaccgactgtatgccgcctccagctccggcgtgccggttaatctgctgatccgcggcatgtgctcgctgatcccgggtctggaaggtatcagcgaaaatatccgcgtcatcagtattgtggaccgtttcctcgagcacgaccgggtctactgttttgaaaacggtggcgataaacaggtctggctctcctctgccgactggatgacgcgtaacatcgattatcgcatcgaagttgccgctccgctgctcgatccgcgtctgaagcagcgggtgctggatatttttgatatcctgttcaacgatacggtaaaagcgcgctatcttgataaagaactgagtaaccgctatgtgccgcgcggcaatcgccgtaaagtgcgcgcgcaaatggcgatttacgattatctcaaatcactcgaacaacccgactaa

SEQ ID NO: 240948 - DNA, 573 bp, Klebsiella pneumoniae
atgacgcaggcgcggcataggcttattgaccagattggccttacccacattcgggaagccgataaagtctttaaagttgtggtagcggccgcccggcagcatcgagtcgtagttggagatggagagcttatcgcgcagcatttcgaccatcgcatccggcatatcgcgctggtagacgaagcgaaccggctcggcggtcaggcgctgcttgaggctggaggacatcagctccatcaggctcgactccatctcatgcaccagatcgtactcggcgtcacgggtcatcttcatcgagtaggcgttcagcgcatcgtaatcaaagaagcctttaaaaatatcgtccaggcaatagcgcaggatgttatccaggaggatcattggcttgcggcgacgcggcgcttccggcggcaggttcacgaagcgcggcactttatccgacggtatttccagcagagcatagttgatgttttccccgcggataatctccaccgccagataggtgtaatcatctttcaggaactgcacgaggtccgtttcgcggttgatcaggatcggcgagatatgctggcgtaa

SEQ ID NO: 240949 - DNA, 279 bp, Klebsiella pneumoniae
atgatattggttatcattatcgttgtgagaggtgaaaccatgctgcagcgagcattaggaagcggctggggagtgatgattcccggcgcgctaattgtcgctctcgggtatgccggagtgtcggctgacgtatggcgggtactggtcgcggtgggcatgctgatgtccgcggcgatgatctggcatcgtcaattgcgccattttatcctgctgccatcgtgtgtcgcgttgatcggcggaataatgctgatgattgtggatattaaactgagaggataa

SEQ ID NO: 240950 - DNA, 702 bp, Klebsiella pneumoniae
atgcttttgcaggccattcgcgcccacggcggtcagcccgcgcccgggagatcggtccacggcttcgtgaccttccgcgtacagccgtcccagcaggccggtgtcctgcatgatgatcgccagcacccctgccagcggcccgaggccgaccgcacgcacgaaaatcagcccccagatagccatgtcgatcccgcgcagcacatcaaacaggcggcgcatcagcagagcgagggtccccagcaccacgccgcgcatgatgttgcgggcggcgaagaaggagagcagcagcgccagcaccgtggcggtcagcgtcccggcgaagacgatggccagggtgacgccgatttgcgtaaagtaatagccgaacggccagttccagaagtcgtgccagacgaacatccgcgccaggtagcggccaatctgctgcaggccggtggtcagctgcttgccgctgatgccaaactgcagaaaaaaccagacgtaatagagcaggcaggccagcgccaccaacccgacgtagcgcaggtagcgcccctggacctgatagagctgcttatgctgccgccggctggcggcgatatccggttgcatgtgccagacgctcattttttcccctccagtacccacaggcgcagacgaccggacagcatgtccagcgccgacaccaccagaatgatcagcagcagggtgatgctcacctga

SEQ ID NO: 240951 - DNA, 1815 bp, Klebsiella pneumoniae
atgctggtcgtcgtcattgtcgtcggcctgatctatgcgcttcccaacctgtatggtgaggatccggctgttcaaatcactggcgcgcgcggcgtcgccgccagtgagcaaacgctgatccaggtccagaaaactttacaagaagaaaaaataaccgcgaagtctgtggcactggaagagggcgctattcttgcgcgcttcgacaccactgatacccagctgcgcgcgcgcgaagcgctgcttaacgtgctgggtgacaaatacgtcgtggcgctgaaccttgctccggcaaccccacgctggctggcggcgctctatgccgagccgatgaagctgggtcttgatctgcgcggcggcgtgcacttcctgatggaagtcgacatggacaccgcgttaggcaaactgcaggaacagaacatcgatagcctgcgcagcgagctgcgcgacaaaggcattccttacgcgaccgtgcgtaaagaagacaactacggtctgagcatcgtcttccgcgacagcgcggcgcgcgaccaggctatctcttatctcagccctcgccatcgcgatctggttatttcctctcagggtgacaacagcctgaaagcggtgatgaccgatgagcgcctgaaagaagctcgtgagtacgcggttcagcagaacattaatatcctgcgtaaccgtgtgaaccagctgggcgtcgccgagccgctggttcagcgtcagggcgctgaccgcatcgtggttgagctgccgggtatccaggataccgcgcgtgcgaaggaaatccttggcgcgaccgcgaccctcgagttccgtctggtcaatactaacgtggaccagtccgccgccgcctctggccgcgtgccgggcgactcggaagtgaagcagacgcgtgaaggccagccggtagtgctgtacaagcgggtgatcctgaccggggaccatatcaccgactcgacctccagcatggatgagtacaaccagccgcaggtcaacatctcgctggacagcgcgggcggtaacatcatgtctaacttcactaaggacaacatcggcaagccgatggcgaccctgttcgtggagtataaagacagcggtaagaaagacgctaacggtcgcgctatcctggcgaaagaggaagaggtgattaacatcgccaacatccagtcgcgtctgggtaacagcttccgtatcaccggtatcagcaatccgaacgaagcgcgtcagctgtcgctgctgctgcgtgccggcgcgctgattgcgccgattcagatcgtcgaagagcggactatcggcccaaccctgggaatgcagaacatcaagcagggtctggaagcctgtctggccggtctggtggtctctatcctgttcatgatcctcttctataagaagttcggcctgattgcgacctcggcgctgattgccaacctgatactgattgtcggcattatgtccctgatcccgggggcgacgctgaccatgccgggcatcgcgggtatcgtgttaacccttgcggtggcggtcgatgctaacgttctgatcaacgagcgtatcaaagaagagctgagcaacgggcgtaccgttcagcaggcgattgacgaaggttatcgcggcgcgttcagctcgatcttcgacgccaacgtgacgacgcttatcaaagtgatcatcctgtacgcggtcggtaccggtgccattaaagggtttgcgattaccaccggtatcggtatcgcgacctcaatgtttaccgctatcgtcggcacccgtgccatcgtgaacctgctgtacggcggcaagcgcgttaaaaagctgtctatctga

SEQ ID NO: 240952 - DNA, 972 bp, Klebsiella pneumoniae
gtggcacaggaatatactgttgaacaattgaaccacggccgtaaagtctgggactttatgcgctgggactactgggccttcggcatttcaggttttctgctgattgtgtcgatcgccatcatcggcgttcgcgggtttaactgggggctcgatttcaccggcggtacggtgattgaaattacccttgagaaaccggtcgatctggaccagatgcgcgattccctgcagaaagcgggctttgaagagccgcaggtgcagaactttggcagcagccgcgacatcatggtacgtatgccgccggtgcatgacgccaacggcagccaggagctgggcagcaaggtcgtgacggtgattaacgaatcgaccagccagaatgcggcagtgaagcgtattgagtttgtcggcccgagcgtcggcgcggacctcgcgcaaaccggcgccctggcgctgattgcggcgctggtttgtatcctgatctacgtcggcttccgcttcgaatggcgtctggccgccggggtggttatcgccctggcgcacgacgtggtgatcaccatgggcgtgctgtcgctgttccatatcgagatcgacctgaccatcgtggcctcgttgatgtcggttatcggctactcgctgaacgacagtatcgtggtatcggaccgtatccgtgaaaacttccgtaagatccgccgcggtacgccgtacgagatctttaacgtgtcgttgacccagacgctgcaccgtaccttgatcacctctggtaccactttgatggtgatcctgatgctgttcctgttcggcggcccgattctggaaggcttctcgctgaccatgctgatcggtgtttctatcggtacggcttcctctatctacgtcgcctccgcgctggcgttgaagctgggcatgaagcgcgagcatctgatccagcagaaggttgagaaagaaggggcggatcagccgtctattctgccgtaa

SEQ ID NO: 240953 - DNA, 366 bp, Klebsiella pneumoniae; identical to SEQ ID NO: 210379

SEQ ID NO: 240954 - DNA, 396 bp, Klebsiella pneumoniae
gtgggcgaagagaatatctttatcttcggtaacaccgcggaagaggtggaggagctacgtcgcagcggctataaaccacgcgaatactacgagcaggatgaagagcttcaccaggcgctgacgcagatcggtaccggcgtcttcagcccggcggaaccggggcgctaccgcgacctgctggattcgctgattaactttggcgaccactaccaggttctggcggactatcgtagctatgtggactgccaggatcgcgtcgacgagctgtatcaaaacccggaagagtgggcctataaggcgatgttgaatattgccaacatgggctacttctcttctgaccggacgatccaggagtacgcgaaatatatctggcatatcgacccggtaaggctgtaa

SEQ ID NO: 240955 - DNA, 2055 bp, Klebsiella pneumoniae
atgtttcatctagacaataccagtggcgtccctgagatgcctgaaccaaaagacgaacaatccatttctcctcgttggttcggtgaaagtcaggaacagggcggtatcagttggccgggagctgactggtttaatgtcgttcaggcggaattactgaacttgttaaaggccgcagggattgaacccgacaaaagatcttatgatcaattgagtaaagctatccctgagttgggtgatgcgaagttccgctcggatgtggccaatagtgacggtgcaaaactcgttggtggtataggttttgtgtcgccggaaatgttcggctatttacagggtgtctcacctgatgctgtgccttactatcaaaaggctgttgatgaaggccatgcaagaggactccctgtgcgactgacggggaaatactacgccacaacgtatcctcataaagtcactttgccaggcgatgacgggaccgcttacccagggtgggtggctgcagggaatgatgcaaatattgccgcggaacctgaaaatcatatttacgcggcgattcggctctatccagactcagttgttatcggcgacagtatgcagaactgcgctctgataggtgactgggattcagatgcgcccactattaacaacaatcagcatgttggttattttatttccggcgattcgtcagacggttatattcgccaccaactgattaatcatggtgtgcgcaacttttttatcgggcgatacgggaatggcgttcttgaccgggccattgaagataattttctcatcagggattgttgtttctcaggctggtctcgtggtgctgattcagtttgcaatggttttgttatcgcccgcgattgctatgccggggacgcatacggcggggcatggacgcaacgaaatgccgcagtcactattccgtatctccctccctatccggcggcagagattttcaaagtaggctgggtcgatgcgatccgttatacgaaatatcacttttacggtaagccacggctgtttggccccatagataaggcgattgatacgtggttcgatacgtatatctataaatccgccaactctgggcgaacctccgcaggcggcaggctgacaaacaatactgccagcggctattcagcgcgttcgtttcccggcattgctggccgggcattcaccgttctcagtcgttacggtcgtgcggtgaacggggtctgccttgacgatgtgaaggtgctgggaacccaccgcgtcccgttttacaccgacgcaggcagttacaacgtgattcacacgtcctacgttgaaaaaacctgtctcgttgacaccacaacgacaaccattgccggtaatcagttctataccgactatcaggacccgtggaatgcgacactgacaaaagcgcccgcgatggtttgtgagggtggtatcactgtcgacagaactgtcgtttcggctggcgtggctacacacccgttcagccagaaaccaccaaccatcaacggcccgctcatcatcaatccgttccgtgatgacacagaggactactcggccgcgcagattgcagagtggaacagcgccgaaggaaaaacggtatacctctatgactggcgccgtcagtacagcgtccagcgcccgatacggttttttgataatacacaggaagcattccagtattacaagggtgtctggacgccggttgttaaatgcggctcagaagtcgtgacgctgaataccaccgtgggaacctaccgccgctcagggaggttagtgcatgcgactttcagaatcgaaaccacgtcaatggcgctgacgacaggaggcgcggtagtgatatcaggactgccgttcactgtcgcagcgttgagcgatggagggttgaccgtttctccggtcctttgcagtcgtgctgggtcatccacaatactggcgcaaacgaatccgaccacaaaagagattctactgttaaccaatagctcaccgactgttttctcaattacaggcggtacaggtttgacgatttacggctcagttcagtacgttctgacagaatga

SEQ ID NO: 240956 - DNA, 1863 bp, Klebsiella pneumoniae
atggaatataaagcactcgcgcaggatattctcaaccgcgtcggcggcaaagagaacattgtgagtctggttcactgtgcgacacgtctgcgttttaaactgaaggataacggcaaagccgatgccgaagggctgaaggccaatccgggcgtgattatggtggtggagagcggcggccagtttcaggtggtgattggcaaccacgttcacgacgtctggctggcggtgcgccaggaggcggggttaagcgatgacagcgaaccggttgccgaggaaaaagcggccaaaggatcggtgttaagccagcttatcgacatcatctccggcatctttacaccgtttatcggcgtgatggcggcaaccggtctgctgaaaggcctgctggcgctggcggtgacctgcggctggcttacgccggagcaggggacttataaaatctggtttgccgccagcgatgcgctgttctttttcttcccgctgtttcttggctataccgccgggaagaagtttggcggcaacccgtttatctcgatggtgattggcggggcgttaacccacccgctgatgattcaggcctttgaggccagccaggcgccgggcgcggcggtggagcactttctcggcattccggtgacctttatcaactacagctcgtcagtgatcccgattattctcgcctcatgggtctcctgctggctggagcgcaagagcaatgcgctgttgccgtcatcgatgaaaaacttcttcagcccggcgatctgcctggcggtggtggtcccgctcaccttcctggtgattggcccggtcgccacctggctgagccatctgctggccaacggctaccagttcatttatgcgtttgccccatggctggcgggcgcggtactgggcgccatgtggcaggtgtgcgttattttcggcctgcactgggggctggtgccattgatgatcaataacatgacggtgcttggtcacgactccatgctgcctattatcctcccggcggtgattgcccaggtgggcgccgtgctcggtattttcctcgccacccgcgatgcgcgccagcgggtgctggccggttccgccttctccgccgggctgttcggcatcaccgagccggctatctatggcctgaccctgccgctgcgccgtccgtttatctttggctgcgtcgccggggcgattggcggggcgatcactgcctttagcaacagttatgcctactcgtttggcctgccaaacatctttttcccggcgcaaatgatcccgcccggcgggattgacgccagcgtctggggcgggcttatcggcaccggcgtggctttcgtgctcgcctgcgtgctgaccttcttcgccggcctgccgcgcgccagcgctgcaccgggcgccgtgacggtagccccggcctcggcaaacgatattctggcgccgatgagcggcagcgttatcgccctcgagcaggtgccggacagcaccttcgccagcggcctgctgggtaaaggggtcgccattatcccggcggtgggccaagtgattgccccgttcccgggcgaagtggcctccctgtttcagactaaacacgccatcggcctgcaaagcgacagcggcattgagctgctgatccacgtcggcatcgacacggtcaaactcgacggcgtgccctttaccgcgcatgtgaaagagggcgacagggtacaggccggcgatctgctgattgagtttgatcgccaggcgattctggacgccggctacgacctggcggccccgatcattatcagcaacagcgacgactaccgggagattgacacggtggcgtccagcgccgtcgaagccggtcagccgctgttgtcagtcagccattaa

SEQ ID NO: 240957 - DNA, 495 bp, Klebsiella pneumoniae
gtgggcgaggtcgccgatcagctgcaatacaacctgctggttaccaaggtccagcgccgagcagggctcatccagcaggatattctggctggcgctgaccagcgcgcgggcaatcagcaccagctgctgctggccgccggagagggcgccgaagtcatcttcggccagggcggcaatccccagctgcgccagcgcctgctcaacccgccgggcatcctcctcgtccggctgggcaaagagatccacatgacgggcccggcccatcagcaccacatcgctcacgcgccagcgaaaagcgggacgaaacgactgcggaaccagggccacgccgccctcgcactgcatctcgccgcccagcggcggcagcacgccggtcagggtatccagcagggtactttttccccggccattggcgcccagcaccgcccagatctcaccgggccggcaggccagcgtgagcggggcgaagagtggctgacggtggccgtagcgtag

SEQ ID NO: 240958 - DNA, 249 bp, Klebsiella pneumoniae
atggagaaccgcttcaacttgattgatgaaccctggattgcggtcgtggatgtggggttggtcagtttaaccgatattttcagccagccggaattacgcgctttaggtgggaatccggtagaaaaaatcgcgctcactaaattgctactcgccatcgcccaggcagcagcgacgccgacagatgatagcgactggcagcagatgggctggcagggaatggcccattgctgcctgcagtaccattgctaa

SEQ ID NO: 240959 - DNA, 795 bp, Klebsiella pneumoniae
atgaacaagctgcgtccggaaagcattccggaagcggtgatcgccggcgcctcggcgctggtgctgacctcttacctggtccgctgcaagccgggcgagccgatgccggacgccacgatgaaggctattgagtatgccaaaaagcacgatgtgccggtggtgttaaccctcggaaccaaatacgtgattgccgataacccggcgtggtggcaggagttcctgcaggagcatgtctctattctggcaatgaacgaagaggaaggggaagcgctgaccggctttgccgatccgctgtcagcggcgaataaggcgctggactgggtcgacctggtgctgtgcaccgccggcccggcgggcctgtatatggcgggcttcaccgaagaagaggcgaagcggaaaacccagcatccgctgctgccgggggcgatcccggagtttaaccagtttgaattcagccgcgcgatgcgtcaccaggattgcgttaatccgctgcgcatatattcccatatcgctccctatatgggcggccccgagaagatcatgaacaccaacggcgcaggcgacggcgcgctggcggcgctgctgcatgacatcaccgccaataactaccaccgcaataacgtccccaactccagcaagcacaaatgcaaatggctgacctactcctcgctggcgcaggtgtgtaaatatgccaaccgcgtgagctatcaggtgctgaaccagcactcgccgcgtttaactcgcggcctgccggagcgtgaggacagcctggaagaggcgtactgggatcggtaa

SEQ ID NO: 240960 - DNA, 729 bp, Klebsiella pneumoniae
atgtcacttatggcgaaagcaatgggggtcaaagtgggaaactcactgcgtaagctcgttcttatcaagctggccgacaacgccaacgacaagggcgaatgctggccttcgtatcaacacattgctgatcagtgcgaatgtagcaaatccgctgttcgcaaccatattgatgcgcttgaggatatggggctgctcaagcgtgaaaatcgcgttggggtcaacaacgggaagggtaatacatccaacgtgtattatctgaaccttgatgccacccctatgccaccaaaaagcacaggggtatgccatgaaatagcaccccctatgccatctgattgcacaccccctatgccaccagatggcaccagaaccagtcactcttttgaaccagtcactgaaccagactctctctctgcgcgagggcagtttatcagcgaggctgcaaagcgacggatcgggatttcacccaacggggaaatacctttccctcctgccttcaagccatcggcagatcacattgcgattgcctcggagaaagggatcaacattgaaaccgagttgctgaattttcgtgattatcaccaggcccgcggcacaaagctgatcgactggaactcggcattccgggtgtggctcaggaacgcgagagttaatccgctttccgggcgccagagaagcgaacctgattccccacactggaacagccctgaaggctggaaggacttcatatga

SEQ ID NO: 240961 - DNA, 261 bp, Klebsiella pneumoniae
atgactgataaaattttagatgggcaaggtaatgagatcgtattgggttacgcatataagtttgtttttgcaatgcctggaccagaccaaaccattgtgatcgcaaaagcaattaacaacgacggaacggtgaagtgctatgacgtttactttggcctttggtgtgagtcgatcaagagcggtaatctttttaggccattgcgattcccttttgggcctcaagatttgaaattgataactgaaaatggtggcaaagtatga

SEQ ID NO: 240962 - DNA, 270 bp, Klebsiella pneumoniae; identical to SEQ ID NO: 235366

SEQ ID NO: 240963 - DNA, 603 bp, Klebsiella pneumoniae
atggccgacatcgctgtgaatatgataggcaaagtcgagcggcgtcgaccccgcaggcaggtccaccacgtcgcctttcggcgtaaagacatacacccggtcgtcgaagacctggctgcgcacttcgtcgagcatctcgccggagtcggccatctcttcctgccaggcaatcagcttacgcagccaggcgatacggtcttcatagccgcggccgccgctggtgccggctcccgcgccctctttgtacttccagtgcgcggccacgcccagctcggcgtcttcatgcatctgccgggtgcggatctgaatctccaccgtcttgccgctcggccccagcaccacggtatggatagactggtaaccgttgggtttcgggttggccacgtagtcgtcgaattcatccggcagatggcggtagtgagtatggacgatccccagcgcggcatagcaatcctgcaaacgctcagccacaatacgcaccgcgcgaacgtcaaacagctcgtcgaaagcgaggtgttttttctgcattttgcgccagatactgtagatatgcttcggccggccatagacttccgccttgacgccttcggctttcatctctga

SEQ ID NO: 240964 - DNA, 273 bp, Klebsiella pneumoniae
atgcgcgatacgctcagcaagtttgatgaccacgcagcggaaatcgtcaaccatcgccagcagcatacggcgaatgttatccacctgctcggaagagaccgagtcggtatgggtagccttcagctggcggatagcggccatgtcccgcaccccgtgaatcagggtcacgaccgatttacctacgctctcctgcatcacctcttcgctgacaacttcgccgtcggccagcgggaacagcagcgccgcgcgcagcgtatcgatgtccatacttag

SEQ ID NO: 240965 - DNA, 177 bp, Klebsiella pneumoniae
atgactacttctaacatttctaaatcatccattctttccgctgcaatggttgtttccgctgatctggaatctgtatattccatcttatccgaagcaatggaatcaaaacgcgccaatggcaacgtgaccaagaaagatactgcggatcttaaagctgcattcggctttgttgaataa

SEQ ID NO: 240966 - DNA, 504 bp, Klebsiella pneumoniae
atgtcactaaccaaagaatatatagacgaagtgatggacaacctcgccttctttaaaaacagtaagcgaccgtgtcagattaatttcgcgtcaggtcaggagttgattcataacattctcaatttaaagagagccccaggcaaggttgagattggaaatcttggtgactttgatggacgtagatatatcacgtcagtgactaatattgtcgccatcgagagtcggcattttgtggaacgtagtgtactcccagaaggcagggtggcgattaagatatcggagcagccgccacaccctaccccatcggcagactacttcgaagtatgtaaggcggccggactagccgagcaaactataagggtcacaaccgtcaccggtcgccagtatgccgggcgggtcgccgggttgaacagatggtcagtcgggttggacaacctaaatggtatggaaggcaaggttgaagtgttcttcgattgggtgacgagcatcgaggtggttggttaa

SEQ ID NO: 240967 - DNA, 282 bp, Klebsiella pneumoniae
atgtcggacaaaccaatagcctgtcaggtaaagctttcacagcgagcaaacgccagactggaaaaaatacgagcgagccttgccgagaacggactatctatgagtaaggcgcagacgctcaacttccttctggagtgtatgaccgccgaggatatggctaaagccgttaacagtgttcgcatcgagagagcgcgaagacaacgaaggcttgagttgatcaagtcgtccagtctgacgattgccgatatcgagtcgatgtacgaaccggatgatttggactaa

SEQ ID NO: 240968 - DNA, 1587 bp, Klebsiella pneumoniae
atggtcagaattgtttgtgacgccgtgaacgctgtcgtcggcggtgctggggatgacgttagaaagatgattcaggatatgctgagctatcaggtcgaagaaggcgcttacagtccgtatggcggtggcggctggcagggtacgtcgaccatgttctcatggagcaccaactccttcccggctggattcgcgcgttccatcgccaacaacctgaaaaacaaaggcatcgaatgcacctaccttcgcaagccaatggttgagccgcttgggaaagccaaaccgatcatcaacaacttcccacctaatccgcactacgcctatcaggatgagacggttgagcgtatggttaagtctggtgggatgatcgcgcaaatcgctaccggtggcggaaagtcacaggtcgcatgtaaagcggcggcgcgaatcaaccgtatgacgctattcctgaccactcgaagtcttctcatgttccagatggcagacgcctttcaggattcaatcgactaccgcgccgcacatggggagccgaatttaaaaggtcagaaggttggtgtcgtcggagctggcgaatttaaaccgtcacgatacatcaacgttgccacggtgcagaccatctccagctggctggccgagccatccaagagtctggagccggcaaaatataaaaaacagatggctaggcgtcagaaaatgcgtgagttcctcgaaaatgtaactcttctcatacttgaagaggcgcatgagtcgtccgggaacagctttaacgatattgcaaagttgtgcaagaacgctgactaccgacttgcactgacagcgacccccttcatgaaggacagtacagaggcaaatatgcgcctaatggctgtttctggtcgtattgagatcaaagtgactgaaaagtatctaattgatcgcggcatccttgcaaaaccgtattttcaatatcacaattcgacctacgtgccagatgagatccgtctgaacaaagagaaagctgataaattcatcaattttcgtcttaatgttcgtgacccctaccagaaagcgtaccaacttggggttacatacaatctcgcacgtaataaactgattgtttctagtgctttaagctacaaaaagcaagggttgaactgcatgactcttgttaggattgaacgccacgggcagatccttgtcgaaatgatgcgtgagcaaggcattcgctgcgacttcatcaacggcaagtccagccatgatgttcgcaagaagaagctaaaaagtctggcagtaggtgagattgatgtgctggtgggttcgacaatcctcgacgttggtgtcgatgtgccgagcgtcggagcagtgataattgccggtggcgggaaggccgaagttgagtttcgtcagcgtgtcggtcgcgggttacgagcaaaaaaaggaaaggccaatgtctgcttcataaccgattttgtagacggttttcataaaaatctactccagcactcaatggagagaaaaacgatagtggagtctacgcctggttttgcagaaggcatacagccaacaaaccagcaatttaaatttgattcgatattacggggggaacagtaa

SEQ ID NO: 240969 - DNA, 693 bp, Klebsiella pneumoniae
atggacatcgaacttaaatttttgacggttggcgtcggcttgctccggcccaatccgtggaacacgaacaccgttggcgcggccaattttgagaagctgaaaacctctatcgaccgtctgggtttctttaagcccgtgctggttcgtgaagtagccggcggcttttacgaaatccttggtggcgaacatcgctggcgagcagctgttgaacaaggtcgcgaaactattgccattaactcggtgggcaagattgatgacgttctggctaagcaaatgtcgctcgttgacaacgaacgctacggcgaagacgacgatctggcactgcaacgcctaatcgaagagctccagacctctctggattacaacttttctgaaatcatcccaatcgacgacgagctgctggccaccgtctctcgcgaaagcgctgccgacttcgaaaaactcgaagagctgctggcggaatctgacgaagaggaacttccgaaagacccgcgcgagaagaaagagcgtctgggtgtagaccaccagaccatgcgcttcaaggtcagctacgacgtggcggagtcggtcaccaccatcatcaaccgcatcatcgcggagcaggaaatcaacacaggcaatgagtcagaagacgcaggggaagcgttggtgtggctttgcgatcactacaaggacgtaaccgatgaaaaatga

SEQ ID NO: 240970 - DNA, 672 bp, Klebsiella pneumoniae
atgaaaaatgagttcaaaatcgagtatctggaccccaggacactcgtgccttacgaagaaaacgccaaaatccacgatgagcagcagatcgcggacctggttaaagccattcagaagcgcgggtttgaccagccgatcacggtagatgccaaaatggtcatcattaccggccacggtcgtcgcgaggctgcaattcaggccggaatgaagacggtcccggtgattgtccgtcgcgatctgtccgaggaagagacgcgagcgaagcgccttgaagataaccggctggccagcaccgattacgactccctgaagctgcaacgtgagctgaaagagctgattgacgtcgaaattgacgtattcggcttctctgatcgtgagctttccgtgctggtcgaggatatgacccgcgatatggacgttgacagcctggtcagcgatctggcaaccgaatctgagcgccagcgcgaagagcacgaagagattagctcgacggtggccgccggcactgcgcgtattaccgacgttctgggcttcaaagagatccccatgagcgaggcaatcactgtcggagacctgatggcctacatggaggaccagaccggtgagttcggcgtcagcgccttcattgcttttgctcgccagatcagcgccgagatgaatgccgatgagtaa

SEQ ID NO: 240971 - DNA, 645 bp, Klebsiella pneumoniae
atgagtaattacaacatcaacgtcgcattcaagacgcgcgtcaacaagaccgttcgaacgctggagatcgccgagtcctttgggctcggcctcgacgaaaaagagtgggttctctacgacaacctggagctgaacatcgaccagggcgacgtcgtgtacgttaccggtcagtccggctccggcaaatccgttgttctgcgtgagctgcaaaagctgatggcggcggaaggcaagtctgttgcatccatcgaccagtttacctttgaggacgacaagaacgtcatcgaccagatcgggaagaccaccagcgatgcgctggggctgctttctatggctgggctgaatgatgcctatctgttcgtcagaaagccgtcagagatgtctgatggccagaaataccgtctcaaaatcgcaaagctgattgagtccggcgctgatgtctgggtggccgatgaatttggcgcggttctggatcgtgtgaccgcgcaggttgtggcatcaaaccttcaacgagcggcaaggaaagtgggggcaaccgtcattgtggcgacgacccacgaggatttggtcaatgcgctgcggccgtcagtgcagatcaccaagcacttcaaggaacgagtgaaggtggactatgaagttaagtga

SEQ ID NO: 240972 - DNA, 552 bp, Klebsiella pneumoniae
atgaagttaagtgatttgaaagagttcccaattctcggcgcacgagatcagcgcgagctggtggacgaagagacgtggaaggcgtggatgcgttcaaaaggggcgtatgtggccaagattgccccgtacaactcccgctttgccgtgatgtttggtgaagagaattacgtcaacgtctgccgtgacctgttctcgctggagatgtcccaacacatggagggcgccggcggtcttgtcacggttcccggcatggtcgatttcgactacatgctgcataccgtgttcctgccggaaaaatacgatgcggtggtttactggcacgaggcgctacacctggcgctgtttgcgtgtgaagtgttcggcattaacccgctggagcaggaagccgtgacctatctgcaaggccagattgtcaaggatatggtctatgcccgtgagcagtatgtcgcggacaagaagcagcccaagatggaggatgagccgccaccgaagagtaaccgcaagccaaaggtcgttgagactgaaaaactgaaggtctggagaaagcaataa

SEQ ID NO: 240973 - DNA, 894 bp, Klebsiella pneumoniae
atggacgtcactatcacgaggcatctgcctgaatctttccccaagcacctcgactttatggagcggatcatcgtcaccagaggcacggttgaggactggcattcactgaaagaccttcactacaagacagacggtaagccgtttgcgccaagttattacaaggcggagttggatggtcggctgatcggcgtgatggtgatggcatttccaaaactgctgctggccccgcgccaccgcatgtttcccaagctgaagccgaccaccaatacgacggtggctaatcagttctgggggcgcaaggttaactccgaatttgcggtcgtcagccgtctggttaacgacacgcagtatcgcggtctgggtctgtcgtaccggtttatgaatctggcgtgtcgtatgcacaaccgcccgatcctcgaaattcagtcgtccatgagcaaatacaacccatttgccatgaaagcgggtttccagttcatcaaaccagaaaagcccaagtcttacgaaagcgctctcaaagtctttcagcgccattttcgctctgatcctggcgataacgagtctgtgatgaaagaactcttcacaatggcggaggggcgcaggaaacgcgcattgcgagacttggttgcggattaccacaaaaattcgagtctggcgaaagctggaaggaacagaggcacgactgttcaggacattgctgattcgctggtggatgaggcgagcattgtgaagctgctgaaagagatccacacactgagcttcaccagtccgctgtatggcgtgtaccgaaacccggactttggacgtgagctgcccgacacactgccgcttctggcatttgataaccagccgctggacgcgccgctggacttaacacttttgaaaggacgctga

SEQ ID NO: 240974 - DNA, 267 bp, Klebsiella pneumoniae
atgaccttaaccgacaaacaaaaagacattatcagaacactgagcttgggccacgaaagagacgagttgcttgatctggatgagttgcttgagttgctgccctacacaacaaccaaacagagcattcagttttcgattcgtatcctgattaagaaaggtctggtcgagaagcatggcatccgtcaacgcgcgacggacggccgccagcgtcgagttttggggttgacggctatcggccgagcgaaagtgaagttgatgcggatctaa

SEQ ID NO: 240975 - DNA, 633 bp, Klebsiella pneumoniae
atgagtaccgaagtaaagaaaaaactcaccccagctcaatgggttgaagttgaagttaaatggaaatcaggtgaatacaccctttcggctctggaagaagagtatgggctcagaaccgagactttctctcgttacttcaagaagaaaggcatttccaaaggctcagactctgtttcggacatgatccgtgagtctttgaagtccgattcggaacagcgagcgctggcgcgagcaaagctggtggaggaccggagagacagcttcgataaaatctccaaccagatcgccggtttgaccatgaaagagattcacgcggccaggagtgaaagtcggccgctttcggtgatcgaggataacctaaagtcacttcaacgcgcctcagcgatcatcggcaaatgtttcgacatctccagtcgcgctttaggtctggaacgagaagaaatggcaggcgatgaaattccgaatctggtcttcggtgaattgacgccgacgcaggttcaagagctcaggaagatggacgaaggtaattctctgtctgacgatcttgaagagctcgaagagcttgagaaatcgctcggcgcaatcccggatgaggacgacgagagtgaggacgacgaggaaggggaagagtaa

SEQ ID NO: 240976 - DNA, 1257 bp, Klebsiella pneumoniae
atggcccttccaagttcgttaagcctgattcagctgcattccgggcagatgaaggtattcaaggcgccgcaccgctttaaggtggtgtgtgctggtcgtcgttgggggaagtcgatgctttccatctcgatgatcatgcgagcggcggccaaggaccgtaagcagcgagtgtggtacatcgcgccatcctaccagatggcgaggcagatcttgtgggacgcgctgaatgaggcgataccgcgcaagtggattatgaaaaagaacgacacgacgatgaccatcgtgttgaggaacggtagcgagatctcgctgaagggggcggataagcccgactccctgcgcggtgttgcattgaacttcgtcgttctcgatgagtttcaggatatgaagccggacacctggtacaaggtacttcgtccgacgctgtcctcaactcgcggcggtgcgctcatcatcggtacgccgaaaggcttctctgagttccacaagctgtggcagatcggtcaggacgagacgatgcaagcgcggggccagtggaaaagctggcagttcgtgacggcggactctccgttcgtaccagagagcgaagttgaagccgcgaaaaacgatatggacccgaaatcgttcgcgcaggaatacctggcgtcgttcgagaatatgtccggtcgtgtttattatccgtttgaccgtgatatccacgttaagccgctggcgttcgacagtcgtcttccagtctgggtaggtcaggacttcaacatcgacccaatgtcgtctgtgatattgcagccgcagccgaacggggatttgtgggcgattgatgagatcgtgctgttctcttcgaacacggcagaagtctgcgatgagctggaaagacgctactggcggcagaagtcgcaaattaccgtcttccctgacccggccggtgcatatcgccagcacgctcgcggtgaatcggataccgacattttcaaagagaaaggctttttgagaatcgatcacccgaaaaagcacccgcctatcgctgaccgtgtgaacgccgtaaaccgtcgtctgatgacggcatccggggaggtacgactgtatattgacccgaaatgtaagcacctgattgagtctctggagaaggtgatttacaagcctggcagccgtgatatcgataaaacaggcaatgtggagcacagcgccgacgccctgggctatccggtacaccgtagatacccggtgaaaaatcgtgttattgttggcggcagtagataa

SEQ ID NO: 240977 - DNA, 1554 bp, Klebsiella pneumoniae
atgggattaacaagtaaggatattcaggcactggtgaagcgccgacaccctgaatatgaattgagaaaggcacattgggacttcatcgccgccacctacgtcggtggccgcgagtggttcaagcacaatatcttccgctacttcaaagaaggtgacgaagagtatcgcgagcgcgttgaacgtgcttaccgcttcaaccattcgcgcgaagtggtcaatctgatcaacaaatacctcttcaaagaggggatcacccgaaccgaggatgatgcgccggaggcaattaaaaacttctggctgaaggcaacacgccagggcgtcaccattgacgagtttatggcggagctggacctgcaatcatccatctacgggcggatttggattgttgtcgacagcacattgtctggtgacgttgagtccgtggccgaccagaagaagcagaatggtcgggcatacgcttattgggtttctccgcagcagttgctcgactgcgcgtatgacgacgacgggcagcttatctgggcgcttatctgcgaagtggcgcgtgatgatgcagatcctttcacatcgtccggcaaagagttcctgcgttatcgtctctggacccgcgagcagtggtatcttttccgtgaggaaggtaaacgcgctggtggattgcctaaagtcgttctggacggcagtggcgatcataatcttggcgtcgtgccggtcttcccgctggattgttccgggcagggtgaatcgccgtacttcagcccatcgctgattgacgacattgcgtatctggaccgggcggtagcgaactatctgtccaaccttgatgcgatcatccaggaccagaccttctcgcagctggccataccggttcaggcgatgttgccaggcgatgagaatcacgcaaaggtgatggagatggggaccaagcgcgttttctcctttgacggtgagaatggggcgcagccgttctatctgtcgccagatccgaagcaagccagcatcatcattcaggccattcagcagatcatcaacgaaatctaccattcggtgggcgtcgcaggtgagcgcaccaagcaggataatgccgccggcatagacaactcttctggcgcggcgaagatgtacgacttccagcgcgtgaactcgttgctggtggcgaaatctggccgcctgaagctggcagaagcccgtatgattgaactggcggcgaaatggatgggtgttggtgacattgacacggaacggctgctgacatacccggagagcttcgacattcgcggtctgacggacgagtttggcgtggcgaccaatctccagctgctgggcgcaccggattcagcccgtcgttatcagatggagctgttgctcgataaggtcttcccgaatctgaccaaagagcgaaaagcggaaatcgacagcgacctgaagaattacccgccgcagccggttgagccagcaccagctggcggagcgaagaagcccgagccgactacctctgccaccaaggaagagagcgacaagaaggccgaaaacgataaggttcgcaagaaagattaa

SEQ ID NO: 240978 - DNA, 876 bp, Klebsiella pneumoniae
atgcctctgtggaaaattcaacaactgatgcacggctttaccggctatatggatgtagcagggaaagaggaactgcctggcggcgctggcgccgataaagtggaagttacccctgtagagcctggccagaagagcaccgaccatgccggtgaatttgatagcctgtctcaagaagaactcattgctcgcctgaaagaagagcgtaagaactctgcggatctgctgaaagaaagcatgaagcgcaaaggcaacgagcagactctgaaagagaagctggctcagtttggcgatgtcgatcctgaacgtgtgaaagcgctgattcaggcggaagcagagtctgaaaagcagcgtaaggcttccgaagaagctgagctgttacgtcgcggtgagtttgacgcggtcaaaaagcaaatggttgaagcgcatgatgcggaagtcgcagatctgcgagctcaactcgaacaggcccaaaacgaagccaattcactgaagcgcggcctgattgagaaaaccgtcggcacctctttcggtgaatccaatttcttgcgcgaaaaggttctgatgaccccggctaaagcgcgagtgatttacggtagccactttgaagttaatgaagacggtcaggttgtcggttatgacaaacctgctggcgcgaaagaccgcaccatcctcgttgacggaagcggcaaccctctgagctttgaactggctatcgagcgcgtattacgtgcagatccagaggctgacgctctgctgcgtagcgaagcgaagcctggcgttggctctcagaccaaagccaccaccaaagtcacaaccgaagcgcctaaatcagcactggataagctggcaatgggcttgggtaaattaggtaagtaa

SEQ ID NO: 240979 - DNA, 429 bp, Klebsiella pneumoniae
atgcagatcacgtcagaaccttttgacgattacaccgggtcgatgtttcgtacatcgttcaccaactccatctcagacagcccaatgtccgagcgagcccagggcgcactgaaggcttgtttcaagtctaagccatacgtcgatgcagccgctgtaattcacgtccagagcgtaacggttgccccgaagacggcgactgtggtggtgggtgatacggttcagttggcaggctctattaagcctgatgacgccaccgaccgctcttaccattgggttactgaagattccggcattgcgaccgtcgatgtgtctggcctggtgacgggtatcgctgaaggcagtgtgaagattcgtctggtagccaatgacggctctgtattcggcgaagcggctatcaccgtaaacaatccagagatagtccaggtttaa

SEQ ID NO: 240980 - DNA, 432 bp, Klebsiella pneumoniae
atgaaaagtgcaaaagtgaagttgctggaatcgacctttaagggatacaccggtctgctttgtggcgttcagttcgaagatggtgtttctgtcgaagagctaccgtttgtggatcagcagcgtatctgcgcgtcgatgcgtgcggaaaccatcgaagggcgcaacgtgagcgcgtcagggcagttctcagagcgtcacaacgtctcgcttgaagatgtgcttgccaacgagcccaaagcgcccgacgtcgctcctatgcagcgtggcgtggtagagccagaagtcccaaagttcacccgcgaagagctggagtcgctggcggacgagcaggggatctccggtctgcgtgtagtcggtaaccgcctgggcgttaaagcgaagggtatcgttgagatgatcgacggcatcatgaaagcacaaggcggcgtctga

SEQ ID NO: 240981 - DNA, 831 bp, Klebsiella pneumoniae
atggctatgttaggggcgttcgaaagcaaccagacggtcaatatgaccttctctgtcgatatgctgacggtcgatactctgacctactcagtgtttgataacgcaggaaacaccttgttatctgaacaacccgccacgctggattctgattactcggttcaggtggcgatcccggcggaagtgaatcaaatcggggatgcggaccgggcattacgtcgcgtgaaactgaaggccaccaccggaaccactacggtcgagttcgaaaatgtttacgtcctgttgaacaactttgaactggccgtttttgagcagtcctttgccacgctcgatgacgcggcaatgtacgctatcgatatggttaaaggtgatgtgatcctgaatatgagccgggtccagctgcgtcgtttgctgattgaagcgaccgtcaggctgaagcagatgcctttctccatccgccgcatctttggcgtcgattacgacgactacgaccgaccgatgaacatgctgaatgttcataacgtctattggggtcaggagggccagtatcgtatggacctgattgactggagcaaaatgtcaccagagctgtatgcaggattgccggatgatttcaagaagacgttgctggtggctacagtcaacgaggttgccgagattgcttcaaccaccgattcacagtccgctcgtgatgagggcatcgtatccgagtccattggggaaacgaccattgcttatcgtcagggtaaggcagcgaatcttaccgtcaatcgcacaacgtggcggctgctggtgaagtatctcaataaccgaacagttgttcgtcgctcgtaa

SEQ ID NO: 240982 - DNA, 348 bp, Klebsiella pneumoniae
atgaacgtagcgtggcagttggaaggctctctttaccgaaagagcaaagagctggatgtgtacggggagtcgcagttgaggtttgtcggccgcataaagttgggcatggttcgtttcgccgattcggtcgagaagtcatccgtccgcgcggatagttcggccagccgtggaaaggcggagcaggaagagtttgatgcggtaatggtcacgccgctcgaatcgaaggttcagcagggcgacattatgctggtggatggcgtgaagctgcgcgtcgacatgatccacaagcgattcgggttacgagggaggccgggtcatctcgaagtgggagcgtcaatatgggtttag

SEQ ID NO: 240983 - DNA, 489 bp, Klebsiella pneumoniae
atgggtttagagtacaacgtaggcaagctgggccgtctggccgatcgcctgacgaactcccagaaagcctacaagcgaagcctgattaacgacatgaccaagctggccgtaaccgcgcagaggctcgcaagagccctggcgccatacgaaaccggatcgctggagaacagcatttacgcgcgggttaaccgaagcgaccttgccagtctgtcaatcgagttggttgtgatgaaagacagagatagggtgggttctctaaatggcggccgccggtacactggtgatgcaaaggtcggcgattacgcagagtacatggagtctggccgatacagtctgggggctcgttccaggcttaaacagggtgggaatgcgcttagcaggaaggttggccgacgtttcatggacaggactgccgagtttatccgaaatgaaatgaggcggatcatcgccgacagcgcacagaaggccggcttcggccgaaggagataa

SEQ ID NO: 240984 - DNA, 375 bp, Klebsiella pneumoniae
gtgatcatagaacagttcgcgacattgctggaaaagaagggtgttggcaaggtgggaaagaccatcttcgctaatgcgatgggggcggaggtaaagtctggcgtcatggtggtgactacaggcattgagattgatggggatctgcacgacttctatcaggacaatatgattgtggtagtccgggacgccagtatcggcgctgcaatgaagcgagctgacctgattatggccgctttgccgatgtgggatgaggaagaggccggtgttcgttttcgttacgtcaggccgctgaatttgccgactttattcccaaggaacgatgcatctctgtttgaggtgggaatttccgttgagtttgccgcccatttgttgtaa

SEQ ID NO: 240985 - DNA, 492 bp, Klebsiella pneumoniae
atggctaatacccatgtaaagaatatcaagttaggcgcctgtgctgtttctttcggcggcaccgatcttggctacaccaaaggcggtgttgaggtagagatttccaccgagacgctgaaagtcaccgtcgaccagcagggccagaccactctgtccgagctggttcagggtcgtaacgtcaaagttaccgttccgctggccgaaagcgttctggagaacatcgtcaacctgatgcctggctctaccattagcacggataagaaatccatctccatcaccaccgctcagagcgtgaatctgatcgacgtggcgcagcagctggttcttaccccgcaggatggcaccgacttcattctgaccctgccgaaagcggccaccgccggcaacttcactatggcgtataagttcgatgacgtccgcgtgttctctgtcgagttcaatgcgtacccggatgacgctggtgttttgggtagcctcaccagcccaaagtaa

SEQ ID NO: 240986 - DNA, 318 bp, Klebsiella pneumoniae
atggctaagttactaaatctggacacgctggttcccgccgttaagcaggttcaaatcggcggaaagcaatatccgattgtagagatgagtgtaggtctgttcgcggaaattaagcgcttcgaaggtagcgaaattgaatccatgagcattgctgatcaggttgctgcgtatgcggttctggttcagaagctgattccctctctgccgcagaatgtgttggacgatctctccgttatcaaccttcagcaaattttcaccttcgcactgaacgttgcggatgaaacgaacgaagccgccgctggcgacgaagtaaagtag

SEQ ID NO: 240987 - DNA, 4638 bp, Klebsiella pneumoniae
atgtccgacaatatcgtagattttaagctgatcctcaatgataaggagttcgaggtatcagctaaaaatgccgggaagttactcaaacagctgagtgtggatgcgggtttagcgtccaagaaaatctccaaccttgatgtttctgtcaactctctgacgcgaaacatcaaaatcttcaccgtagcagtgggtaaagcggcctcggaactccaggatttgggagtcggggccgaactcgctggcaatgcgcttcgtgatattcgtactcacattgccgcaatcagtcgcagcttaacagtattcaacgaccgcgttggcaaaaccacaaccgcactgaaaggtatggcgagtgagctgcgcaaggttcagtctgaactttccgacttcagtgattatgccaaccacgcaggcaagtctacgcgcgacctgaccgcgaacgtagacgatctcaataagaaagcctccaccacaaatcgtcgcttaaacaatacgacaaaggcactggccggctggaaggactctggtgacaaggcgaaggacgcgctgaaagaaatcatcagccagatggatacgctcattgaccgtcagaaagagctgaagggtttgggacgtgctgatgttggcgggccaggtcgcggcggtagtggcggtagtggcggtcgtggcggtagtggcggcggtcgccaccatagcagttcttttggcggcgtaagagggaccatctttgctttaggcgaagtgggtgatgcagcccgaaacgtcagagatatgctgtttggctggcaagcgcccatcatcgaggcagcagctgaaatgcagaagatgcagatgcttctgcaaggtataaacaaggatgcagccgatccatttgccgcagcggcgaaggatatggactacatcatcgccaccgctaaaagtgcgccttttgcgattggcgagttgacgggctcattcgtcaaattcaagtcggcaggattagatccgacgaatggctcgtggaagacgctgatcgactccgttgcccgattcggcggcagtagtgaaacgcttgaccgcgcagccgtcgctatccagcagatggcaggtaaaggcgtcatctcgatggaagagctgcgtcagcagctgggtgaggctgttcctaccgcaatgaaggcgatggcggacggcatgggcgttactgtagccgagcttacaaagcagatctctaccggcacagtgaatgctcaggaaggtttgcgtctcatgttcgttggtatggatgccatgaaccgtggcgccgcgaagagcatgatggtcacctacattggcgccctggctcagatgaagaccgccttcattcagttctctaagacggttggcgattccggctatctcgaagctatgtcaaagagtctcaacgagatcaccgcgttgatgaatagcacagatggcaggatgtttgccgcgtctctgggccaaaacctggcgaccgcgatcacgtctctgacgtctatggccaggtggcttgtccagaatcgagagctgattatcaatctcggcgcagctattgcggcgttcgtaggcttcaggttgcttcgctctgggatcttggaggtgattagcgtcggcagccagatggtgtctgtgctcggtaaaagcgtaaccggattacaggctccatttaatctcctgtcagcctcagtgaccagatttagtcgagcgtcaaggcttggacttgggactatcccagctctcctgttctcgatcaggggtggtctgacggcagttaaggtggcgtttgcttctctgtctgcgttcatcgtctccaacccgattggggccgcattgcttgcgatatcgactgccgtaggcgttatcgtttgggcgatggggaagctgagagataagaccgcgcagaccgtagaagagctcaagaagatgcctgaggcgatgacgcagatccagcgcactcagattctgctcgatgtcaagaagcgaaacgcggagattgagcgtgacgagaatcttcttcagtcaatcaaatcaggcaagctctcggcggacgctctgccggcagacatcgcaacgggcagacagctgactgttaaagatgtcgaaaacagagttaaaacaaacaaggcgataaatggcgactacactggcctggtcacgaaaagcgacgagataaaggccaaggagacggcatcaggcgtaactaaggcggtgttcgaagacattgagaagcggctcaatgtcggtatggctaaattcgcggcaggtcagatgcgagagaatgaggccaaaaggatcgctttggacgccgacaaatctctctccaaggaagagaaggataagcgccgggatgagataaaccgctcagaggcaaacgctcaagccgacctctacaagaaggccgctgacgagatggaagcgcgggttaaaagtgtcgccacacaggttaaaaacttggatgaggcgctgagtaaacctggcctgagtgaagatcagagaaaaatcctgaccgctcaaaagtacggttacgcgagcaactatgaagagtcgaagcagcagctcgacgacatgcgcaacaaggaaaaagatacccgaaacagtcgccacggtatccctgacgccagcggcgaatattccagcgcatccggggctaaagccgatcaccaggtttacgtagccagagttaagaacgacttcaagaacggcgcaacgagcatcatcggcgaagatggccagatcgccaaggatgttttgggtaatgacatcgagggcattaaccagttcagagccaacgagactatcatctccaaatacggctcaaacgtaaccggggaacagcgtaagaaagccgaggaagcgttgacggctgccattttgcgagacacccagatccgcacaaaggcagccgaaacggcaagcaagaaagaagaaagtgctaacaacaaggcgcaaaaggcggccgagcgtaagcagagggaacttcagaaagaggctgatggctacaacaagacgctgaactcttctgagcagatgatctccatgatggagacgggctctaagagaaccgtttcgtttgcccagaacgtcgagaagacgtccgtgtcgcttgagaagctggctaactcttcccctaccgagctcatcacgcaggagatgatcgacaaggcgaaagagtatctggcgacaatgaagacgctgtctcctgactatctgaagcgactggagaagaaggccgccaagaaagatttggacgatgtcgcgccaaatgcagccggtatcattagttccgggcttgatggttcgcaatccagagacgagcaggttgaggcgttcaggaccaagtatgacgaaagtctgaacgcgcttgagagccgtcgcaagcagtacatgagtcagttgaaagacgacccaagtatgcaggtttacgttgaagagtcgaccaagcggatcaatcagctgattaaatctggcaacgtcgcgctcatcaaagaaaccggcaccgccacgcagaagctggcgctggagtatggcgatctggctacgcagattgaaagcgtttgggcggataccttctctggtttgaccgacacgctgaccgagttcttctcgacgggcaaggcgagcttcagtgacttcgcctcgtcgattatgaaggacatcaccaaaatgatcgtgaagagccagatcacactgcctctcatgaacatgttggggatgggctcgggacagacggccatgcagcagacgggccaaggcaatctgatgtcgtcccttgctaaccagggcgtctctctgttttctggcgcagcaacgaatggcggcggcaccaacgttgttaatggcgacggtaacgtggccaccaacagcaaaacggcctcgcagtccgttggtaagttaggctcgacaaccgcatcgacgacggagggtgtgagctctcttgggacggcggtggtcggagtcggcggtgcgttaagcaatgtgagcacggcggtaggttcccagaccaaggcgatcatgtcgaacatcttcagcatgaaggggctacagaccgcctccaatgcgctgatgttcaccttcgccgcaatgtcagccagttcctcgtccaaaacgagcaagtggttgggcttcgcgggtacggtagcttctggggtcgcctcgatatatgccggtggtggattcagtggcggcggtagtggcggcggttctggtgaatctcctggcggcggaacggcgattcagaatgccggggcaaactataaattcgccaagggcgggattatggggccggatggtgctctgccgctgcacaagtatgccaagggcgggattgcaacgtcgcctcagctggcgcttttcggcgagggctctcataacgaggcatatgtcccgctgccggacggccggtccattcctgtcacgatgtccgccgaaaagacagctggtcttggcgctggtgctggtgtggtggcccctgtttccatctccatcaacgttcaggctgacggtgtctcttctgcaagcggcgctgactcgacccaggggtggaaggatgcagctgagaagatgaaggcgatcgcgctcgacaccatccgtcaggagaagcgacctggcggatcgcttaacgcaaacactacgggcaaccgttaa

SEQ ID NO: 240988 - DNA, 336 bp, Klebsiella pneumoniae
atggccagagaaacatttgggtggaaccctgattcgcaatcgaaaaagaccataaagccgaacgtgaccgtactgaagttcggtgacgactatgagcaacgccagaccattggtctcaaccgcgtgaaggaagagtggagcctgacgtttcaaaggcagcgatcggaagttgagaaaatggacgttttcctgacgaagagagctggcgtggaatcgttctactggaagacgccgcgcaaccagacaatcattgtggtttgcgacacccacgatgttgagtacgacagaggggcggcgaagttgacctgcacattcagacaggtttttgagtcttga

SEQ ID NO: 240989 - DNA, 702 bp, Klebsiella pneumoniae
atgggaatcaaaaaggaaatacaaagcctgtcaccttcgtcggtgatagagcttttcattttggatatgtccgttaccacctctggcggtaagcggtatttccacgcaggtacgaacgagatccgcgacagcatcgtctggcagggcgtggtttacgagccctggccactcaaagcgaccgggttcgatatctccgggcagggcactctgccttcaccgaaaatgtccatcgcgaactttggcggaagcatttcagctgaagtccaggctaacgatgatttggtcggctgtaccgtcattcgtaaacgcacactggctcgcttcctcgatgcggtcaacttctcaagtggcgtcaatccaaccgccgatccatctcagttcttcccggacgaaagctggttcgtcgagcaaaagacgctggagactttcgaggtcgtcgagttcgagctgtccagcgtattcgaactgatgggcgtgaagctgccgtatcgccagatcatcaagaacacctgcccgtggaaatatcgcggcacagagtgtggttacacgggtccgtacttcgacaaagacgataagcagacctccatttctggatctgactactgcactaaacgtctcgactcctgccgcgcccgtaaaaactactttgcgaacggcattatccacttcggcggttttccgggggccactcgtgtctcttga

SEQ ID NO: 240990 - DNA, 630 bp, Klebsiella pneumoniae
atgcaccctgacgacgttatggctgcggaggataaaggggatgtggtggctgtgtggcactctcacactgaccaacccgcgacaccatcagaagcggatctggctggctgcgaagcgacgcagctgccctgggttattaccgccattcacaaaaactacgacgacagcattgatgtcgatttcgtcttttcaagtcccgtcgttttccatcccacaggattcgagatgccttacaccggccgcatttatgcgttcggcgttttcgactgctggaccctgtgtcgcgactatcttggccgcgaatttggaatcagtctgaacctccacgaaaagtttcgcatccccaactggagcgaaggcgatgtggacattctcggcgacaacttcgctggtgaaggtctggttcgcctggcgaatggtgaggaacctcagaagggcgacatcttcttcatgcagtacggaaagatgccggatcactgcgccgtctacatcggtgacgaccaaattctccatcaccacaaggaccgtctcagctgccgagccgtctttggtgggatgtacaaaaagcatgtgacgcaccacctgcgccaccggaatctactttcagggaaagagaaatgtctgaattag

SEQ ID NO: 240991 - DNA, 588 bp, Klebsiella pneumoniae
atgtctgaattagttcacgttcaattgggcggtgcgctggcgaccaacttcggtcgccattggcatttaaacgtccgaaacgccaaacaagcctttgatttgatcgacgccaataagcctgggtttaaggcgtggattcgcaaacacgcgaagtcgattagcaagtaccacatccagattacaaacaagcagggccacaagtattcaatggatgaaaccgagtttcagatgatgggtgaaagcgacaacatcgccaaaatccgcatcacgccagttccgcatggtagtggcgggaagggctttgcgtggtttgaaaccgttgttggggctgcacttttggttgcctcgattttcattccagcgctggcccctttaggcatagctctcctgatggccggcgtccaggggcttctctccccacaagcgaagaaagcacaggggccggctaacaactctgatgcgacctactttgacggcccacaaaacacgacgaatcagggcaacccggttcagcttaattacggtgaagaaattctcgtcggatctcagaccgtgtcctcatcaatcaccattgaacagaccgcataa

SEQ ID NO: 240992 - DNA, 690 bp, Klebsiella pneumoniae
atgactccaagaggtattcgtaacaacaacccaggcaatctggataacacgaacccgtggcaaggtcttgtggccaacaagaacgaatcgcggttcgcgtcattcaaggatgcgacatgggggattcgtgcattggcggtcacgctgatcacttatcacgacaagcgcaaagcgaaagacggctctcgaatcgacacgatccgcgaagttgtcgagcgctgggcgccaccgtccgaaaacgacaccgcggcctacgttaaggcggtgtccaaggcggttggcgtgtcgccagatatggaaatcgatttgcaccagtaccagatcctgaagcctaccgtcgaggcgattattcgtcacgagaacgggcagggtccgctgaagacggcaaatacgtggtattccgacgacgtcatcgacgaaggtttacgccgtgccggtgttgtgaagccgaccaaggcaatgaagtccatccctgttaccaaggagacggccggcgcttcattgaccgcctctctcggtattgcgcagctggcgcagattgcaccgcagatcaacgatgcaatgaacaaggcgcaggacaacatttccagcggtgattgggtgcgcattgggtttggtgtcgcgacgatcgtgattgccggcttcattgcctggtcgcaggttcgcaagtatcagaaagggacaatctga

SEQ ID NO: 240993 - DNA, 258 bp, Klebsiella pneumoniae
atgggtgtagtagtcgctttgattagtaagttcaaagtggcgctggcgacggcttcggccgtcgttttagtgcttttcggcgcttacatgttaggtggtcgctatgctcggcgagcggtcgaaattaaagagatccgcgaagaaggtcttcgcaataagaaaatcgtagaggcaaaggttgaaacatcaaagcaagttgcaagtcggtctgatgatgccgtgcattctgagcttcagtctgattggatgcgcgattaa

SEQ ID NO: 240994 - DNA, 666 bp, Klebsiella pneumoniae
atgcaaactaccgttatagttgttggtggaacaaaaggcggaccgggcaaatcaacaatcgcccagcaagtagccgcctatctcatcctgaaaaagaaaaaaaccgtgttcattctcgacatcgacccccagatgacgaccgctcgctggtgcgaagaccgctctgagaatgaagatttgaccatcatcccattcgccgccaaacagcacgatatcgatcagactatcgccagcttgcgaggaagatatgactttgtggttatcgatgcagggggctttgactccgacattcagcgacatgctctgagacactctgacgtcgttcttctgccgctaagaccgaaacgtcgcgatctacgttcacttggcgatgtggataccgttgtcgcggcggccagagcgtctaatccagatctgaaagcctacgtcgtcatgaatcagtgtccgtcattgccgtctcaggcgaagcgcattctggtggcgaaggatgtatgtgagacgtttggcctggaaaccacaccggtcaatctttacaaccgcaacgtgtacgacgatgcagagtgggcgggacgttccatctttgaagtgactggctctgaacgtgatccgaaggcggaagcggaaattcaagaagtcaccaattttattctttctggaggtaattaa

SEQ ID NO: 240995 - DNA, 441 bp, Klebsiella pneumoniae
atggcggacgatttgaagaaggctggtgggtttggtgacttgacaagcggtgctcgtcaatcgaagcgcatcgaagaagccgacaaaccggctcgcgtatcaaacaagacccaaggcgctccactgaaaggtaagacggcaatcagaagtcgcaccatcagcctggaagaagagtacgttgagttcatggaagttctggttaagcgccttcctgacctaagcctgtcacggtcagatatcgtccgtgttgcactggtcgctctcagcaagatgaaagccgagaagctgaagtctgtcatcgaacagaaccgtttgaccaccagcaatgaagtcggtcttcgcattaccgaactggagcgagagtttgacaaagctgaacgagaagagctgttgaagactatcacgccggaagagctggaaaggctaattgaccgcagctga

SEQ ID NO: 240996 - DNA, 723 bp, Klebsiella pneumoniae
atgataaagctgcacatggcgctggatttcgaaaagtacgacattctggagacgatggataccgcgacaatggacttgtgggtatcccagcacgtcggtctttcccgatgcaaggctgaatcgtcgctgtacaccagtaagtggttcgactaccgcatcatgcaccctcttgtggccacctgtctttttaccgaagtgtataagctcaaacactcccagattacccgtacccacggaagagaggatctggtgaaagcctacttcaccacaggtttgaagagagtttcataccttgatatgtcgaaggcgaacatcacgtctctttggaaagcgagacaggtggcggacaggtactgcgtcccatacgactactttgtcgagaccatcctcagcatcgcagcatcgagactatgggataagctgccgcgaccgcagcatatgtggcaggaagatctcattgagatttttgaagagaagatgaagacgcgcatgaagaccaccttcgacgattccgatttcagcttccagaacgcatcccagattgtcaaccgtgaaattcagatggcttattgccagtggatcatcaaccgcgtgaaggatatgccgtccagcaagcgtgtttacgctatcgctaatgtcgccgtcctgaatcgcctcgtgccgatgtccgtcatgcagaagtgctttccggccgagtcggagagagctcaggtcttctgttga

SEQ ID NO: 240997 - DNA, 1350 bp, Klebsiella pneumoniae
atgtcagaagataccagcgtattgcacaccggtaagccactgtctgaagagtttaacgacgactttcagaaccgcctggccgcctatttttgtcgcgacttccagttcaccagccgcgccggtgatttggttgagcccgatcagttttcaagtgcagccaacggctttctggtagacctggtcggttcgtacttcaagatgtaccgcagcattccttcgacgaaggtgctggtcgagcttgttcttcaggccaacaaaaagggtcgcatccgcgccgagctcatgccagatattaaggcggcgattgcccgctgcatcaaagagccgctgacggacacgaattacatggtcgataaggtggccacgttcgctcgttcctgtgctttcgatgacgcgctgatcaaagccgccacgctgaaggagaagggcgagttcgagaaagcgatggtcgtcatgaacaaggtcaacatggttggcgcttcaggcgcagacgatgtttacgattatctggcccgtgaagaggaacgtctggccgcgcgtgactttgaagcgtcggatgattacgtgccaaactccatcccgaccggcgtccgcattctggataagacgctttatcagaagggctggggccgccgtgagatggttctgattatgggcttcgctaaagcaggtaagtcgactgcgatgggcgagttcgcagtaaacgcaattctggcgggttataacgcgctctacgtctctctggaagtgcacacatccattttgtcagacaggttcgatgcgcgtctctctgagcttcctatggagaaattgacggaacgacgcgatgaggtgcatcggaagctacgcgatatcggcgcggatgggaaactcggttcgctatggattgtcgagcgtccgtctggttccttctctccggcagacctggaccgtcttatcgatagcatgggagcatccgggaagaaggtcgatatggttgttgtcgactatgccgatctgatgagagcgacgaacccatccaaagacgaccgcgttgatgtgaagaacatttacaccgatcttcgtgccgtgttcgataaacataacgttgcaggtatgactgcttcgcagacaaaccgtgacggtggaagtgcagaaacagcgaccatgatgcacgccgcagacaacatcgagaaggtccgtatcgccgacctgattatctcaatcaacaaaacggaagaggaagcggagaaaggcgaagcgcgtttgttctttgcgggctctcgtaaccagaaaggcgggtttgctctgcgtgtccagcaagatctggagcaaatgcgattcattaagagcgtgttaggcgtcatctaa

SEQ ID NO: 240998 - DNA, 1119 bp, Klebsiella pneumoniae
atgtcagagcttcaggaattatcggaagagctggacttcgagcagtggcttgactccgagggcgtaacgtatcgtcgcggttctgtttcgtctcgcggtcgagagctgaatatcaaagagtgtccgcactgcggcagcgccggctggaaactttatttcaacgtaacgaccggcctgggtaagtgcttcgcgggcgatcacccggaagacgttcagtttaacaagctgacattcatgaaaagccatttaggttgcaactggacgcagcttaaacaggcgatcaaagacgagctccgtcagcagggctggaagccaaagacaaccgaagaagagacgctggaaagtaagcgggagctggtcagcgatctgacgttgccatttcactacatgcttcccatcgagggccagctgccaacgtatctggtggagcgaaacgtgggcgtcgacctgaccacgtatttcgatttgcgctactgcgtgaacggccagcacgtctatctcgactatgtgacgaagaagccgaagatgcagtgtttcgatatgcgcatcctgatccccgtctacagtctcgatggtgagatgaagacgttccaggggcgtgacgtcaccggcgtagcggagaagcgctacctctttcccaacggactgccggcgtcggggaaatttctctacaacggccacaatgcgattggcaaaaagacggtcgtcgtttgtgaaggtgttttcgatgtcataggggccaagcgagcgctggcgacggaaacgtccatcagagagtttgtggagccagtggggacgttcggtatgcacttgagtggaaacgtccgtggtgaggatgaagaccagctgggggcgtttctggagctcaaaaagcaggggctggagaccgtcgtcatgatgtgggatagcgagaagcaagcgatacacaacacgtttggcgcggccagacgtcttatttcgattgggttgaaagtcaggatcgcctgtttgggcgaggaagggctcgacccaggctcagcaactaacgagcaaatcatccgggccttctatcgtgccaagcagtacaccaaggcactggaaatgatggcaatgttaaaaggaatcgaggcgttaaaatga

SEQ ID NO: 240999 - DNA, 816 bp, Klebsiella pneumoniae
atgaaagagatcagagcgtttgtcgaaagagaggcgaagttcgtattcgcgcacttgcttgaaaataaggggatcaccgcgaaaagacgacagaccatcgaagagcgaagcattgattacgcggtcaacttgctacctcgcaaagaaatttttgatgacgtgataatgatgacgcaacccggatgcatcgcagcagtgagcatggcgcggtttgggcctcactaccttgttgcgctctccgacgacttccctatgacggccgaggcgtccaaatgttcattcctgattgtgttgatggaaagacgaaacagaggtcagtatttgccaaaatcaaatacgtcgctggtctttactcgtgacgagtattccgacaccgcctccatgtttaacgagtcgattgatcatttcagaccgatcgatgaaaaattgagaggcttaactgtagacagtgagatgcctggcgtcatcatcgaaagacccaaagatttactgtctcgtattgggacggaggacaagggggcgatcgcggcgagcatcaaccagcacattcacaccgcactggataacgccttctctgactttgagccggacgcaatgaatatcatctcttcagccagtcgatttgttggtggcatgttgggcgagtatggccgggagttcgttcgcaaggcaacacatatagaaactcttctcgtgcagacgcgatccaatctcgctggccgcgtcgaagagcttattgcctcaaccgcattagatgaatcaaggctgtcgtccgacaagccacaaggctttagccacctctggggcatgttctaa

SEQ ID NO: 241000 - DNA, 444 bp, Klebsiella pneumoniae
atgagcaagataaatatcagcaaacttccttcaatttccaacaacagctattacctgaagtgctctgcgccgtctgcgaacggcaaagatatggggtgtagctacacggtatgtcaacacactgtcattacgtttcaggccggaaaacttaagggatttgatggttgtcgcaaggcgatcgctgagcgcaaatgcaaagccgttggaatgatggtcgaggaaattaagtcgggggttccgatttacttcgtcgatagcgctgaagaaatccgtctcgttgaagaggaacgagccaggtcaagcatcttcgccgcgcggaaaaaatcgtctccgacgttcgcatctcgtatcgccaaaaccgaatcagtgccggccgctaagccagcggctccaatcgtagatatttacgcggagctcgtcgcggccgaattgtccagtaaataa

SEQ ID NO: 241001 - DNA, 492 bp, Klebsiella pneumoniae
atgaaactgtcatatacgccagttgtaggcgagctatgccaaatatccgcgcagtatcttggtgccgggtggtttgactgccaggtgctggcgatgtcggagttcggtatttgtgtgaatgttacgaaggaagacgggaagaacttcttctggattgactcgaccgacgagagcgtggcggccgacttccgtcgcagcctgtctttccatctccactgggccaacaaagagactaacgaccgtgtcgagatgatatgtgtcgccgacgacgcaacgacgcctgagagccgcacaaacaagattgtcgcatatatcgatcgtacttccggcgttgtgtcttgcctccagtctaatgacttcctcgacagattcgaacgtgtggagggtttagacgacttcccatccgctccgcagcctcaagacggttgcgacattctggaatctcaagacgacccgatcatcacatcagccacactggaggccactgcctaa

SEQ ID NO: 241002 - DNA, 180 bp, Klebsiella pneumoniae
atgatggacggtttggctggagttggcttgttggcctttcttctgggtttctttctgggcagcatgatgctcatatcgataaagaaagacaacgttgaggccgggttcatggggttcaggggccggatttatcggatcgtggatgtgacacatgttgtaaaagcccagagcggggagtag

SEQ ID NO: 241003 - DNA, 213 bp, Klebsiella pneumoniae
gtgattcagctaacgaagcgggagctggccacactgttcgaaattgataagtgtggttacttcctggaaaactggcgaccaaagacaagggcgcgtttagagcgcgtccgtttggttgatatgaaggagtcgaacggagagatacgctacaagctgtccgacgtcggcagagaactgattttggctttaatggaatcaaaagggagtgtttga

SEQ ID NO: 241004 - DNA, 237 bp, Klebsiella pneumoniae
atgatggatattgttttgtatgcggcggtagtcgtcagcttgttttacacgtcggccagtctcgttgggtggctgttcaatctgttctctgcaaagtgcctggcagataagaaaaccgttcagaatggtgcatccaagcttattagcctggtgattctgcgctggggcgagctcaggaaagagaccgcttatgagatcgtcacaggcggctatgtcgtgacaatcaaaaaaaaatag

SEQ ID NO: 241005 - DNA, 612 bp, Klebsiella pneumoniae
atgtctgaagtcaagaaggtcattaccgtagctgaacgctccaccaaagctctggttaaagtcgttgccgatagccagaaggtgcttgctgaactggcttctatggctgattcaaacgttattctggccgaagagattgagtttaaacaaggtcagctggctgatatcgaaaaccagatcgcctctaccgagcgtgaagctaaagcccagctgcgtctgcgtgtaatcgaaaacgaagacaaagttttggccgacctgatgaaagcgcgtggctatgccgtcatcaccttctctgatctggattctctgaactctgacctggttgcggctaaaaccgacaacgatttcgcggtgtccgaagcgcgtgaagctggttatcaggcagctgctgctaaatttggcgcagagaaccgtgaactggcatcccagcacaaagttgaactggcagagtttaaggctcaggcggttgctaaaaaccaacgcatctctgacctggaagcgcaggtttccgaactgcgtggtcagatcaccgcagagcgtgaaactcgtctggagatcgctaaagctgatgctggtcgtgcaggtgtggttgtgaacgccggcaagaactaa

SEQ ID NO: 241006 - DNA, 822 bp, Klebsiella pneumoniae
atgaccagcaaaactatcaacccaccgctgaagtggccaggcgggaagcgaaccgtgatggggttcatcaaccaacacttcccagagggccggcgactcatcgagccattcgtcggtggcggttccgttttcctgaatgccgggtttgaccgcaatctactgaatgacgtcaacccggatctgattaacttttaccgccagctggtggccggtggcgccggtttcgttgaaatggcgagagagctgttttccaaaaacagtgaaggcgagtattacgacatccgtgagaaatttagagcgcgagattctgcgccggatattcaagcagcctacttcctgtatctcaaccggcactgtttcaacgggctggtccgctacaaccaggctggtgcgtttaatgtcgggtatgggaaatacaaagcgccccatttcccagaggcagagatgcttgcgttgatccagatggctggcttgcgagaactggcgtttgtttgtggcgacttcgacagtgtcatagaggaagcgggggatggtgacgttgtattctgcgatccgccatacgaacccatgccagataaaaatggcttcacagcgtactcaggggcgaccttcagcttcgcggaccaagagcgtctgactcgtctgctgatcgcggccacggagcgtggggcgcgtgtgatgataaccaatagcggagcgccaaagattctggagctgtaccacaacaacggattcacgcagcgccggttatccgctcgtcgctccatctcatgctcagattccgggcgtgagacggtaagtgacgtgttggccattatttga

SEQ ID NO: 241007 - DNA, 756 bp, Klebsiella pneumoniae
atgggtttaccacgtaagaaggctcgcaaagcagggaaaggggatcacgcattacgcggtcgtcgcgctgattacatcattgtcgatgatctggcagacgtccagaccccgcgctccaagcgggacaatacacccattgaagcacgtaatgaggctcagggtcattacctggccaacattcaagccaagtcgctaatcatcgccaccggcgaagccggctgcggcaaaacgttcctggccaccgcgtatgctgcggaccgtctgcttgcgaaagacgtccagcgcattattgttacccgccccgtactgcaagctgaagaagatttgggctttcttccgggtgatgtgggtgagaagtttgccccctacttccgacccgtctatgacgttctccagaagcgtctgggcgcgtccttcctcgaatactgtctcaagccagaagtcgccaaagtagagatcgccccgttcgcttatatgcgtggccggacgtttgaggacgctgtggtcattctggatgaagcgcaaaacgttacaccgtcacagatgaaaatgttcctgacccgcatgggcgagaatgtcaccgtcattgtgaacggcgatgtgacacagtgcgaccttccgttggagattgagtccggtctggacgatgctcttcgccgcttcaaacccagccgtgatgtggggatggtcgagttctcgttagaagattgcgtccgctctgacctctgtaaagttgcactagatgcctaccagtaa

SEQ ID NO: 241008 - DNA, 546 bp, Klebsiella pneumoniae
atgtccagagtggtattgccgaaatatcaaagcattaaagttgtggaggcggccaagattgcgagaatccacggtcaggtaatgctgttatccttctgcaatcatgtaacacgctctgaattgggccacgttaccaaagttgaagtagaacagaattacatcgacaaacatcagccgcaagttggcggatattacgttcgttacgaagatggatatgagtcctactcaccacaagacccatttgaatcaggttatttgccgctcgaaaccgctatccatgccgccaaagtcggtgcatcttttggtattgcgatcgagatgctgaaagacggccatcgcgtcgctcgcaaaggctggaacggcaaaggtatgttcttgcgcatggtgtcaggcaaacagtacgacgtcgcttgcggcattgctcgtgatctggagctggcgccctggattgggatgaaaacagcggacgataagtttgttccctggctggccagccagagcgatatgctggctgaggattgggtgattgtggaggtcgctaaatga

SEQ ID NO: 241009 - DNA, 219 bp, Klebsiella pneumoniae
atgactccagaacaatttgcatattggttacaagggttcgtcgagctcaatggccagcaaccgactgacgcgcagtgggacagcattaaagagcacctgcaaaccgtgtttaaaaaggtgacgtcgtccgtgccgcctacaggtccagtccctcgtggtggcctggagcagcttcgtggctcggcacttgatcaaactctcttatcattatcttgctag

SEQ ID NO: 241010 - DNA, 249 bp, Klebsiella pneumoniae
atgaaaattaccatctacggtaaagaagactgttcatactgcaaacgtgcggttgagctctccaaacagcttatcgaacgtggttgcgcggattcgtacacctacttcaacatcgtcgaagaggggttcgacgcggcgacactcagtattattttgggccgaccggtccgaaccgttccgcagatccttgtcgatggggtcgccatcggcgggtatacggaactggccacactcgctacaacgctttaa

SEQ ID NO: 241011 - DNA, 252 bp, Klebsiella pneumoniae
atgttcactgaaacggtactggccaaacgcacatcgtctattagcgagttcaagaagaacccgtccgccgcaatgagtgagtcgcatggcgagcctgtcgctgtcctgagccacaacaagccggccttttactgcgtcccacctgctctgtttgccctcatgatggaccagattggcgaccagctccttctggataaggctatgtctcgactggatgatgatgaggtggaagtcaccctggatcagctttaa

SEQ ID NO: 241012 - DNA, 324 bp, Klebsiella pneumoniae
atgggcgacaattttacaacaaagctgacgttcaaaaggcttgctctggccgagtgggagtcgctatccacacccataagggataagttcaagaaggttttggctaagcgtctggagtcactggattcgctgacgatgccgaaaaataggctctcacttcagcataattgctacaagattaagctgaagaacgacggctatcgtttggcttatacggtaaaaaatgacgagtccggcaccgtcaccgtcgtagtaactgtcgttgcagttgaccgccgtgatgaaatttacaatgagttgaaaaagagactcaatgacgaatag

SEQ ID NO: 241013 - DNA, 360 bp, Klebsiella pneumoniae
atgacgaatagagaacgggaaaataaacccgctctgggcataaggcagaacatgaccaccgaagaaatgcgcgacttccttttgcaaaacaactttatgcgcgtcagacagctggaggatggaagttggatcggcacgatgaagttgatgttcaccacgtcagtttgcatggacatcgatgagctttcccccttccgctatcgctggtgcttcgcggacccggaggaagcgaatcacttcttcgatacggcagtcgactttgacgaagttccgactcgtcgaacgtcactgaaaggacaccggtatcggggagagcctttgctgcgcgaaaaagacgaatttggatttgataaatggtag

SEQ ID NO: 241014 - DNA, 1023 bp, Klebsiella pneumoniae
atgagcctcgatctcgatcaccaaaaagccatcgaaaacagttcagctgagacagtcgcctatctggaacagtgtcgggcgatgtccggcaagcagctgctggacgccccggacgaaatgacatttgagatgggcttccgcattttcaccaggctttctcttctcgtcacccggcgccggccggagatagcggtccactgtgttctgattcacatcatgccgatgttgcaatcaaagcaaattaccgccataaagcgatccgacattaataaaatcataaatggcctggtgctggacggcaagattgtccagagccggcgcgtcttttctgttatgaaacagttccttagctggtgcgagtttcagggccatatcgagacgtcgcccctggcgtccatctcgctaaataaggttgccggcggcgttcgcatgaagccgagagagcggatcttgagcgacgaagagataaacctgttctggacgatgtgggatttagccgacgttgacgactgcaccaagtgggccgcccgcctcattctctgttcagccagaaggccggatgaggtgctaagggccaggcgcagtgagttcgatcttgatagagatgtatggaatcagggtacgcgtaacaagtccgcaagacgacacacactccccataagtccaattatgagggagtgtattgagtcattgtttttggccggaggtaacagcgagtggctggttccgtcaaaaagaagggagggcaatccggtatccaaagtgctgatttctcaggcatcacgtcggatacagggattgtcctacagtggatttaatgaaccttttgagattcgagacttaaggcgcacagccagaagtgcgttttcgcgccttaagatctctcaagaggtagcacgacaaattatgaatcactcgccagaaggtctggataacgtatacaacaagcacgactacttggatgaaatggccgaagctatgttgaaatattcaacctttttaagaagttgcattaaagggtag

SEQ ID NO: 241015 - DNA, 381 bp, Klebsiella pneumoniae
atgacagtagatatcggcaaataccgccccctcatggatgcggctataatcgactctggaaaaacacaaggtcaaatagcgactgaagtggggttccccaacgtaaacactctctcaattatcaaggccgggaaaacacatctatcattcgaccgcgtccttccatttgcctatgcaactggaatcaacggccacaaatttatgatgatggtcctggaagaacgcgagcctgccattttcaaccacttcgccacccgtgaagagaagatggtgaagaagttcgaggcagacctcgacgcactccgtaaagaaaacgaactactgaagaaatccaaagaagagttgacggcggagatagagcgtctgaagtctaccctttaa

SEQ ID NO: 241016 - DNA, 306 bp, Klebsiella pneumoniae
gtggcggcgtttttcttcaaacagctttttacgcagctcatgggcgttggtcaggttgccgttatgcgccaacgtgatgccatacggcgagttgacgtaaaacggctgcgcttcggaggcgctggagctgcccgccgtggggtaacgcacgtggccaatccccatattgccctgcatacgctgcatatggcgggcttcgaatacgtcgcttaccagcccgttagccttacgcaaccggaagcagttgttggcatcaatggtgatgatgccagcggcatcctgtccacggtgctggagcaccgttag

SEQ ID NO: 241017 - DNA, 222 bp, Klebsiella pneumoniae
atgcaagatacaatcaattcgctggaaaatttgaaggttatgacctcccttatcctttcgcgggaggtggcggcaacactaagtgttgattatcaattcacccctatcaacgagcaatgtcaggatcttctggcctctgttctgacgtccggcgacaagaagttcgcggtcatgcagcaccccatcaacagcaccctggccatcatctaccgcttcgcttag

SEQ ID NO: 241018 - DNA, 2055 bp, Klebsiella pneumoniae
atggcaaccgcgcagcaagtatccattttccgtgacgcaattaagaaagtaacaaccatccttgctggtaaagacttgcctgtcattgagcgtgggcgaaaagcctatgttcgatatcacaacgacgagcccgtcgaaatctgcatcccatccataccggatgacgcaagcgagaagttcatggaggcgattcgtgggtttgtcgatcatgaagtcgcgcacatacttttcaccgacaacaaggccatcacggcagccactggcgggaagaagattaaggcgtttttcatcctgaatgcggtagaggacgtcttcattgaaaagaagatgtcgaagctgtttgccggttccaacgccaacctcatcgccacccgtcgtcacgtcattgaagacgttttcacgcctcgcttacgcgatgctctggctcagtgtgcagatgaggtccaactgttccgtaaattcttccttgtgccagcgctacgttcgtggggcggccagttggacttcatctccttcatggaagagcacggaaagcatgtaggcgaagtctgcgctttccttgaaggcaaaggtattcgcgctgacattgagaacctggataagagtctcgattcgctggcgctcgccggaaaaatcaccaagtggctcaaggagttttcggatctgaaagagaaagacgaaccagaaaaagagaagtccgaggcgaaagaaaagcctgaagaatcggaggaagaagccgaggaagatcagccagacgaagaagttgaagatgctgatgagggcgacgaagaggttggcgaagacgaagacgaagatgaatccgaagccgaagatgctgacgctgacgaagacgctgacgaagccgaagagggtgacgaagccgaagagggtgacgaagccgaagagggtgacgaagccgaagacgctgacgctggcgacgacgctgacgaagccgaagaggatgatctgccttctctcatcgacgctcttatgaaagctgaaagcagcgatggtgatgatttgtctatcgaaaaggcgctgaatgaaatcatgggcattgaggaagagatgtccactgaagacaaaagctaccgcccttttgagcgcactaacgactatatgggacctctggaagacgcagacgcctttatgcgaaaggtatttggagacccagagaacagccgtctatacggggctccatatggcgttgaaggctatgaaatcgaggacgacgagagatgtcttcgtaccttttctcggatcggcaaaaaaatggacgcaggtgatgataccgccgcggcgatcgccaaagacctggaacgcgccatcgcatccaaaaacaggaccatgtttatccccggccaaaagaaagggaaggttcatgggccgagtctgtatcgcctcaacatgaatgacgaccgcgtgttccgccagaaggacgagaagcgagcggttaatgcgtgtgtgcagctggcggtcgatatgtcgggctcaatgtcgggcgaacgcatccatatggcggcaatggcagcatatacgatggcaaaggcgctggatgccatcaaggttccttgcatcgttactggcttcaccactggcacaatgccaagagggagttggcataacgagtccgccagcagacccttcacacgatttgaatcgcttttccttcctatcctgaaaggatggaatcgcaaggcagactctctggaaactcgtcgtaatttaggccacgttatgaaaggcgtcccactgctcaacaatgtcgacggtgaaagcattcgctccctttcgcgtcacttcaatgatcgcaaagaggaccgcaagataatgattgtgctcagcgacggtgaaccacatgcagttggtcgcggattcgccaacgacttgaggaaggcggttggcgacattgagcaaactggcatcgacctgtatggcgtgggcatccagaccactgcacccaaaaggttctacacaaagtcggtcgttatccacaatctgccagaccttggcaaagaattaatcagactgattgcgggatctctgatcgagtaa

SEQ ID NO: 241019 - DNA, 1230 bp, Klebsiella pneumoniae
atggatcaggttaaagaagttgctgcggaaaacgaaggttctgagtgcattcagtgctcgtggtgtggcgagtatagccaccacataggccagcatcttcttaaaggtcgctgcaacaacattcctgcggagctcgttggtctggagccagccgaactgttcaaaaagtacaaggtgatgcatccagacgccccaaccatgagccagctggcggcggcgaagatccgcgaagcgtacaagaaggcagatgggaaagtgccggcgaaggatgaggttgtcagctacgccattgccgaatttaaaacagagctagtgccagctcacggggtgtttgggttaaagctgtcggcactctctcgcagcaatggcgagccgctgatggtcaacgtaaacgtcaatacgccgttcccagaactggtcccggagatccgcgaggactatgtcttcggtgatgtcgagttgctgaaagatgtcctgatgatgctggaaaccggtatcccaggctacatattcggccacgctggtactggcaaaagcacaattatttcgcaggtttgcgctcgtcttaatcgtccgatgatccgcgcccaacatacggcgtcgactgaagagtcgcaaatcgtcggccagattctggcgaagaacggcagcacttacttcgagcctggtcttctgtctctggctatgcgcttaggttgggtttatctggcggatgagtacgactttgcctacccacaaatcctcggaatctaccagccggttcttgaaggtgaagcgctgacgctgaaagaggccactccagagtggagaaccgttaaaccacacgccaagttcgctttcatcggtactggtaacaccaacggatcaggcgatgaaaccggtctgtatcaaggtacgaacattcagaacgccgccaacttctcacgctttggcatcgtggctgaatcccaatacatgaaggcggcgcaggaaatcgacatgctggtcaatatcggcgtcgacttcgattcggctaagaatctggtgaagttcgcgacggaagttcgctccgcttacatctcaggaaaggtatcgcagccaatcggtccgcgtgagctgaagctggcagccatcgtcggtctggcacgaggcaatctctctcttggcatcaacaaggcatacgccaacaagatgccgtccgtcagcgcccaggtcgtccgtgaaatagcccagcgcatcttcggtgtctaa

SEQ ID NO: 241020 - DNA, 2370 bp, Klebsiella pneumoniae
atgaaaactttactcattcgcaccgacttttctttgggcgaatcgtctcttaaggcgaacagagcgcccatcgttgcagcggagaaaggttacacctcgatcattgtcgcagataccaacaatatcgcagccatcatcccggcccagcagaatgcgcctgaaggattcgatgtgatcgccggcgttcgggtgctactcgttgacgacgtggagtatgagcatcgcttacgtgaagaagggatcgccaagaaggatgcgccagcgccagtgagaaagcggatgtatagttttaccattctcgtgaagaacgacgcagggtatggcgatgtgtgcgagctactgactatcgccaatatgcgcgaaaacttttatatggttcctcgactgtccatcgaccatttggccgccatctatgctcgcggcaatgtgatcatcatgaacagcgatcgcgacagtgttttccaccgcgacgacttcgtcaaaatcatttctgcgttggtccgttccggcggcgcagagaacttctacagcgtcgtttacccgatttccactccattgtatgaccagctcaattcacgcgctctgaaggtcgcacaagcgcttaaattgaatcctgtggccatgtaccccgcttactacgaaagtgaggaagatgctgacctgaaagacgtcgcgcacctcgtcatcaacaacatcaaactcgatcaggattatcgcttccgcttcccgtatcagcgcgacaacggcattcaggatcgcaagcatttactgacccggctgaaagagttttccatccgcatgggcgtaccggttcatcctgatatggtcacggtcaatcaggacaaaatgacggaggcgtgtgcgtggcggtggaagccaatgccggtcacgctgccaaagctggcagacaacgaggcgaaagcgctgacggagctggccatcgccggcttgcgtaagcgtttaacgacaatccagtttggatacaagccggatacaaaagacttcggcatatacaccgctcgcctgaagtacgaactggaaacgcttatcaagttgggtttctgcggttacttcctgatggtggagaatctgatcagctgggcgcggagtaacaacattccgaccggcccaggtcgtggttctgcggcgggttcgttggtggcgtgggccattggcattactaacatcgatccgattcgccacggcttgctgtttgagcgattcatcaacccggagcgtctcgacttaccggacgtcgatgccgacttcagtcaggtccatcgcccacgagttctggagtacctggaatcccattacggcgaagagtatgtggccggcatccccaacttcacttatctggggatggcgtcggcattgcgcgatacaggtcgtatctttggcgtcagcgcggatgatttggcggtatcgaagcaactcaagccgtttgacgacgaaggtctgtctctggaagaagccagggaagagttgtcggcgctcgacaagtatgcaaaagcgaatccgaaggcgttcgagtccgcaaccaaaattcagtcattgatgcgtgggtttggtaaacacgcagcgggtgtgatcgtatctggcgttccactgacagaaaggactcccgtcgaaagacgtggtgattcgcgctgtatcgcgtttgacaagcgttactgcgaggcaatgggtcttatcaagctggacgtgctgggactggctacgctcgatttgctggctttatcacgccagtacgtcaaagagcagaccggtctggaagtggacctcgatgcaatcccactggacgacaagaaggtgcttggggagatggcggaaggtcacaccattggaatcttccagttggacggcggaaccatgcgcaaattgctgaagaacattggcggcggcatcgagccattaaccttcgaatctaccgtcgcagtaaccgcactccatcgacctggcccaatgcaatctggcatggaagacacttacgttaaggtggcgatcggttatcaaaacccagagtcgattcaccccatgattgaccacgttacggaaagcacaaacggcgtactggtttaccaagagcagatcatgaagtccgcgcagattctggccggattcacgttcgcagaggcggacaacatcaggaaagcgattggcaaaaaggacgtcgagaagatgcacaaaatcggtggcgagttcgtgcaacgcgcgactgaagggtggattgaggtcgagatggacgacggatcggttgtccaggttcagaagacgtcgatgcatatgtgttccgacggcaagcgtcggaccatttaccaggccattgacgaagatgccgacattatgatgttggacgccgcgcattaa

SEQ ID NO: 241021 - DNA, 1170 bp, Klebsiella pneumoniae
atgaaagtcgcaaaaatagtgtccgaaagaccgggcttatcagaagagaaggccaaagagatctgggacgcattcgagaagttcggcggctatgggtttaacaaatcccactccgccgcctatgccaccatctcctaccaaagcatgtacatgaaggtacaccatccggcagagttctttgcggccgcgctatccattctcggcgaagacaaacaccaggcgatagtgaaggacgcggcaacttatggcgttcgcgtcatgccgccggacgtcaacatttcaagcggacgcatcgaaatcggaaagctgccttctggccagatagcgttattcgcccccttctcttccgttaaaggttgctcggacaacggatgcgctgccatcgtgaatgcgcggcagaaggtcggtgggaagttcgaaacctatgagcagtttgagatggccgtggagaaacgagcctgtaatgctcgcatacgtgaaggactgatgcgcgtcggggcgttcgcttccattcagccaggcacatcgccggcagacgctgaagaccgcaagaaggatcaggcggagttgatgggtagtctctttaccggcaccgtgaagatcggtcgcgtgttcgagtcgacgccacggaagacggcggagctgtccgttctgatggaagagatgcgcagcaagctgggcctgggcgagagtatggtgacgccatacatcggcctgaagccaaaggtcatgatcatcctgaacaacgccaatggcagtgatgccaagagcggcatattcatgaataaggggtatgaggacttcaaggggcgcattgccaacactctgggcctccgtatgggcgatctttacgttactggcgtcatgaagcgagcaaaggggaaggatgagcagtacaccaaggatgaagaggaagtgtttatcgaaggtatgcgtcgtgaaatcgagatcatgaacccaacatacatccttgcgtgtggagcttacgcttcaaggctgtttaacgagaaggataagatgggtgatttgactggtcgcaaggagtatttcgcggacaaagacttcaccgtcttccatgctttcacaccgggcatccttcacttccgcccggaggaaggtgaaaagttggatgaaattttgaaagatctctgcgacgcgattgaaggctaa

SEQ ID NO: 241022 - DNA, 306 bp, Klebsiella pneumoniae
atgaaaaaaactctggtcggtttattgcttctggttccagcggccgcgttcgctgaatgcaccaccgtgggcgaatacacatcttgcatgtacatcgacggcaaccatgttcgccaggtgacaaccggacctggcggccagcgtatcgagcaaaatacgcgactcaattctgacggcagcatcgacggctacacgacgggcgacttgggtgatcacaccacctctatccgccggcttcctgatggcaacaccatgatcaagactgacggcaaaacgcagatctgcaacgagcttaaatgctactga

SEQ ID NO: 241023 - DNA, 435 bp, Klebsiella pneumoniae
atgaacaaatctctcattgaacaaatcctggaagacctcaacttcgacaaaaacaatctcgatgaggtctggcgcgaacaaccacgccttctgatgcagtacggatacaagttggccgaagcagagcgatcgatggccgacgccaagcgaaagctggacgtcacggaggcgagaatctatcgagaagctcgttcaaagctgggttttgatggcgtcaggatcagcgaaagcacactggactctcgcgtaaaaagcgacccctcctacgtcaccgctcgcgctctctatgacgacagcaagtatcaggtggatgtttataaacaggctgtgtcagcgttttctcaccgcagagacatgatcgtccaggcgtcaaaggcattcatcatcgaggtggaaaggttgggcgatgggcgtttttctggcccccgcagttaa

SEQ ID NO: 241024 - DNA, 963 bp, Klebsiella pneumoniae
atgtcagttcaagcactgttacgccgcagtaagaaggctctcgaagaggcacgtcctactcgtgggcaggatttggagaagctgaaagcaggtgaaaactatctgcgaatcttcccgaacaaagcggacccggagaacggcgacttcttccacccatacggtttgcactatgccaagcaaactggaccggatggcaaaattcaatattcggcggtcctgtgtcagcaccatacccacaacaaacattgcgccatctgcgacatgattgaagaggcaaaaatctaccatcgcggcaacgaagcgatgaaagatatgatcaacgatgtgcgagccggtttgcgctatgtcgttatgggtatgctgtcgaacaatgaaaacttctctggctgcgagggtccgaaacttatcgacctgcctcagacggtattggatgacatcattgctctgatggaacaggactacgaagacgaagtcggtgagccactgagtcgtgagcgtggttttgcatatctgatcaagcgtaccggcaccggtcgcgacaccaagtatgaaattacgcctaaacgtaaactgaagtctccgatcacccaggctcagcttgacgcacagcctaactatctggatttcgtgaaccagaacgattcagcgaaaattccgctgactacccgcatggtatccgcaactctgggtatcgctccaccagcaggtttagcggacagtgccggcgctctgccaggtatgtccgttggcgcactgccgggcatgtccgaaggctcaacctatcttccgaaagaagagccggttggcaaaggcattgataacgaaatcctgaacgaagagctggaacgcgctgaagaggcggtctatgaagaagtgaaggagtcgaaggcagctgaagcagctccggcgcaggaagacagtttcgaagatgagttagcggcactcgctgcgctcggaatgtaa

SEQ ID NO: 241025 - DNA, 957 bp, Klebsiella pneumoniae
atgaattatctcttcgtcgacggcaatgggttgggttactaccaccatgagtctgacaagctgagtaacggtgacatggaagttcaggccatctttggcttcctgaaaaacgttcgtcgctatgcgtccatcctgagagcgcgaccggtcatcctgtgggatggtttctcagataagcgccgcgaattttacccggagtacaaatccaatcgcgatgaagacgcgaaaatgaaggcgatgaaggaaggtttcgccaagcagaagcctttcattaaagacattatgcgtgtggccggcgtcaatcaaattaccgccgtggatggcgaggcagacgacctggctggcatgttggtggccaaataccgccacgacgacaacgtcgaaaacgtctatctgcttaccggcgactctgactggaagcagctggttaacgagaagacgacgtgggtcgccttacgtgaagatgccaagcataagcgcatcaacatggaaatgttcgcagagctgaccggctacccaacgccaaaagcgtttcttgaaggtaaagcgctgcaaggtgataagtcggacaacattcagcaggtgggcggcattggcgagaaaggtgcgcaggatctgcttcacgagtatggctcaatcgtctctctggttcggggcatcaacgatggctcaatcgtaattgactccgggcgcaataaaaccgccgtcaacaagttggctcgcaacgagttcaatgagaagacaggctgcaagatgctggatgcttttctgcgaaacatcaaactgatgaacctcatccagacgcaatttgccccaaccaagctggatatcgttcgcggcgagcaggactttaaggggctggaagagttgtgtaatcggctgaatttccggtccatcgtagaggactttgaggtgtttgtggtgccatttgggcgctactgcggggtttcctcatga

SEQ ID NO: 241026 - DNA, 288 bp, Klebsiella pneumoniae
atgattacgtccattgtacgtttgggagagacaaccacggccaacaagctggctatggaaatggcgcaccagtttggcacgtactcgatcaacgggttcaaaagcattctcgaaaccaacgggttgaagctgacttaccgcgaaaaattgatggttgtcgatcatttgatgaccgcattaacccgaatcacaaaactattttcatctggcggtctgtcattcgacgcagagaaggcgaagacatacatcgtccatcaattaaacacaggggtagaacaaaatggctaa

SEQ ID NO: 241027 - DNA, 1068 bp, Klebsiella pneumoniae
atggctaaaagtccattggcgttggcgttaggcaagaagctgggtaaaaacgacgaaatccagaaggttgagcagtggattgataccggatacccgccgctgaatgaagtggtatcaggggatctggaaggcggtttcccatgcgggcgcatcgttgaggtgttcggtcctccgtcggctggtaagacgttccttgccaccaaagcgatgattgccgctcagaaagcgggtggcgtctcaatgttcctcgaccacgagaacagcttcgatgttggtatggctgtcggtatgggtctgaatgcggatgaagacgaaggtcagtggatctacaaacagccagacactttcgaagacgcgatcgacttaacaggccagctcctttcagcgatccgtaaaggagagttgatcccagctgacgcgccaatcgtcatcgtttacgactcgcttgcctcgatggttccgcgccagaagttcgagaagttcgagaagatggcggacggcacggccaaagagaaagacgagctgaatatgaacgacaacacggcgctggcgcgagcgacctcagctaacctgccgacgctggctaagtgggcgcagaagtataacgcctgtctcatcttcctgaaccaagttcgtaccaaaatgggcgtaatgttcggcgatccgaccacgtcaccgggtggcgactctccgaagttctacgcttccgtccgaatcaagttgggcggtggccagctgaaagacggtggtgatcgcgttggtcagcgtgttaccgccgaagccgtgaagaacaaggtcgcgccgccattcggcaaatgtgagtggaacttctacttcgatccgtcccgcagcctggacgttatggagtcgatggtggaatacatgctggagaatggctatctgcctaagagcgcgaccgggcgcatcgagatcgacggcaagaagtacaccaagtcccagattgtcgatttgtaccgtaagcaggatttgtcgaccgtcgtgaaagcgatcaagcgtattcaggcgagtcgagtgaaggaagaagtcgaagaggctgaggaagcgtag

SEQ ID NO: 241028 - DNA, 192 bp, Klebsiella pneumoniae
atgaaaacgaatacttatctacgcctatgcgtcttcgccattgttgggtcgatgatggtcggagtcctaatcccctggctggtgtcgcaaaaggacgattttgctgtagcagccggcgtctgtttattgctcaccgttccgtgggcctcatacaaatttttcaaagcgttattcaaagagggtgaagagtga

SEQ ID NO: 241029 - DNA, 828 bp, Klebsiella pneumoniae
gtgaaaaagaaaattatcgcactggctgtcgttctgtcggcatttgtaatgaccggttgtgacaacgtagcgccaggtgagcgcggcattttggtcaacaagctggggtctgataaaggtgtaggggaagtggttggcgtaggtcgctactggaccggcatgaacaccacgctctacacgttcccaacgttcaagcagatgaagacttatgacgagcctttcctgttccagatgagcgacggtacgacgatcggctaccacatcggcatgagctatctggttgagccggataaagtcgccactattttccagacgtatcgcaagggcgttgacgacattaccgacactgatatgcgtcagaagatcgcagactcgcttaaccgtctggcatctcgcatgaccacggataagttcatcgacggcggcaagtctgaaatgctcgatgaagcgctttccgacattaaagagcagatggcccccgtcggtattcaggttctcagtctctcctatcagggtcgcccagagtacccggccaacgtcattgccagcattaacgccaaagtgactgccaaccagaccacccttcagcgtgagcaggaagttaagcagcgcgaagcagaagcaaacatggctcgcgcacaagctgcgggtgaagcagacgccaagctgacgctggcgaaagctgaagcggactctatcactattcgtggtaaggcgctgcgcgaaaacccggagatcatgaatctcgaagccatcaacaaatggaacggaaccctgcctcagtacatgacgtcgggcactcagacgccgttcattgccgtcaagtaa

SEQ ID NO: 241030 - DNA, 177 bp, Klebsiella pneumoniae
atgcgtggtcgactggtgtatgtgcctggcggcaatctgaatgacaaaaggtttgtcagcacactgagaaagcaaaagtcgtcacacgggcctcttaacttgatgaaaacgggccagctttactacaacgctggcgacaggaaaccagagaacgggcaaatgctggtggacgtatga

SEQ ID NO: 241031 - DNA, 156 bp, Klebsiella pneumoniae
atgattgattgcaaaaactgcggtgaacaaatggatggcaacggctacagtcgcgtcattcattgcccaaacgccaatgttgaaaaatatgattaccacgaaccggacgcggagccggttttttgtgacgaagaggtagatgatggccagaaataa

SEQ ID NO: 241032 - DNA, 915 bp, Klebsiella pneumoniae
atggccagaaataaacagaagccaaaagtagaaaaaggtaaaagcatattcggcaaggacgtcgagactcatccagcatatggattggtccgtgtcggtcgtgtcagtacgtcaggcgctaacctgttcgattccgacatcgaccaccgagagttcattgagttaacgttccactcagccgtcatcgagcgcgacggatacagcaatcacatttccagaggcgaagaccgcaagcctcttctgacagtccaattaagcgccgcgcaatgggcagcgatggtttccagcttcggcattggcgacggcgttccgtgtacgctatcgacgatccgcgacggcaaggtcgttgccctgcctgaaattgataaatcggaaaccatgcacgagcgcttcagtaatcaaatcgagatgcgggttcgcaaggacgtcgagaagatttcggcaattgtcgatcaactcggttcactaattgccagcggaaaaattggcaagcgtgatttgcgcgacctttacgattcactctccagtgcggtcaacaacctgccaggcaacatggcattcggcacagagctaacccaagaagcggtcgacaaaatcgtggcgtccgggaaagcggaagtcgaggcgtacattgccggcgccgcgatgcgtctgggtcttgagcaaatgaccacatccggccaagaaatagggatcaacgaaaagattttgcagatgctggagagcaatgatggcgaaagccgctcacgcgaagacggtcatgttttgtatgaaaccggtgacgctgatgcgcccgactgcataaaggatcgcaatggcgaggtggtattgagtcagtgtcgtctttgtgggaaaggtgaagtccagattgacggcagcaagtgtcaaggcgcaaggagtaagccaaatgcgtaa

SEQ ID NO: 241033 - DNA, 291 bp, Klebsiella pneumoniae
atgactaagcctttgcatgttttgttttgtgagatgtacgagcaagagatcgaggcgaccaagttgcctgagcaggtcttgctgcttaaatatctgaaggaagccaaagacgatctgccggttgagacggatgctggttggttcttttccgcctggcgaaaagtcgacgtcatttactcaagatgtttaggcagcaaggacatgattgtctggaacctctgtcactttgatgatgccattcatcgcgtggctgaaaaattcccttggccgaaatcggatgagaagcaatga

SEQ ID NO: 241034 - DNA, 687 bp, Klebsiella pneumoniae
atgaacagcagtaagcactttgacagccagattcacgaactcggtcactttgcgaatgattgcagcaatgacgatatcaaaaacgagcctatgttcttcaactgcgaccttgatttcgcatgggataacggcggcaacataacacgcagcttcattagcaatctgccttatgactggcaagacgaaggcatcgtatttgattctcgcgttcacatgcttatgccaggctggtatcccgctataccaggcttccaccatgacgacgtgccgcgcccggacattccggtgggtcagcacttcatcaccgctggtcaaccggactacgacaatccgcgctacctttccgagcacatcctcggtttggttaacgcagacatctgccctaccaacttcgccattggaaagtgcgagatgccgcagatcccagacggcgagttaatttaccggcgctggcatagtgaagtggagcgactgatagagagtggcgaaatggagcgtgtggccatcagggacaggactttgactgcattcgactggcagactttccattcaggagaaaaagccatacagcatggctggcgctggtttgggcgtgtgtcccgcaatacggacagagtgaagaagataaccaacgagatccgcgtcaatgcgcaggtctatcttgagttccccatgcagggttggtga

SEQ ID NO: 241035 - DNA, 402 bp, Klebsiella pneumoniae
atgaaagacgtaatccccgaagagttccttgagaaggcagttggtgcagtggagaagtccagatattgggagctcctcgactgccctatcgtattaagtctggcagagacgcaagccagactcgcgggagagcgcatccctcacgccatcaggacttcagccagacgtatgcttacgcgcgttaaggaagcggaggcaagacgtctcctgatgggtgtagccaatgcgatggacccagctgagaaaatgaaggagttcgaaaattaccgcgcgagaatggtctggctggtggcctcggaacttctcgaagcggcccgtattggtagcgttgcgcagtaccggaagcaacgacaggagatagcgacccgctctaaagccgtcgccagcgccttggccatttaa

SEQ ID NO: 241036 - DNA, 186 bp, Klebsiella pneumoniae
atgaaaacaatattagtgaccgtcgaaatcgacgtaccggaccacgcctcacgcaaagatattgccgacttcgttgatgtcgaatacggccaagttggcggcatgaagcttgataatccgtgccgtggcgatgcgacagagatcgtgagtgcaacgtgggaaccggccgagaaagagagaggttga

SEQ ID NO: 241037 - DNA, 306 bp, Klebsiella pneumoniae
atgaccagcaaattaaccaaaaaagagcaagcctgggttgatgagataaacgcggggctggcccgttgtccatccccgaagaaaatcggcttttgcactatcggcgatccagtgattggcctgtacgacctccgtcacgatgaagaaatctcgaacaccaacgatgatttaatccgcatagtcgctatgaaagatcacctctttcgcgagctcgtcaacgaattgcgcgatgtgtctctcgaataccattcaacgcagcagctgcgggagcgcattgcctcaacgctacggagatatagtctgtag

SEQ ID NO: 241038 - DNA, 300 bp, Klebsiella pneumoniae
atgaaaggtttggttcggatttacaactccatcgacagagagattctcccctacttcttggtggagcttggcgggaccaccgcgccagctctcacggttgacgaaaagtcgctcgtgttggagaagatggaagcgagaattgctgaaattatccccgaacattactgcgatggcatgaagcctgatggtgacggtgttttttggattaatggcggttgtctgtatgtcgaggatgcggaagtgatcagcgacagcgatgccacccatcttgaaaggctattgtgtctttctactttttaa

SEQ ID NO: 241039 - DNA, 258 bp, Klebsiella pneumoniae
atgaatatcctgaagattgaaaatggtgagttggcacaagcgggtcacgcgatgggcctggctatactgacctcagactcaactcagttttatgcggtgataggtgatcgaatcatcaactccccaatcctaatggatcacaagggtcagaaggccggtcagaaagctggcgccgcattcttcatgcgagacggcagctttggcgtgatgtatgacgactttgggtacgtgtttgataactgcaagaaggtggcgtga

SEQ ID NO: 241040 - DNA, 213 bp, Klebsiella pneumoniae
atggatatcggcaaaagcattgagatggaaaagataagaccgtactggcgagccaaaggctttacgcgcccggagaacttctccaccacgctggagcgggacgactgccagatcgtgtatcgataccgctcatggcaaatgattgagcatggagagaagaaagccaaggtgaagtcacacagtctctacaatctcttgacctccatcacctaa

SEQ ID NO: 241041 - DNA, 1092 bp, Klebsiella pneumoniae
atggcagaaagaaaaaaaatagcaaagaaaaacatcaagatagatgacgatctcatcgaagagttagaaattgttcaaaatcaatacacagggaacctaaagcccaacgaccagaatacagtgcaacccattgcgcttatgcgtctcggtcttttcgtgccgacactgaagtcgacaaacaaccgcaacaacaaaaaaggttcagtcatcgacgcgactgaagagctcattcagctcgaaacggccaaatcagagggcttcactgacataaagataacaggaagccgcctggatatggactcagacttcaagacgtgggtcggcattgttcgagggttggctgatttcggcgacgagtctggccgcgtggagatgagtatcacgcagttcgccaaatactgcgggtatccctcgtcaagattgagaaaaacgctgcgagaaaaggtgctaaacagcctcagaaaaattatgtccgccaccgtctcattccagaaaactctggagacgaagaacgaagacggctcaaacaaaatcgtcatgaagatggttcatctgctgaacaacgtcgactacaacgaagagactggcattatttcgtttgaagccgaaaagcgtctcaaagagctgtaccaattcgaccataaggttctgttgcagctgaaagtcattcagaagctgccccgtaaagagacagcacaagcgctgtacacgtttattgagagcttgccagccaaccccatacccatatccctggcgcgtctcagagcgcgtctgaacttcggcaacaagagcatctactcacagaatcagcttgtcaggaagggaatgaagacgctggaggaactcggctacctgtcctactcggaaataaagaaaaaccggtcagtgtttttcagcatccatcaccgcaatccgaagctgaagaccgtcagtgaagtggatgctataccgcctgagatcaaaaagcctacagatcaaacaagtctggcaaaagaaaggcttagagcgcgtattgctgagctggcgagtgaccccaccgaagaaaacttaaagatgatagatgctatcgccgccacaatcagatcgctgtag

SEQ ID NO: 241042 - DNA, 627 bp, Klebsiella pneumoniae
atgggcgatttgaagcacctcaagtatgtgaagcgtctggaggatggctctttctccgttataccgacaaagcaggtcgaaacccaaaaggatttgtgcagtctgtgtggcattgagtctgtatgccgcattcgcattgctcgcgagcgtatcaagcaagctggcgcggaagtatcaatgtcatcgtgcaaacgctacgtccctatcctgacgttccgcaaaccgcacgttggactgaatctgaccttcttcaacacgatccgcgccgggactacatgggcgtttcgtctgaataagggcagcatcgtatgcctggcagacgcagagacaggagagcctatcaggttcatgagagtggaaagcgttcgcaccggaggcgtagacagtcttctcgacaaacacgctcgattcaaccatcttgccgtaggtggcaaaggtgcggagttcacgaggaactttgtcaagaaagcctatggccacttcctgaaggaagatgggatgctgacggcgatatacctgcgcaacatcaaatctgacttcgactaccagtaccacgacgcgaccgacgctctgtatatcgacggaaagccagcgcctgataacgtcatttccatcagtagatcctga

SEQ ID NO: 241043 - DNA, 1086 bp, Klebsiella pneumoniae
atgagcaatcctttcggactgatctctgatcagcactacaacaactggagccagttcggtcgaaccatcggcctcgactacaactcgcggctgaaaatccagcttgaaacaacgcttgaagcagcaaaagcaatgaaggctgcgggttgcgaatatctgttttgcgcaggagatactttccacgttcgcggaacactccttccctctgtcctgaactacgtgaccgaaacgtacaaacagatcatcaacgagattgggctgaaggtcgtcatgctggccggcaaccacgatttagagacgaatgcatcagtctactcgtcaaatgcatcaagcagtctggcaggcattggcgttcacgtcgtctgtggcgctccatacagcgttaaggtgggcgatgtgaccattcatctggtcagctggcgcgaaagctacacagagcttctggtggacctgaaacaagttcgcgctgaagcgggtgatggcattcacgatctgattatccacgcggggattaacaacgcgatcccaaccatgccaaacaccggcatcgatgccgaagatctgaaagcgcttggattccgcaacgtctacgccggccactaccacaaccaccgcgaaattctgccaggcgttatctctatcggcgcactgaaccaccagcaatggtctgacgtgggaagcatcgccggctacatgattgtgaatgcagacgggacgtttaagcagtacgaaacatcctcgccgaaattcatcgcgctggaaggcgagattagcgaagaggatctcaaaggcaactacgtccgctatcgcgcagaagtggaatcggacgaagaggcagcggaaattcgctcagagctcgatgcgattggcgcggctggtgtggtcactgcttttgtccgcaaacgtgcgctggcggtgtctgggccaagtacggcggatacgcggcgcatagacagtctgggtgagtccatcagctcatactgcaaggcgcagcatgaaaagaccaaagacttcgatctgaccgcgctggactctctgtgcagagaaatcctgatggaagccgaaagcgccggaacatcggattga

SEQ ID NO: 241044 - DNA, 1917 bp, Klebsiella pneumoniae
atgaaatttctacagcttaaaatcgaaaactttatggtcatcggggaagcgactgtcgatctggatgctcgcggactcctgctgatccagggcatcaatagcgcggactccagtgccgccagcaatggcgcgggtaaatccacgctgatgaacgcgctgatgtggtgcctgtatggcgaaacagccacgggctacaaaagcgatgacgtgctttccagccacaaccccaaaaactgtcgcgtaacggtgatgattgaggatgaaggccagaagtacgccattatccgccaccgcaaccacaaagagtttaagaaccgcttgctggtgcgcagcgaggatggcgatttaaccaagggcaaagatacgttaacccagcaactggttgagcgtcttatcggttcgtcaaaagacgtcttcatggcgtccatttacgccagtcaggaggcgatgccagatctgcctggcatgagcgacaagaacctgaaggagatcgtcgaggaagcggccggggtcactcgtttaaccaaagcgtatgcggtggcgcgtgagcgagccaacaacgcagcgagccaggtcaatatcatccagacgaagattgacgccaagctgtcggtcatcgataccacggaagagacgataggtcgtttgcgtgagtcgtctgatcggtgggtggagacgacgaaggaatcggccgatcgcgcaaggatactcaaaaataatgccgaagttgcgctgaccgagcatcaaatgtcacacagtgacgacgatatcgaaatcgaacgcattaagcgccgcattcaggaagaacaggcgaagatgtccggccgcgcggaacacgatgccaaggtgtcgaaagccaacaccattgtcgcgacgatgagggctgacatccgtagcctggtggccgagaaagaccgcaaggttaagcagatccagcgtcaccagaaggacgcggaggttgtcgactctaaaatcggatcgccatgtacgacgtgcggtaaaccatattgcgaagaagacttgggagcagtccgcgccagccataaggcgttggccagacaggttctcgaagaagcgaaagatgtggccgccaaacacaaaacgctggctgaaaatcttgaaaaagctgaagccatttacgatacgttggttgccgccactccagacgtttcggcgatcactgcaaccatatccagcctcaatactcagctgaccaaactgaatgcgagcaaatctgaagagaacatgctggcgtccagggtgaagcaagccgacgatgcgctgaagcagatcatggaagcgaagaacccacatacggcgaacatcacacagctggaaaagacgctctcagagacgcgcaaaacgttcaaagagctgaaggagtctatgggtgaggccaaagcacgccatgagctgctggaacgcgccaaagcggtttacgcaccatccggcgtccgctcacacatcctcgcgtcgattacgccgttcctgaatgccaaaacgtcggaatatctgtccaccctttccgacggaaacatcacggccgaatggtcgacgatggaggaaacgaagaagggcgaagttcgtgatcgcttcaacatcgcggtggagaagactggcttcagtcgagacttccgtggtctgtctggcggcgagaagcgcaaggtccgtatcgcttgtgcgctggcgcttcaggatctggtggccaaccgtgcgagcaaaaacatcgagctgttcatcggcgatgaaatagacgatgcgctggacgcggcaggacttgagcgtctgatgtccattctggagatgaaggctcgtgagcgcgggacggtgatgatcatttcgcacaaagaaatgaagtcgtggttccgcgaaaccatcactctggaagtgaaggacgggcgcagctatgtcctgtaa

SEQ ID NO: 241045 - DNA, 693 bp, Klebsiella pneumoniae
atgtcctgtaagttaacaccggcacagtttgtccaggcggtcagtttgaccgcttcactgattaagctgattagcgcatcgaaggaaaccatcattgctcaccggtcagttgcgattgagatggacatttttaatgtaccgcttgacgaaaatgacagagtaaaggaggcgatccatagaatggcgctggagctggccggtcttacacgatatgagctagggccgctcgttcctatcagtcatggcatggcggtgtcggatatgtctggcagcatcgagaatgacgtcatgatccagaacttctttgccgggaagatggtcgagataaacgctatatgctcaggcaacgatagaccagctttcagtgggtccgcgcatttaaacaattctcctgaatgctacggctgtgtggtggcgatgtttgacgaaagtaatcaatgtgtattctctgctaaaggcgaagttatgaggcttattggccagcccgaaattatcgcctgtggtcttgcggaatctcagacccggatgaacgctttctcggattttgtgaatgagtacgtgaagcgcggccaagtggctggtctggtggatcttggtcagaccgagccaatgaaaaacagatcggaaatagaaattgaacctgtacgccagaagacggcgcaggatatgtcacacctttggggaatgttttaa

SEQ ID NO: 241046 - DNA, 573 bp, Klebsiella pneumoniae
atgggaaagaaaatcaggatcgccggacttgatccgtcaatgtcgaactttggtatttcagtcggtacgctcgacattgagaccaacaaggtggatatcgagaagttttacctggtggaaacaagcgctggcgggagcaagaaacaggttcgcgtaaacagtgacgatctgcgtcgagccaatgaaatctggcgtactttgaagccagtcattgacgatgcgcagcttatctttgccgagctgccagtgggcagtcagtcatcaagagctcagacgtcatacggcatttgccttggcgtactggcttgcatcaacaagccgctcattcagttaaccccaacggagatcaaacagtatgtcggcggaaagaaagacacttcaaaggcagaaatcatcgagtgggctgtatctcagcaaccaaatgctccttggcttaagaaaaaaactaaaggtgtcgaaaccctcgtcaacaagaacgaacaccttgccgactccgttgccgcaatctacacaggactgacgacggatcagtatcagaacgcggccaacatgatgcggtctttcgcttcataa

SEQ ID NO: 241047 - DNA, 2325 bp, Klebsiella pneumoniae
atgatatacgtcatcaagcgagacggcagcaaagagcctctctccgaagagaagtacaatcgagtgctgatgtggggtgtcgaaggcattgataatgtcagcgcatccagcatagcatttgccgcagcaaacagcatcgtcgacaacgtcactacctccgaattacatgagtcgctggttaaagcagccgccgacttaattagcgtcaaaacccccaactacagccaggtcgcagcacgtcttaacatgtttaagatccgcaaagacgcctttgaccagtacgaatacccggacttctacgagcacattctgaagaacatcggccgtcgtgtttacgacaacgaaatcctgcacaaatacacctgcgaagagattgatgagctgggctcttacatcgacccggagcgtgacgacaaattcggctacgccgcgaccgtccagctgcgtcagaagtatctggttcagaaccgcgttgatggcagcgtgtatgaggcgccgcagcacatctacatgctggtcggcatgtgtctgtatcaggattgggaaaatggcgcggccggcaagtctcgtctggaaatggtgaaagggttctatgatgcgaccagtacgttcaagctgtctctacctactccgatcatggctggtgttcgcacacctactcgtcagttctccagttgcgttctgattgaagcgggagacagtctcgactccattaacgctgcgaacaacgctatcgttaaatacgtttcccaacgcgcagggattggcattaactttggcgcgatccgtgcgctgggcagtccgattcgcaatggtgaagcgcagcatactggcgtgaccccgttcctcaagatgttccaggcggcagttaaatcctgttcccagggtggcgttcgcggtggcgcagcgacgggctattatccgttctggcattacgaagctgaaagtctgctggtcctgaagaacaaccgtggcattgagtcgaaccgcgttcgccatattgactacggtgtgcagctgaaccgtctgatgtatcagcgtctgatccgtcgcgagaatatctctctgttcagcccacatgacgtgcctggcttgctcgatgccttccatgcagatcaggatgagtttgagcgtctgtataccaaatacgaagccgacgaatccatccgcaagaaatctgtgccggcagtcgacctgttctcttctctgatgcaggaacgcgcttccaccggtcgtatttacatcgcccatgcggatcacatgaatacgcacggcgctttcgatccaaatatcgcaccggttaagcagtccaacttgtgcgctgaaattgctctgcccaccaagccaatgacggcgccgggtagcgacgatggcgagatcgctctgtgtacgctgtcggcgtttaaccttggcgctatcgagtctctggatgaactggaagagatcgccttctacggcgtgacggcgctcgattgtctgctggattatcaggactatccgatgagcgcggcagagcagtctgccaaggcccgtcgcagcttaggtattggcgtgaccaacttcgcttactggctggcgaagcatggggtgaattactccggcaaagcgggtaacaagctgacccacgaaacgtttgaagcggtccagtattacctgctgaaagcgtctaacaagctggcgaaagccaaaggcaaatgcgactggttcaacgaaactcgttacgccaatggcgagatgccaatcgacacataccgcagccagctggataagccgcagtatgaggccaactaccctctccttctggattgggaggcgctgcgcgtcgatatcgccgttcatggtctgcgtaactcgacgctgaccgcccagatgccgtgcgagacgtccagtcagatcaccaactccaccaatggcattgagccgccgcgcggcgcggtgtccatcaagtcgtccaaggacggcacgatccgaatggtcgttccagattacgagaacctgtccgccggctatgagttcctttgggatatgccgtccaacgaggggtatctgatcaaggtcggcattatgcagaaattcatcgaccagtccatttctgccaacaccaactacgacccgaaagcgttccctggcggcaaggttccgatgcagaccatgctgcgtgatctgatgctggcgtatgaccttggcgtcaaaacgctgtactaccacaacacccgcgacggcgccggtgaacgtgaagaagagaagattacgcaccaggcacatcttccgtcctcgactgagattgtcgaagaagaggaagagtgcgactcctgcaaaatctaa

SEQ ID NO: 241048 - DNA, 828 bp, Klebsiella pneumoniae
atgaaaaaggttcacgaaattatcgccagcgttgttgggaacaaaacgaagaaaagccaggcgctgacttcattctctgctgaaggttttaacgatttttcggcaattatcgatatggtccatgagtttcacaagctgttccagcacccgattatggcagcgccaacggcggagctgatggctttccgggcggagctgattgacgaagaggccggtgagcgtgaaggcttgaaagccattcgtgaaagaaacattgaccagactctggatgcggccggcgacacactgtacgtagccgctggtgcattcatctcaatcgctggcgccggtctgggattcgtcgactcgaaggagttcgatcgtgctcgtgaagaacacctccagtttatgatgaaaaatgtctctctccccaaacatcttggcatggcattccaggaagcggtcgatgtggccaagaagattgcctctctgggtgacgtgaagagtgttgacgaccttcgtcagccgttcatcgagctctaccgcgcatgtgattacatcatgtccatcgttcgtctgggcggagtcgacccggttgagctggttgaagagatccacaacagcaacatgagcaagctttgggcctatgacgatgcggttcgcaaggaccaaattgctcgctgcaaatacgatctgagtgacttaggcttccgcgtggcgccaggtcgtgatgctttcatcggctatcgtctgtctgatggcaagatcctgaaatgcccggactacaaaaaggcgaacttgggggagtttgttgagcagattgaagataaaggctactttgtggattga

SEQ ID NO: 241049 - DNA, 1071 bp, Klebsiella pneumoniae
atggacttcgcacaacttaatgacgctgcctacattggcgtaatcaactccgtactgagccggggcatcgacagccagaatcgcaccggcgtagaaacaaccgggacatgcttcatcctgtccgactatgcgctggaggccggcaacgtcccgctcatctccaccaaagccgtcaatctgaagccgctactcgttgagcttgaatggtatctgcgcggcgaaggcaatatctcattcctgaaagagcatggcgtgaaaatctgggacgcctgggccgacgctaatggcgatctcggacccgtctacggtcgccagtggcgtaagtgggaagacacccggatcgtgagcgccgcggactatgccgctaacaaagaaaagtatgacgaacgtggctaccacgttgaaggcgagcttgagaatcgcgtcgtcatctctcgtgaaatcgaccagctgcaacgtatcgttaattcgctgcgcgacaacccgacggaccgccgaatgcttatgtcagcgtggaacgtgggccagctggaagatatggcgctgcaaccctgccacttcgccttctccgtatggagtcgcgagcttgagtttgaagatcgtctccgcatggccaacgatatcgcggcggagcatgtgtttcgcggcatctcttccaagtacgttcagatgctggatgcggtcgccaaaaccggcgagatcaacgaggaaacgctgaacgagctggaaatcccaacccgcatgttgtgctcttccgttattcagcggtcggttgacgtgttcgtgggtatgccattcaacatcgcaggatacggcatcctgactcacttcctcgcgcacatcaccaaccacatgccttccatgatgtcgcattacggctgtgacgttcatatctacgcagatcatgcggaaggtctgaaggagtttgggcagcgcgaaatcccggtcgactcgaagcctatcgttctgttccccgacacctggcgcgagctgaacgacttccgttgggaagatgtcgtcattgacggctataagccgctcccctggatcaaggtgccggtggcggtatga

SEQ ID NO: 241050 - DNA, 423 bp, Klebsiella pneumoniae
atgagtgcaagacgaacacatatcctcgtagaacttgatggtgtgctggcagacggccagcaccgttcgaaagaggaaatcctggacaacgtcaaattcctgattcgcggcgacaaactgaatcacgtcgtctctcgaatgctgaagggttttgagcgtaccggagtggagattgtgatcgtcgcacccaacaggtcaaagctgtacgaaaaagaaaccaagatgtggctgaaggatgtcggtgtttcgtttgattatctgatgatggccggcgaccagccgttcttcacgagaatggtcgcctcagaaaaagacgaacttagcgaaagcgtcctgtttgccgtcatcggctcatccaatgccgtcctcagctacggcaaagagcatccccacaaaccaactctatgtgagatccgaaagtga

SEQ ID NO: 241051 - DNA, 495 bp, Klebsiella pneumoniae
gtgaaaatgattgccgccgttgggcgcgactttgagataggcaaaaacaatgcgctaccctggaaatgtccggccgacttgaccgtttttaaacaactgactctagaccatacggtcattatgggcgcgaataccgcaaaaagtctgggccgccctcttcccggccgccacaacattgtgctgacgcgcgatgccagttcgcacgttggcgatctggaaggattcgataccgtttcctcagctaaagaagccgctctcctgtttcctgatgcgtgggttatcggcggtgcgcaagtttatgaggcgatgcttccctacgtctctgaggtgtggctgtcccatatcagcgttgaaacgaaagccccggataccttcttccccgtcgacaagatgatcgggatgggatttaagttttcgcatatcagctgtgagcatattgctgaaaacaaagggttgtcgtttaaacaagttgtttacaaggttcctaaacaatga

SEQ ID NO: 241052 - DNA, 627 bp, Klebsiella pneumoniae
atgaaaataggaatttgtggcgcacagggtgtggggaaaaccacgctggctcgccagtacgcggaagagaacggcattcccctgcttgaaactaaggttggggattatctcagccatttaggtatcgagatcggcaaggagtacgatccgctgaagagaatgcaggtccagttggccattctcgactatctggatcgctgctactcgatggtcgacagcttcatcaccgacagaacccctctcgacgttgtcgcctactcccaggagatgatgtttaaccagaccgacccggacgttattgccgtcttcgaagagattcaaaaaagagcagttactctgtgcctccaatttgggctgattatccagattcgcccaggcatagagctcaagcctgaagactatgagcgtcggcaacgcgccgcactcgaccgcgtaagcgtcaaccgtatcgatacgctgatctccggcggcattgtcgacctgattcagacgcacaaagacaaagtcactgtcaaaacgatgccgaaaagcagactggccctgcgtgagcggatcgacattctcaaagacaccgtcgacgatcttgagaggcgacttattgccagcgccagcgccctcacccattaa

SEQ ID NO: 241053 - DNA, 411 bp, Klebsiella pneumoniae
atggaactcgatttcgacaacgaacttgatagaaaggtgagcgagactgtcgcccacgtcgccacgctggttgaagagcggattatgtcgcgggaaaacgcccaccacgccatcaatgcgctgtatatgggttgttatggtcttaatggccacgaagtctcagaattgctttcagacgctcttaacgagtttcgtgacggcgccccatccatgttcccgttcgtggttaaaaccccaaaaggtgatgtggtcgttgttcgcgtaaacaccgtccatccggccatgacgatgaccatgatcggaagcgaggtcaatacgaagtctttcacgtatgattcagcgaaagaggcgctgtcgggcgctgcgaaagttgtgacgactctgctgaagagcggaggtgtgaagtgttag

SEQ ID NO: 241054 - DNA, 570 bp, Klebsiella pneumoniae
gtgttagtcaccggcgtcgatatcgaaacaaccggtctggattttcgcagtgggcataagatcattgagattgccttctccatgtacgatctgaatacccagaagaaggtcgatgagctggcgatgcgctttaaccctcgccgaaacattgatgccaaggcccaggcggtccacaagatttctctcgatatgctggccggctgcccactgtttgaggatgagggtcaggagctgattgaccgcttcgttagcaaagcgggtttgctggtggcgcacaacggcgaatcgttcgatattccgttcatgaagtatgagctggcgcaatacggcatccgtatgccggacgttcctctgatcgacaccatgctcgacggtctatgggcatgtgaggacggtaagcgtccgcgcctggaagagctggcgttctcgttaggctttgtctatgaccacagtaagtcgcacggggcgctgtacgataccgatctcatgatgcaatgcttcttcagggcgcgtgagaagtataatctgttcccactgccggcctctctgtcggcggcagccgccgcgtaa

SEQ ID NO: 241055 - DNA, 798 bp, Klebsiella pneumoniae
atgactatgaccgcacatgtaaacgacgacaccaatgatctgctggctatgctgaacgagcttgagacgctgagcgacccgactccgtcttccgaagctaagccggccaccactgacctgcttgatggtctggacctggacctgtccaccgaggaactcctgtccgacatggacgccatctctgcggcggtagatgatgagctggttgctgaagccgcgctatctgaaattgagagcgccgaagtcatcgaagcgtcacctaagagtgattacgttgtcgatattgaagcggagaaagttaaggctgaagcagcagccgccaaggaaaagaagccgaaagtcagcaagccaaaggcactcagtgcgccgcgcgagaagaaggaacgcccggtcgccgctcgcaagcgatttgcagtcggcgaaatgacggatgagcagtatgagtctgtcgggatcttccgcgagacgttcgaagaggcgctgggggtcgcgccagtgaaagcggcagacaaaatcgtcaatcttctggcgtggtacttcaacgacgtgaccttgagcgtatacaccgagatttgcttgcgcaaaatctgcgagagcaaacaggcgaaagtggctgaaatgcgcctggccatgatgagcaatccatctaagccgtatccagtcagcacggcaggatcgcaggctggccagatgctggcggtattcccggcgctcaacattgcggaaaagcaggagcctggcgtactggtcctgaatgaagattctccgattgtcgctaaattcaaagcgacgatgtaa

SEQ ID NO: 241056 - DNA, 225 bp, Klebsiella pneumoniae
atgcacaatcacaccaacgtagtgccgcaagtggagacagactttatcaccacggcgcgtgacttgatgactgacaggagtaaggctgtgtcgcttttcacctggtccagcgaggcgatcgtcaacaacaaacattctgatgagctgatacagctgatcggttatctcatcaacgaaaacttcgcgctggacgttcagcttaagggccgcgcccaagcaaaataa

SEQ ID NO: 241057 - DNA, 501 bp, Klebsiella pneumoniae
atgttccgtttcctttcagaaatgcttctgccgaaagaagttatcgagtcagtcgtccaggtgaagactcgaaatcttgaatccagaattgccatccttttagaccgtattcgctccgctgagatgaagattgaaagccaagccgatgccatcgttgctctgaccaatgtgtctaaagggagaggccagccaaacaaggatcgtaatcgtaatggaaaactaccagagaaaaaggctcaaacctctagcttatctggtcgtcggcctattgtcggctccactagctctcgctccagtggccggtttgttacagagggtaacgccagcaccggaattgccgcgccagttcacgcgccagtcgttgaagagcgcagctacggcagccaccactcacacaacgacaccagccaccaccacagtcactcccaccacagtcacgacactggagggtatgactctggatgctccgattcgtcatcttcgtcgttctcctgcgattga

SEQ ID NO: 241058 - DNA, 156 bp, Klebsiella pneumoniae
atggttagactcgtcgtggccgcgctgctactgacgatggccgtgctggtggacttcaccagccggctcctgtccgtagtctctgatggcgtacttgtcttctcggcaattgtcatcatgatgcccatcctcaccaaagtcataacaagcaaataa

SEQ ID NO: 241059 - DNA, 423 bp, Klebsiella pneumoniae
atgtgccgtaaatgtgaagaaaacaaagccaaagttttagaacgcgctgatgagattgccgatttcgcagtcctctttgccggtgggactaagtccaatcaggatttcgcgcgtcttatcgttggctcagaagcgcttcacgaaggtgggtatctcagtccgtccaacttgctgcttctggtcgcccactactacagcaagctgaagacggtttccgctgacaaccaggcgctgcgtgaagcgatggatattctggctaacaatggtggtgatgactctattcaaaaagccattcagcctaaagatgctctgcacctggttgaatctatcgtcaatacgttcgaagccgctcaggttcgagctatggaaggggccaacgcccagatccgagagctgaagaaccgctacggattgaacaaatag

SEQ ID NO: 241060 - DNA, 381 bp, Klebsiella pneumoniae
atgcgcaaagttgaatgtccatactgcctcaagttagctgatctcgttaccggtgagcgaatttacccacatcgggcagacctacacagtcttcaattttacctttgctctgactgcaacgcctacgtcggatgtcataagagaagcaacggcgcaccattgggccgcctggccaatgcagagttaagagccgccaaaaacaaggctcacttcttttttgaccgtatctggaagctgcgacacaaatcccgttcggcggcatatcagtggctatccaaagagctgggtataccggctaaggattgtcatatcggcatgttcgatatcgtgctctgcaacaggactgctgcgatatgcagcaactacctttcgaacaagtaa

SEQ ID NO: 241061 - DNA, 189 bp, Klebsiella pneumoniae
atgattgagttaacgctgaaggagtacaacgcaatccacacagactatcggggcgtatggtcaacggagcgaaccgactggcccgattgggaaagcgtgagagagctatatatgggcaagcgaaccataatgaagcacggtagtctattgatcgaaggacttcattttcaaattaaagaagcgccttaa

SEQ ID NO: 241062 - DNA, 234 bp, Klebsiella pneumoniae
atgaccccttcaaacacatatctaacagtcagtctgacaggcacgaaggaagtcgccccaaatgacctggcggcactttatcgagactggacgaacaattatttgtccgtcgcccggttcgctgaggattacggcgtcagcgtcgcccaggcggaagttactattgcaatgggccgtgcggtccacgatgcccacgctaactggcttaaagagttcgttcggtccgcagactga

SEQ ID NO: 241063 - DNA, 351 bp, Klebsiella pneumoniae
atggaaatgagcgaacaaaagtcagtagagaagcgcaaggtgaaagctggctggtgggtggcgctgggactggctgtcgcactgccagttgtcgcggccaccaagttgagcatttttgttgtggcccctatcggcgccatgccggaaggcaagacggtgattatgtggaagtctggccaggtggatatgaacttcatcgagagcccagagggtatgtgtttatcaaaacgcagcttcagcgcctggtgcagcttaggtgcgatgaatgttgcggtggctggaaacaagatcctcatgcgtctgccgtatagcgcaaccctttacaacgcttcagtccgcaaccgtctctaa

SEQ ID NO: 241064 - DNA, 432 bp, Klebsiella pneumoniae
atgaaacgtatctccgccgcattactggccaccacacttctctcggcttgcgcagagcagcccgttcagtccgtagtaagtgcggcaacgcagaagacgaacgccatgcgatacccagtatgcgagttctattcgaaagacacaggcttcttgcacacagatgcctacgttatcgattatggtgattcgtttgccgtaatttacggagagggtgaggataaaatactgcgcagctttagaatacagtcggacgggataaattcggatctgactgatcgcaattctatcttctccagatatgtgtccgagtacgacagcaacataatgacctttgacatttacacagtaaaagataagcgcttcgttagcctggactgtgacagagacaaagcgtacccggtggcggcggaaccgttcaccccaatcaaataa

SEQ ID NO: 241065 - DNA, 213 bp, Klebsiella pneumoniae
atgagcgtccaaatgcctgatttattgaattactggaccgtcgattctgtcgccgagtgtatcgacggcgtgggccaggaactgtcccgtaagctgtggtcattcgtcacagcagatcattcgccgctgggcaaagtggcctgggaaacgtttaccgatgaagagaaggcggagctcgccgccgctatcgctaaagagttcccggaggaataa

SEQ ID NO: 241066 - DNA, 360 bp, Klebsiella pneumoniae
atggaacgcttccactacttcaccactcgcaacgctgccaaaaactcctttactgcgatcatcaccacgcctgtcgatggccagaacgagttttacgtcgcccacgacttgtctaacgtgctggcgatggtcaacacgtatggggaaggagatttcggaactatccgcgtacacaatgcggagaagctcgccctggtggactttgacaccagcatcgactatctggccaaagacgctgtgcgcatgtcaaaagagtacgacaatggcgcctctggtgacttcgctttcaagatgtcggatgacgctcgtttcgttgaagaagaagacgtgactttctacatggacctggatctcatctaa

SEQ ID NO: 241067 - DNA, 294 bp, Klebsiella pneumoniae
atggccaacatctcttttatgcgtaagctggaacaacacgctcgacacgatcgcgctggcttcaggatgaagggaaaggaagtcctgcttgccatgtcagtgaatggctgcgccatcgaaatgttccgtgaaacgctcgttgatcagcttggtgaatccagacaacgtctggttgtagagcaacgctcccgcatctctgacgtgggttacaagacagtgcaacgtctgttccccaatgaccaactgaccgcagcacacaacgctgtgaccgctttaatggcgacgcatcactag

SEQ ID NO: 241068 - DNA, 435 bp, Klebsiella pneumoniae
atgagcctaactcgtaacgatatggtctatgacctgtactacgcttcaaacaccgacccaatgaccgcagatcgcaccgccacgctgaccattcagctgcgcgacgaagcgggagccaccaaactgaccacccagctgtcccgtaccatcgtccgtgcgaccaaagcgaaagtctacgccgtagggcagcagatgatcgttgccggcgatgacgctctgctggtggccaccgaagcatacctgcgtaaagataccgccagtctgaccgaagatctgatttccaaggtgatggacttcatcgaggggaatatgggcgcaggaagcacctggatgggcgtctacgggatgaaaatcttctcaggcgaacaactttccgcactgctgccggccagcgtcctggataccgacggcactgcgaccaaagccaccgcttaa

SEQ ID NO: 241069 - DNA, 237 bp, Klebsiella pneumoniae
atgaacctggtttacataaaaacagacgcagatgcggaagctgtattccttaacggtcacatgatcgcttgttttgaaaacgatggttctggtgagcctatatcgtatatttcgacagaattgtccgtagcgctcaaggtgcagtgccaggacttccttattgcacaccctgatgaagaagacgaatggtcatgggatcagctttaccagaaatgcattgccgttggcgaaaagtga

SEQ ID NO: 241070 - DNA, 273 bp, Klebsiella pneumoniae
atgaatctcgtaaaccaaatcatctccccgctcgtcagcttcttcgaccttccagctgcggaacaagccgacttcgactttatcgaagaaagcgatcgctcgtcacaagccttcttcctgtatcaagacagccactggtatgtgggcgacttccttaaagactccgcaccggaaggatgggacgccgcgatgggaacttctgctttctccgccgtggttatcaagctcaccgatgacttcgaaggcgtccacgtcgcaaccgctcttaactga

SEQ ID NO: 241071 - DNA, 204 bp, Klebsiella pneumoniae
gtgagcgaaattaataatccagaaactgaggcgttctgtaaggagatcgccccacgatacaaagccgctcgttccgccgtctcagacgacatgagaacgcaggtaagaacagaacttgatacctgggccaacgaccgcaaactgaagcggtgggaagtgatcgtcgtcatcgaccgaatccaccaaatcgcctccacgctgtag

SEQ ID NO: 241072 - DNA, 195 bp, Klebsiella pneumoniae
atgactaaacaaaaatatctttcagaacgtcgcgccaaatataacgagtttaaaaaagagctttacgacgttttaaagaatgaagcggattcaatgaatttaactttctttgattgttgcgatgggtatctaactgagaagaaaaaacgctatatgacgttgtgcaacataatgggcaagctgataaacagctaa

SEQ ID NO: 241073 - DNA, 504 bp, Klebsiella pneumoniae
atgaactggtttaataatcacattgttggcgcgttgaatgatgcaaaactttctggcgtgttttattttgtcattaaagcgactaaacaagatccagaactgttattccgtgaagcaatggaaaactcctatagcttggaaaaattggtttatttagtttcatccatcgcaaaaggaaaatgccaatattcactggctgataaaagcgcttcgcgtgtcttccttatgactgatttgatcgcggatgaaatggaagttttcacgcttaaacatctgctgaatgaaatgaatgcagtcaaacagtctatcattgacgcggacgctaacagcactttgaagctggacgctggctatacgcaagttaaccagttgacttgcttgtttgaacgtctgggtttgattgagaaagtgaaaggaagcggagttgtcaaaaatggctccttacagtatcgctttattaaaaacgatttttacaattatctgaaagaatctttttcagcgtaa

SEQ ID NO: 241074 - DNA, 1134 bp, Klebsiella pneumoniae; identical to SEQ ID NO: 79287

SEQ ID NO: 241075 - DNA, 303 bp, Klebsiella pneumoniae; identical to SEQ ID NO: 79293

SEQ ID NO: 241076 - DNA, 1257 bp, Klebsiella pneumoniae; identical to SEQ ID NO: 79297

SEQ ID NO: 241077 - DNA, 228 bp, Klebsiella pneumoniae; identical to SEQ ID NO: 79298

SEQ ID NO: 241078 - DNA, 510 bp, Klebsiella pneumoniae; identical to SEQ ID NO: 79299

SEQ ID NO: 241079 - DNA, 576 bp, Klebsiella pneumoniae; identical to SEQ ID NO: 31276

SEQ ID NO: 241080 - DNA, 264 bp, Klebsiella pneumoniae; identical to SEQ ID NO: 13666

SEQ ID NO: 241081 - DNA, 1326 bp, Klebsiella pneumoniae; identical to SEQ ID NO: 13665

SEQ ID NO: 241082 - DNA, 945 bp, Klebsiella pneumoniae; identical to SEQ ID NO: 13664

SEQ ID NO: 241083 - DNA, 180 bp, Klebsiella pneumoniae; identical to SEQ ID NO: 79306

SEQ ID NO: 241084 - DNA, 597 bp, Klebsiella pneumoniae; identical to SEQ ID NO: 79269

SEQ ID NO: 241085 - DNA, 843 bp, Klebsiella pneumoniae; identical to SEQ ID NO: 13691

SEQ ID NO: 241086 - DNA, 825 bp, Klebsiella pneumoniae
atgatgacactgaccgttgagtattatttcacccatccccaggataagctcggcatgtacgccagtgaccctgaggataatagccaggagcatggccatgaatttgccgaactggtgatcgtcgaggaggggcatgggttacacgttattaatggtcgcccgctgtatatccaacagggagacgtattttacgtccagcctggcgatgtgcattattatgatgagctggggacgctgaagctgattaatgtcttaattaatccggcggtggcctttggctatttacagcagatggagggattgctgcagcaattatccgcgcagcgcgccgcctgctatggctggctggcgccggagactcgcagctattgccgggaactggtggaaaagatattttccccggcgctgagggcggcggataataccccgctacgggagtctctctttttccagctggtgaccaccattctcacagccgagtcggaagccgaatatagcagcactcgctataaactgcataaattactcacctggcttcaggagcactgtttcgaagaacataactggcagcagctggcggagcaatttcatctcaccacccgcaccgcgtttcgccatattaaagaggccaccggattaaccccggataattatctgaaacgtctgcggctggtctccgcgcgggtcaaattacgcgaaacggagatgaccattaccgaagtggcttatctgtgcggcttcgccaacagcaaccactttaccaccctgtataaaaaagtgtttggcctgacccccagcgccgatcgccgccgcccaccgggttaa

SEQ ID NO: 241087 - DNA, 507 bp, Klebsiella pneumoniae
atggtacatcgactgccagtgttcgtgatggttgaactgcagcgtccactcatccccttcatgcaccagacgatagctgccgtgcggcgtttgctgtgggatatcggccagcagtttgatcggcgcggtcagcgtctggccgccgaagccgacgtcggcgatccagcgctcccccgccacttccaccagcaacagacggtgagtacgcggcggcatctgcggcgggttggccagcaccacgcggcccagcaggctgcggacgttaaagcctatctcgcgcagcgcgcgctccagcaggccattctgttcaaaacaataccccccgcggcgggcggcgatcagcttctcttccagcgccccatcgtcaaggtggatttcacgcggcagcaggacgtcgaggttttcaaaggggatggcgctgttatgctgcagatgcagttcccgcagggtatcaatggaaacatcaggctcacccgtccagctcagacgggaaaaataggcgcgtaa

SEQ ID NO: 241088 - DNA, 366 bp, Klebsiella pneumoniae
ttgcgccagccacgccagaccgtcgaagttctgcaggataccgtgccggttgcggataggccggttgcccagcagaaagccgcagagatagacggcgaggataccgctgccgtcgagggaggtggtgacggcaaaaatcatgatcccgccgctcagcgccagcagcggatagaggccggcaggcagcacgatgcggttaatcatctgcagcagcaggtagccgccgccgaggccgatggcgatcccgaggccgaactgctgaatgatatgcacggcgaacatccagctgaggccggtctggtgctgctggatcatttcgatcagggtgatggtcaggaagaccgccatcgggtcgttactgcctga

SEQ ID NO: 241089 - DNA, 201 bp, Klebsiella pneumoniae
atggcgccgatcagcaggccttcgatcatatccagtttgaacagccaggccgccatcatcccggtcagcgccgaggtgatcagcaccccgaccgtcgccagcgacagtgctggccacagcgcgacgcgaaaggagctggcctgggtgcgcatcccgccgtccagcaggatcaccgccagcgccaggttactcaccatatag

SEQ ID NO: 241090 - DNA, 861 bp, Klebsiella pneumoniae
gtgcgcttccgccacttcttcgaagatctcggtcacgatacggcccagaccccagctcttctccactttgatgccgatagattcagcgatcgctttcgcggaatcaaagttatccagatccgccatctcggtttccggacggtatttcttgatcgcttcgcgcatggtcagtttttcaaacggcttgccgaagtcgaacacctggtcgccgtaaggcacttcggtattgccgaggatgtcctgcgccagggtgcggaacagagattcggtcagctcgatcagatctttataatccgcataggccatgtagagttccatcatggtgaactctgggttatgacgaacggagatcccttcgttacggaagttacggttgatctcgaagacgcgttcgaagccgccaaccaccagacgcttgaggtacagttccggcgcgatacgcaggtacatgtccagatccagcgcgttatgatgggtgatgaacggacgcgcggaagcgccgcccgggatcacctgcatcatcggggtttctacttccataaagccgcggccaaccatgaactgacggatgcctgccaggatctgcgaacgcactttgaaggtcttgcgggattcatcgttggagatcaggtccaggtaacgctggcgataacgcgcttcctgatcctgcaggccgtggaatttgtccggcagcgggcgcagagctttagtcaacagacgcagctcggtgcagtggatagagagctcaccggttttggtcttgaacaacttaccgcgggcggcgatgatgtcgccgaggtcccactttttgaactggtcgttataaacgccttccgccaggtcatcacgcgccacgtatag

SEQ ID NO: 241091 - DNA, 642 bp, Klebsiella pneumoniae
gtggcgaagaattactatgacatcaccctggcgctggctggcgtttgccaggcggcgcgactggttcagcaactggcgcatcagggacattgcgacagcgatgccctgcatgtgtcgctgaacagcatcatcgacctcgatcctgagtcgacgctggcggtgttcggtggcagtgaagccaatcttcgcctcggtcttgaaacgctgctcggggtgctcaataccagcagccgtcagggcctcaatgcggaactcacccgctataccctgagcctgatggtgctggagcgcaagctcgccgccagtaaaggggcgatggacacgctcggcaaccgcatcgccggcctgcaccgtcagctggaacactttgacctgcagtccgaaacgctgctcagcgccatggcgggcatctatgtcgatgtgataagcccgctggggccgcgtattcaggtgaccggctcccctgccgtgctgcaaagcccgcaggtgcaggcgaaagttcgctcagcgctgctggcaggtattcgcgccgcggtgctctggcatcaggtaggcggcggacgtctgcagcttatgttttcccgtaatcgtctggttaaccaggcaaagcaaattcttgctcatttaaccccggagttgtga

SEQ ID NO: 241092 - DNA, 1371 bp, Klebsiella pneumoniae
atggaattatcctcactgaccgccgtttcccctgtagacggccgctacggcgataaagtcagcgcgctgcgcggtatcttcagcgaattcggtttgctgaaattccgcgttcaggtggaagtacgttggctgcaaaaactggccgcccacgcagcgatcaaggaagttcctgcttttgctgccgacgcaaacggtttccttgataaaatcgtcgccgatttcagcgttgaagacgcggagcgcatcaaaaccatcgagcgcaccactaaccacgacgtgaaagcggtagagtatttcctgaaagaaaaagtcgctgacgtcgccgagctgcacgcggtatcagagtttattcacttcgcctgtacgtctgaagacatcaataacctctcccacgcgctgatgctgaaaaccgcccgcgacgaagtggttctgccttactggcgcaagctgattgacgcggtaaaagatctggcgacccagtatcgcgatgtgccgctgctctcccgtacccacggccagccggcaacgccgtccaccatgggtaaagagatggcgaacgtcgcctaccgtatggagcgccagtatcgtcaactgaaccaggtggaaatcctcggtaaaatcaacggcgcggtgggtaactacaacgcccacatcgccgcctacccggaagtcgactggcatcagttcagcgaagagttcgttacctcgctgggtattcagtggaacccgtacaccacgcagatcgagccgcatgactatatcgctgagctgtttgactgcatcgcgcgcttcaacaccattctgatcgacttcgatcgcgacgtgtggggctacatcgcgctcaaccacttcaaacagaaaaccatcgccggggaaatcggctcctccaccatgccgcacaaggtgaacccaattgacttcgaaaactccgaaggcaatctcggcctggccaatgcggtcatgcagcacctggccagcaaactgccggtttcccgctggcagcgcgacctgaccgactccaccgttctgcgtaacctcggcgtgggcatcggctatgcgctgatcgcctatcagtccaccctcaaagggatcagcaagctggagctgaaccaggatcgcctgctggacgaactggatcacaactgggaagtactggctgagccgatccagaccgtgatgcgtcgttacggtatcgaaaaaccgtacgagaagctgaaagagctgacccgcggcaaacgcgtggacgcggaagggatgaagcagtttattgacagcctcgccctgccggaagaggaaaaagtgcgtctcaaagcgatgaccccggccaactatatcggtcgggcaatcaccatggttgacgagctgaagtaa

SEQ ID NO: 241093 - DNA, 363 bp, Klebsiella pneumoniae
atgtatcaactcgttaatcttgctcagaaattttccctgttcagcgaacaatggcagcccaaagtggtggctgaaatgaacgactatcagttcaaggtcgtgcgcatcgccggcgactttatctggcacagccacccggaaaccgatgagacattgatggtggtggagggggtattgcgcgtggacttccgcgacgggcatgtgctggtgaaggccggggagatgatcgtcgtgccgcgcggggtggaacataagacctcggcggagacggaagcgaagctgatgctgattgagccgcgcggggtgttgaataccggccacgagggcggcgagcggacggcggtgaacgacgtttggatctga

SEQ ID NO: 241094 - DNA, 483 bp, Klebsiella pneumoniae
atgaacagcaacaatcaggtcaaacaattacggctgcagcgcgcctggtcccaggagcagctggccgaaatggcgggtctcagcgtccgtacgatccagcgcattgagaatggcgaacgcccggggctggagaccctcagcgccctcgccgcggtctttgaggtgacggtggccgagatcggcggcgaagcccggcgggaagacgcgccgggccaggaagcctcactggatttgcgcatagaggaagccaaagcgcgggtgcatcaggagagccgctttttccgttcgctgtcggtggcgctggtggtttgcgtgctgctggcggtgcttaaccgcttcactaatccacagtactactggtccggctgggtcgccctgatctggggcgccctgctggtggtgagaggattacgcctgttcgtgttcggcgaatggattaaaaactggcgccaggcgcgcctgcagcggctgctgcgcaaatag

SEQ ID NO: 241095 - DNA, 399 bp, Klebsiella pneumoniae
atgctccccgccaaggctgccctccaccagcaccagcacgccaaagatcgccagggcgatccccgccagctgcttgccctgcagacgttcgccaaatacgaaggcgccaaggatgatggtgaagaaggcttgcgcctgcagcacaagggaggccagcccggccggcatacccaggccgatagcgcagaacagaaaggcgaactgaccgaaacttatggtcaggccatagcccagcagcaggcgcagcggaatagctggccgggcgacaaacagcagcgccgggaaggcgaccagcataaagcgcagccccgccagcatcagcggcggcatattgtgcaaccccagcttaatcaccacaaagttaagcccccacaccaccactaccagcagcgccagtag

SEQ ID NO: 241096 - DNA, 648 bp, Klebsiella pneumoniae
atggttcgcgcaaaactgaaattccggctgcatcgtgcggtcattgttcttatctgtctcgccctactcgtcgcgctgatgcagggcgcttcgtggttcagtcagaacagtcagaaacaacgcaatccgcagctggaagagctggcccgcacgctggcgcagcaggtggtgctgaatctcgcgccgctaatgcgcagcgagacgccggacgagaagcgcatccatcagctgttgacgcagctcacccacaacagccgcgtcctggacgccggcgtatatgacgaacagggcgacctggtggcgcgctctggcgaaagcgtcgaggttcgcgaccggctggcgctggatggtaaaaaagccggcggctacttcaaccagcagattgtcgaaccggtgccaggaaaaaacggcccgctgggctacctgcgtctgaccctcgatactcataccctggcgaccgaggcgaagcaggtggataataccaccaatatcttacgcctgatgctgttgctgtccctggctatcggcgtggtgctgacccgcacgctgctgcagggcaaacgcacccgctggcagcaatcgcccttcctgctcaccgccaacaagccggttgaggatgaagacgatgaaaagaaaggaaatctataa

SEQ ID NO: 241097 - DNA, 1017 bp, Klebsiella pneumoniae
atgtccacattgcgcctcctgctctctgactcttacgacccgtggttcaacctggcggtcgaagagtgtattttccgccagatgcccgccacccagcgggtgctgttcctgtggcgcaatgccgataccgtggtcatcggccgcgcgcagaacccgtggaaggagtgtaatacccgccgcatggaggaagaccatgtgcggctggcccgtcgcagcagcggcggcggcgcggtgttccacgacctcggcaatacctgctttacctttatggcaggcaaaccggagtacgacaaaaccgtctccaccgctattgtgctgacggcgcttaattcactcggcgtaaccgccgaagcctccgggcgcaacgatctggtggtcaaaaccgacagcggcgaccgcaaagtctccggctccgcctatcgtgaaaccatggaccgcggttttcatcacggcaccctgctgctcaacgccgatttaagccgtctcgccaactacctcaacccggaccagaaaaagctgcaggctaaaggcattacctcggtgcgcggacgggtggcgaacctggttgagctgctgccgggcattacccatcagcaagtttgcgaggcgatccaggaagcattcttcagccattacggcgaacgggtggacgccgaggtgatctccccggacaacacgccggatctaccaaattttgctgagaccttcgcccgtcagagcagctgggagtggaacttcggccaggcgccggccttctctcatcttcttgacgagcgctttcgctggggcggcgttgagctgcattttgacgtcgaaaaagggcatatcacccgcgcgcaggcctttaccgatagcctgaacccggcgccgctggaggccctggcggcacgcttagtcggctgtcagtatcgggcggaagtattacagcagcagtgcgaggcgctagtcggcgatttcccggagcaggaagcggaactgaaagaactgtcggcgtggattgccggcgcagtgcgctga

SEQ ID NO: 241098 - DNA, 720 bp, Klebsiella pneumoniae
atggcaactcctcatattaacgcagaaatgggcgatttcgctgacgtcgttttgatgcctggcgacccgctgcgcgcgaagcacattgcagaaaccttcctcgaagatgtgcgtgaagtgaacaacgtgcgcggcatgctgggcttcaccggtacctataaaggccgcaaaatctccgtgatgggccacgggatgggtatcccgtcctgctctatctacaccaaagagctgatcaccgatttcggcgtgaagaaaatcatccgcgtgggctcctgcggcgcggtgcgtgaagatgtcaaactgcgtgacgtggtgatcggcatgggcgcgtgcaccgactctaaagtgaaccgtctgcgtttcaaagaccatgattttgcggcgattgccgatttcggcatggtgcgtaatgcggtagacgcggcgaaagcgctgggcgttgacgcgcgcgtcggcaacatcttctccgcagacctgttctatacgccggacccgtccatgttcgacgtgatggaaaaatacggcattctgggcgtggaaatggaagcggcgggtatctacggcgtggcggcggagttcggcgcgaaagcgctgaccatctgcaccgtctccgaccacatccgtacccacgagcagaccactgccgctgaacgtcagacgaccttcaacgacatgatcaaaatcgcgctggaatccgtgctgctgggcgataaagagtaa

SEQ ID NO: 241099 - DNA, 1323 bp, Klebsiella pneumoniae
gtgtttctcgcacaagaaattattcgtaaaaaacgtgatggtcaggcattaagcgatgaagagatccgctttttcatcaacggcatccgcgacaatactatctctgaagggcagatcgccgcgctggcgatgaccatcttcttccacgatatgtctatgccggagcgcgtttcgctgaccatggcgatgcgggattccggtaccgttctggactggaaaagcctcaaccttaacggtccgatcgtcgataaacactctaccggcggcgtcggggatgtcacttcgctgatgctggggccgatggtggccgcctgcggtggttacgtaccgatgatctccggccgcggcctcggccataccggcggtacgctggacaaactggaagcgatcccgggcttctatatcttcccggacgacaaccgcttccgcgagattataaaagatgttggcgtggcaattatcgggcagaccagctcccttgccccggccgacaaacgtttctatgccacccgcgatattaccgcgacggtggactccatcccgctgattaccgcctcgattctggcgaagaagctggcggaagggctggatgcgctggtgatggacgtcaaagtcggcagcggcgcctttatgccgacttatgaactctctgccgcgctggccgaagcgatcgtgggtgtcgccaacggcgccggcgtgcgcaccaccgcgctgctgaccgatatgaatcaggtactggcctccagcgccggcaacgccgttgaagttcgcgaagcggtgcagttcctgaccggcgaataccgcaacccgcgcctgttcgacgtgacaatggcgctgtgtgtggaaatgctgatctccggcaagctggcggcggacgatgccgaggcgcgcgcgaagctgcaggcggtgctggataacggtaaagcggcggaagtgtttggccgcatggtcgcggcgcagaaagggccgagcgactttgtcgagaattatgctaattatctgccgacggcgatgctgagcaaagcagtctatgctgataccgaaggttttatcagcgcgatggatactcgcgcgctgggcatggcagtggtttctatgggcggcggccgccgtcaggcatcggacaccattgactatagcgttggctttaccgagatggcgcgtctgggtgaccgcgtcgacggacagcgtccgctggcggtgatccatgccaaagacgagaacagctggcaggaggccgcgaaagcggtcaaagcggccattaaactggacgataaagccccggaaattacaccgacagtctatcgccgtatcactgaatag

SEQ ID NO: 241100 - DNA, 780 bp, Klebsiella pneumoniae; identical to SEQ ID NO: 210207

SEQ ID NO: 241101 - DNA, 1278 bp, Klebsiella pneumoniae
atgcaaatcctcatgggacttatcggcatggtggcgctattggccattgctgtgctgctctccaataaccgaaaagccattaacctgcgcaccgtgctcggcgcctggataatccaggtgggtatcggcgcgttaatattgtatgtaccggccgggcgcgcggcgctattagcgatgtcgaatggcgtcgccagcgttattgcctacggcaatgaagggattagtttcatcttcggcgggctggtctccgataaaatgttcgaggtgtttggcggcggcggcttcgtctttgccctgcgcgtgctgccggtgatcgtcttcttctcgtcgctgattgccgtgctttactacctgggcattatgcagctggtcattcgcattctcggcggcgcgctgcgggcagtgctgaagacctcacgtaccgaatcgctgtcggccacggcgaacatctttgttggccagaccgaagcgccgctggtggtgcgtccttatatcgccaccatgactcgctcggagctgtttgcggtcatgtgcggcggcctggcctcggtggcgggctcggtactggcgggctatgcgcagatgggcgttccgctggagtaccttattgccgcgtcgtttatggcggcgccgggaggtctgctgtttgccaaaattatcgtaccggaaacggacaaaccggacgataacccggctcatgacagccaaagcgctgacgcggataaaccggccaacgtgctggatgccgccgcctccggcgccgcgtctggtatgcaactggcgctcaacgtcggcgcgatgctgctggcgtttattgcgctgatcgccctgctgaacggcatactctccggcgtcggcggctggtttaaccatcctgagctgtcgctgcagatgatcctcggctggatcttctcaccgctggcgtgggtgattggcgtgccgtggcacgaagcgacggtggcggggtcgtttatcggccagaagctgatcattaacgagttcgtggcctacatgaactttggcgaatatttaaaggcagatgccgaagtggcggcggccgggctgcaggtcatttcagatcacaccaaagccattatctctttcgcgctgtgcggctttgccaacctgtcatcgatcgccattctgattggcggactcgggggaatggcgcccaaccggcggcaggatatcgctcagcttgggctacgtgcggtagcggcggggacgctgtccaacctgatgagcgccaccatcgccggggtttttctcgccctgtaa

SEQ ID NO: 241102 - DNA, 795 bp, Klebsiella pneumoniae
gtgacgcaccgttttatcgatacccactgtcactttgattttccccccttcgcggcagatgaggtcgccagcctggcgcgtgcggcgcaggccggcgtcgagcgaattatcgttccagccatctctgctgagcgttttagccgcgtgctggcgctggcagctcagcacgaagcgctgtacgccgcgctgggtatgcatccgatcgtcatcgaagagcatactgatgagggactggcgcagctggaagccttgatggcgcagcggccgcctaaactggtggcggtgggagagattggcctcgatctttatcgcgacgatccgcagtttgatcgtcagcaggccctgctggaagcgcagctgaggctggcgaagcgctacgatctgccggtgatcctccactccagacgcacccacgataagctggcgatgctgctgaaaaaacatgccctgccgcgtaccggagtcatccatggctttgccggcagcctgcagcaggccgagcgcttcgttcagcttggctataagatcggcgttggcggcaccattacctatccccgcgccagtaaaacccgtgaagtgatggcgcgtctgccgctttccgctctgctgctggagaccgatgcgccggatatgccgctaaatggctttcagggacagcccaatcgaccggaacaagctgcacgggtatttgaggcgctgtgtgaactgcgtccggagtcgccggcagccatagaagaaaggatcatgcacaatacgctcgccttgttttcccttcccccggtctctgtatggtga

SEQ ID NO: 241103 - DNA, 1074 bp, Klebsiella pneumoniae
gtggggcaacgcattcccgtcacgctgggcaatatcgccccgctggcggttaaacccttccgaccaggcaagctggcgctggtatgcgaaggtggaggacagcgagggatttttactgccggggtgctggacgaatttatgcgcgccggatttaacccctttgacctgatgctgggtacttccgccggcgcgcaaaacctctccgcctacatgtgtaatcagcaaggctatgcccgcaaagttatcactcgctacaccacttcacgccagttttttgatccgatgcgctttgtgcgcggcggcaaccttatcgatctcgactggctggttgaggccacttcgcagcaaatgccgcttgccatgaactatgccgaagcgcagttcgcgttggggaaagagctgtggctatgcgcttgccgcggtgacgattactccgccagctatttttcgccgacgccgcaaacgtggctggatctgatccgcgcctccagcgccatccccggcttttatcgcagcggcgtgttgctcgacggcgttagctacctggacggcggcgtcagcgatgcgatcccggtgcaggaggcggcccgccgcggcgcccagaccatcgtggtgatccgtaccgtcccttcgcagatgttttataccccgcagtggttcaagcggatggagcgctggctgggagagagtagtctgcaaccgctggtcaatttggtgcatcatcacgaaaccacctaccgcgccatccagcagttcatcgagaaaccgccgggtaagttgcggatcttcgaaatctatccgcagcggccgctgcgcagcatggcgcttggcagccgactaccggcgctgctggaggactacaaaaccgggcgccagtgcggccgttatttcctggcaacggtgggtaaactactggccgaccagccgccgctgctgcgccacgcgccgcgtattgcccggcccgcgccggtggtggtgccgccggtgccggtggccaatgaagcgccccaggcgaccatcattcctgcgccccaggcgaatgaccccagttttgatcatgaggatctggcgtga

SEQ ID NO: 241104 - DNA, 162 bp, Klebsiella pneumoniae
atgtttcgatggggaattatttttctggtcattgcattaattgctgcggctctgggctttggtggtctggcgggtacggccgctggcgctgcgaaaatcgtctttgtcgtcgggattatcctgttcctggtgagcctgtttacaggacgcaaacgtccttag

SEQ ID NO: 241105 - DNA, 621 bp, Klebsiella pneumoniae
atgaccagactaaagaatgccaatatgttgctggcgctcttcttaggcttagccgcgttgaacgcctcggcagagacggaaaaaacaacggtagacagtgcgaagtcggctgccagcaatgcgggagaggcggtagataattcgattaacaaagtcggcgattttatggatgacagtaccattaccgcacgggtaaaagcggcgctgatcgaccataaagatattaactccggcgatatttcggtgaaaacggagaataaagtggtcaccctcagcggcgacgtcaccagtgctgaacagaaaagtcaggcactgagcgtagcgaaagaggtcaaaggcgtctcacacgttaacgacaagctgacggtccatcataaatcatcgagcgagacggcgacgctgaaaggctatgccggggataccgccattaccagcgaagtgaaagccaagctgctggcggatgacattgtcccttcgcgcaatgtgaaagtcgaaaccaacgccggcgcggtacatctgaccggtacggtggcttccgcggcgcaggcggagcgtgccgcagagattgcgaaagcggtctccggtgtgaaaagcgtgcgcaacgatcttagcgttaagtaa

SEQ ID NO: 241106 - DNA, 1590 bp, Klebsiella pneumoniae
atgacgttgtctccttatctgcaagaggtggccaaacgccgcacttttgccattatttctcacccggatgccggtaagaccaccatcaccgaaaaggtgctgctgttcggacaggcgattcagaccgccggtacagtaaaaggtcgtggttccagccagcacgcgaaatccgactggatggagatggaaaagcagcgtggtatctcgatcaccacctcggtaatgcagttcccgtatcatgactgcctggtgaacctgctggataccccggggcacgaagacttctccgaagatacctaccgtaccctgacggcggtggactgctgcctgatggtgattgacgcggcaaaaggcgtcgaagatcggacccgtaagctgatggaagtcacccgtctgcgcgatacgccgatcctcacctttatgaacaaactcgaccgtgatatccgcgatccgatggagctgctggatgaagtcgagaacgagctgaaaatcggctgcgcgccgattacctggcctatcggctgcggcaagctgttcaaaggcgtttatcatctctacaaagacgaaacctacctgtatcagaccggtaaaggccacaccatccaggaagtgcgtatcgtgaaggggctcaacaacccggatctcgacgcggcggtgggggaagacctggcgcagcagctgcgtgacgagctggagctggtgcagggagcgtcgaatgagttcgacaaagatctgttcctggccggggaaatcaccccggtcttcttcggaaccgcgttaggtaacttcggcgttgaccatatgctggatggcctggtggagtgggccccggcgccgatgccgcgcaacaccgacacgcgtgaagtcaccgccacggaagagaaattcaccggcttcgtgtttaaaattcaggccaacatggatccgaaacaccgcgaccgcgtggctttcatgcgggtggtgtccggcaaatatgaaaaaggcatgaagctgcgtcaggtgcgtatcggcaaggacgtagtgatttccgacgcgctgacctttatggcgggcgatcgctcgcacgttgaagaagcgtacccaggcgatatcatcggcctgcataaccacggcaccattcagattggcgatacctttacccagggcgagatgatgaagttcaccggtattccgaacttcgcgccggaactgttccgtcgtattcgcctgaaggatccgctgaagcagaaacagctgctgaaagggctggttcagctctctgaagagggcgcggtccaggtcttccgcccgatcgctaataacgatctgatcgttggcgccgtcggcgtgctgcagtttgacgtggtggtagcgcgtctgaaaagcgaatacaacgtggaagcgatttacgaatcggtcaacgtggccaccgcgcgctgggttgaatctactgacgtgaagaagttcgaagagttcaagcggaaaaatgaagttcagctggcgctggatggcggcgataacctgacctacatcgccccgacaatggtcaacctgaacctgacgcaggagcgttaccctgacgtggtgttccgcaaaacgcgcgagcactaa

SEQ ID NO: 241107 - DNA, 678 bp, Klebsiella pneumoniae
atgaaatgggactggattttctttgatgccgatgaaacgctgtttacgtttgattctttcagcggcttgcagcggatgtttctcgactacagcgtgacctttaccgccgaagattttcaggactatcaggccgtgaacaagccgctatgggtggattaccaaaacggcgccatcacctcgctgcagctgcagcaccagcgttttgacagctgggcggaacgtttgaatgtgccgcccggggaactcaacgacgcgtttatgaatgcgatggcggaaatctgtgccccgttgccgggcgcggtctcgctgctcaacgcgttgcagggcaaggtcagaatgggcatcatcaccaacggctttacctcgctgcagcagactcgtctggagcggacaggtttacgcgatcactttgatttgctgattatttctgaacaggtgggtgtcgccaagccggacgcgcgtattttcgattatgcgctggcgcaggcgggtaacccaccgcgctcgcgggtgctgatggtcggtgataccgccgagtcggatattcgcggcggcgtgaacgccggagtggcgacctgctggctcaatgcgcatcagcgcgagctgccggcggacctcgagccggactggacggtgacctcgttaagcgaactggagcagctcctgtgtaaacactga

SEQ ID NO: 241108 - DNA, 447 bp, Klebsiella pneumoniae
atgaacacgatttctaccctcagcacggctgatttaaccaaagcctggcacatcgaaaaacgcgcccacgctttcccgtggagcgaacagactctggccagtaaccagggggagcgctatcgcaactatcagctgtcggtagatggcgaaatggcagctttcgccattacgcaagtggtactggatgaggcgacgctgttcaatatcgccgtcgatcccgcgtaccagcgccgcggcctggggcgagcgctgctggagcatgtcattgatgaagtcgaaaaactcggcgtcgtcacgctgtggctggaggtgcgagcatccaacgttgccgccatcgcgctgtatgagagcgtaggcttcaatgaggcaaccatccgccgcaactactatcctacgaccgacggacgcgaagacgccattattatggctctgccaatcagtatgtaa

SEQ ID NO: 241109 - DNA, 414 bp, Klebsiella pneumoniae
atgacatcccgacgagactggcaattacagcagctgggcattacccagtggtcgctgcgccgaccgggggcgttgcagggcgaaatcgctatctcgcttcctgaacatattcgtctggtgatggtggcggaaaccccgccgtcgctgacagagccgctgattggcgacatattacgcgcgctggccgtgacgccagatcaggtcctgcagctgactccggagcgggtggcgatgctgccgcaggacagccgctgcaacagctggcggttgggcacagaggcgtcgctgccgctggcgggcgcccaggtgtccacccccgcttttgatgaactccagaccagcgcgccggctcgcagggcgctctggcaacaaatctgcgcacatgaacacgatttctaccctcagcacggctga

SEQ ID NO: 241110 - DNA, 1029 bp, Klebsiella pneumoniae
atgtccgcttttaccccggcaagtgaagtcttgctgcgccacagtgatgatttcgagtccgcccgcgttctgtttgccggtgacctgcaggatgacctgcctgcgcgtctggataccgcggccagccgcgcccacacccaacagttccaccactggcaggtcctcaaccgccagatgggtgacaccgtccgttttagcttagtggctgaggccgctgacgtcgccgaatgcgacaccctgatctactactggccaaagaacaaaccagaggcgcagttccagctgatgaacctgctctctctgctgccggtgggaagcgacattttcgtcgtcggtgaaaaccgcagcggcgtccgcagcgcggagcagatgctggctgaatacgcgccattaaacaaagtggatagcgcccgccgctgtggcctctatcatggccgtctggaaaagcagccgaccttcgacgccgacgcattctggggcgaatacacactggataatctgacgattaaaaccctgccgggcgtcttcagccgcgacggtctggacgtcggcagccagctgctgctctccaccctcgagccgcataccaaagggaaagtgctggacgtcggctgcggcgcgggcgtgctggccgccgcgctggccagccattcaccgaaagtgcgcctcaccctgtgcgacgtcagcgccccggcggttgaagccagccgcgcgacgcttgccgccaacggcctggctggcgatgtgtttgccagcaacgtcttctccgaggtcaatggtcgcttcgacatgatcatctccaacccgccattccatgacggcctgcagaccagtctcgaagccgcccaggcgctgatccgcggcgcggttcgccatctgaacagcggcggcgagctgcgcattgtcgccaacgccttcctgccgtatccgcaggtgctggatgagacattcggcttccatgaggtgatcgctcagaccgggcgctttaaggtctatcgcaccattatgacccgtcaggcgaaaaaataa

SEQ ID NO: 241111 - DNA, 789 bp, Klebsiella pneumoniae
atggcctggcgttcccttcctctcagcgatgaacttatctggcgggctcctttgccgacggctgagcatgccctggcggagagtattcgggaaaaaatcgccaccctgcgtccacacctgcttgatttcctgcgacttgacgaacccgccccacggcacgcgttaacgcttgccgaatggtcgcaacccatcgccttgcgctccctgctggccacctggtccgatcatatctatcgtcatcagccgacgctgcctcgggaacagaagcctctgctctcgctctgggcgcaatggtatatcggtctgctggtgccgccgctgatgctggcgctgctcaatgaaccgcaaggcctcagcctggcgccagaacatttccatgtcgaatttcatgaaagcggccgggcggcctgcttctggattgatgtgcatagcgatgccgacatcgagaggctttcaccgcaggcgcgaatggatgccctggtaacgcgcaccctgcagccggttgttgaggcgctggcagcgacgggcgaaatcaatagcaaacttatctggagcaataccggctatctgattaactggtatcttggggaaatgcgcgcgctgctgggtgatgagcggcttgccgcgctacgtcagcactgtttttttgaaaaacaactcgccgatggccaggataacccgctgtggcgaacggtgatgctgcgtgaagggcagttagtccgacgcacctgctgtcagcgctatcgcctgccggatgtccaacagtgcggcgactgtacgcttaaataa

SEQ ID NO: 241112 - DNA, 1344 bp, Klebsiella pneumoniae
atgtctgctaaccatgctgcgtttaatttgatatttcgctttgtagaaaattacataagccccatagcagggcggatctcgtcgcagcgccacgtcatggctattcgtgacggatttatctcagcgatgccgtttatgatcgtcggatcgttcctgttagtgtttgcttatccaccgttctcaccggataccacctggggttttgcccgcgcctggctggatctggcgaaagagtttgaggggcgtattgtgaccccctttgatatgacgatggggatcatgtcgatctacatttgcgcggcaatctcctataacctcggtaagcattacgagaaatccaatcagctcgatccctttatgtgcgcaatgctgtcgatcatggcctttttgctgattgccgcgccgaagaccaatggcacgctgccggtggatagcctcggggggaccgggatctttaccgccatcctggtggcgatctactgcgtggagatgatgcgtttcttgaaagcgcacaacattgggatccgcttgccggaccaggttccgccgatgatcaaaaactcgtttgatctgttgatcccggtgctggtggtcgtgctgacgctctatccgctgagcctgtttatccagcaccattttgacatgctgatcccgcaggccattatggccattttcaagccgctggtttcggcagccgactctctgccggcaattctgttggcggtgctgatcggccacctgctgtggtttgccgggatccacggtgcggcgatcgtgtccgggatgctgcagatgttctggctgactaacctcggtatgaaccagcaggcgctggcccagggcgcgcctctgccgcatatctttatggaggcgttctggaccttctttatcgtggtcggaggttccggggcgaccatgggactggtgttctgttatctgcgcagccgttcagcgcatttgcgctccattggtcgtttgagcgtggtgccaagcctgttcaatatcaacgagccggtgatctttgggacgcctatcgtcatgaacccagtgttctttattccgttcctgctggcgccgatggtgaacgcggtactggcctgggcggcaatgaagctggatctgattggccgcgtcatctccgtagtaccatggacggcgccagcgccaattggcggcgcctgggcgctgggctgggatttccgggcggcgattctggtcattgttctggcctgcgtgtcggcaatcatctacttcccattctttaaggtatatgagaaacagctgcttgctcaggaagcggaagaggccgagcgggcggagcaggagagtcaacagaccgcataa

SEQ ID NO: 241113 - DNA, 723 bp, Klebsiella pneumoniae; identical to SEQ ID NO: 134543

SEQ ID NO: 241114 - DNA, 882 bp, Klebsiella pneumoniae; identical to SEQ ID NO: 134544

SEQ ID NO: 241115 - DNA, 483 bp, Klebsiella pneumoniae
gtggctctgcacagaaacaaaggatgtcagcccttcgcgttcggcaagggcgttcaccttcgccaactgccaggcatagcaattggaaatgccaatcgcgcgcaccttgccggcggtcactgcggtgtgcagcgcctccagcacgtcgataaccggggtgttgtaatcccagatgtggtagatgtagaggtcgatgtagtccatcccgaggtttcgcagactctggtcaagcgagcgggctatcgcctgttttccgctgatcccctcggcaatctgcgcggcggttcgtggcagaaacttggtggccagcaccacctcctcgcgttttgccatctcccgcagcgcccggccaacgtaccgttcgctggagccgttctgataggcgatggcggtatcgtaaaaattgatgccctgttccagagcgtggcggatgatgtcccggctggctgtttcgtccagcgtccagcgatgctgacccgttga

SEQ ID NO: 241116 - DNA, 501 bp, Klebsiella pneumoniae
gtgcgcaatccacgccagcgggcagaggcccagcccgggaccctgatcttcgctttgccacagcagcgccagatccagcgcctcttccgccagcgcctggcgcagcggaccattgcgatccaccctggcgactatccgcacctgcggatgatgccgtttaaattgcccgaggatccccggcatcagcgattcgccaaaatcttcctgcataccaaggtggatctcgccggtgagccgctcaccctgcagcgcgcgcagggtttcatcattgagcgccagcaggcgtctggcgtagctcatcagcttttcgccttccgcggtgagcaccagatgccgcccctgtttggtcaccagcgccgcaccgcactggctctccagctttttaagctgggcgctgaccgcggaggtggaacgcgacaggcgcagcgctgcctgggcgaaactgccgcactccatgccggtcacaaagctgcgcagggcgtcgagatccagccctggtaa

SEQ ID NO: 241117 - DNA, 1521 bp, Klebsiella pneumoniae
atgcaggcgacagcaaaagagttcatcattgccctggatgaaggcaccaccaacgccaaagcggtggtgctggatagccggggcaaagttatcgtcaaattctcgcagccgctggcgatccaaacgccgcgcgacggctgggtggagcaatcgggcgaagcgctggttaccgcctcactgacggtgatcgccagcgcggtggcccacgttggcgcggaaaacgtcgccgcgctggccatcagcaaccagcgggaaaccgccatcggctggtatcgcgacagcggcgaaccgattaacgcggccattacctggcaatgcacccgcagcgccgcgttctgcgacacactgcgtcacgatcgtcaggaacagcacattaagcgtgccaccggcctgccaatcgccccgctgttctcggcctccaaaatgcgctggctgctggatgcgactgtcgatggccacctgcgcgccgaacgcggtgggatatgcctcggcaccatcgacagctggctgctgtggaatctgactgctggagaagccttctgctgcgactactccaatgccgcccgcacccagctgctgaacctgcaccgcggcgagtgggacgacgagatgctggcgctgttcggcattccgcgcgcggcgttgccggacattaaaccatcgagcggcctcttcggccataccaaaggactggccgccattccggacggtattccgatcatgtcgatgatcggcgactcccacgccgcgctgttcggccacgcgctcggcgaggcaggctgcgtcaaagccacctacggcaccggctcttcggtcatggccccggtcaaatcggcgcagtgcgatatcgacgcgctggcgaccaccgtcgcctggcgcgatggcgaccagctggtgtggggcctggaagggaatattccccacaccggcgatgctgtcgcctggatggcggacagcaccggactgagcgaactctctgccgccgagctggcccatgagctgaataccctccccgcctccgtcgactcaaccctcggggtctacttcgtgccggcgctgaccggtcttggcgcgccctggtgggatgacagcgcccgcggcgtgatttgcggcctgagtcgcggggtgaaacgcgcgcatctgatccgtgcggcgctggagtccatcacctatcagatagccgacgtggtggtggcgatgcgtcagcatgaggagttcaccctgacggcgttgatggtggacggcgggccgaccaacaatgactggctgatgcaataccaggccgatctgctcggctgcccggtgatgcgcagcgacgtgccggagctgtccgccatcggcgcggcgttgctggcacgcaaagcgctccatccgggatcgaccgccgatctgcaggccttcttaaccgaacatagcacctttcagcccgacatggcccgccaccagcgcttacaaacgcgctggcaggagtggcgccatgcggtcgaccgaacattatggaaaccggactcgccagcctga

SEQ ID NO: 241118 - DNA, 159 bp, Klebsiella pneumoniae
atggatgttcccgatgcctttatcattctttggaatgcgtttattccatacgatattttctataaagtttgcttcaccaaatatttcatcacaaatggttttcagttggttcagttcattttcatcaatcgaaataaagatcacaccatcttcgcgtag

SEQ ID NO: 241119 - DNA, 192 bp, Klebsiella pneumoniae; identical to SEQ ID NO: 104075

SEQ ID NO: 241120 - DNA, 261 bp, Klebsiella pneumoniae
atgagcgaagcgaaaccgcaggacggcagcactgtaaaaggctaccgcacattaacgccagctgacattgagatgatgaatgaggtcaaagctataagccgcgagttcctcaaaaagctggattttctcaaattcgttcatgaaagcgaatcagagccagaccctcaaactctgcgcagcctggcaatcgcccgcaccaaaatgcaggaagcctgtatgtgggcctgccgcgccgtggcgagacctgatagcgattgttga

SEQ ID NO: 241121 - DNA, 1317 bp, Klebsiella pneumoniae
gtgcgggaagctgcgaagcagcggaagaaagaacggtttacagcattgttccacctgctgacagtcgaagcactggaagccgcattcctctccctgagcaggaaagcggccgccggagtggatggcatcaggtggatggactacgccggaaacatgaagaacaacataacagatctgcaccggaggctacatcagggcagctacagggcgcagcccggcaggcgtcactacatcccaaaagcggatggaaaacaacgcccgctcggcatcgcctcgctggaggacaagatcgtccagtatgcgctggtgaaaatcctgaacgcagtctatgaaaacgactttatggggttctcatacgggttcagacccgggcgaagccagcacgatgcactggacgcactggccacagggctggtacgcactaacgtaaactgggtactggatgccgacatcagtcagttcttcgacagggtgagccacgaatggctgatcaggttcacagagcatcggatcggcgaccggagggtaatcaggctcatacgtaagtggctcacagccgggacgtcggaggagggtcaatggcgagcaacggaggaaggcaccccacagggtgcggtcatctcaccgctgctggcaaacatatacctccactacgtcttcgatctgtgggcgcatcagtggcgacgtcgctatgccacaggcaatgtggtaatggtcagatacgccgatgacatcgtcatcgggttcgacaaacgatacgatgcccggcgcttccgtatagccatgcagcgcagactgagggagttcggactcacggttcacccggagaaaacccgtctgatggagttcggccgcttcgctgccgaaaaccgtgccatcaggggaaaaggcaaaccagaaacgttcaacttcctcgggttcacgcacatcagcgggaaagatcgcaacggcaggttcatgctgatacgaaagacccgccgggatcggatgacggcaactctgaaagccatcaaagacggtctgcgaaggcgctggcattactcaatccccgaacagggaaaatggctcaggagagtggttcagggatacctgaactatcactcggtaccgggcaacttccccaccatgcagaagttcaggacacacgtaacaaacctctggcgccgggcgctcaggcgcaggagccagaaggatgatacgacctggacgaaagcaaacaaactggcagccgcatggctaccaagggttcgggttcttcatccatggcctgtggagcggttcaccgccagacacccgaggcaggagcccggtgcgtaa

SEQ ID NO: 241122 - DNA, 252 bp, Klebsiella pneumoniae
gtgcagccgcctttcgctgagctagtcaaaagcaaactgaaactcggcggcgtcttccatatggcgaccgactgggaagcctatgccgtgcatatgctggaagtgatgtcctcgctggaaggctatcgtaaccagtcggcaagcaacgattacgtaccgcgcccggaatcgcgcccggtaaccaaatttgaacagcgtggccatcgtctcggccacggcgtatgggacttaatgttcgagagggtgaaataa

SEQ ID NO: 241123 - DNA, 645 bp, Klebsiella pneumoniae
atggctgacggaggcctgtttgcggccgcccatcaggcgcaggatggcatccgcggtacgagcgcgcagcggcagcgtcgactggtggcgaacaaagttacggcgcgccacctggttaaagaactcgataatgatcgagaaaccgatcgccgcgtacagataccctttcggaatatggaagccaaacccttccgccaccaggctcaggccaatcatcaacaggaagctcagacagagcacgaccaccgtcgggtgctggttgacaaagcgcgtcaacggcttggaggccagcagcatcaagatcatcgcgatcaccaccgccgccatcatcaccggcagatggttaaccatcccgaccgccgtgatcacggcgtccagggagaagacggcatccagcaccactatctgcaatactactacccagaaactggcatagcctttaccgtgaccggcatcgtgctggcggttttccagccgttcatgcagctcggttgtcgccttaaacaacaagaagatcccgccgagcagcatgatgagatcgcgcccggaaaaggagaaatcggcgatggtaatcagtggtttcgtcagcgtcaccatccaggagatcaccgacagcagccccaggcgcatcaccagcgccagtga

SEQ ID NO: 241124 - DNA, 246 bp, Klebsiella pneumoniae
atgtcagagatcaccgcatccgagcaaatccgcctggatatcatcaagaaagttaactacgacaccgcagcggccaagctggccattgactgggttggtgatagcaatctgaaagctgagctattcgctgactctttcgatcgtgtttacacggaaagcgagattgtctcgaagactcgtaaagcaattcaggaagcgaccgaagcgctggcgctttttgataccggcgctgagcaggccagctaa

SEQ ID NO: 241125 - DNA, 624 bp, Klebsiella pneumoniae
atgaacagcaactttcaattaccgctagatgacttcccggtggatcaccatcgtgcagatgaagtcttgaagttcctcaacgcgcagagttttattgaagttatcagaaaaccaacgttcccggcaggtagatgctattggaacgttgaagattgtatttctaagcatggaggcaaaagtatctatggctggatgattgaatgggttccagaacttaatgttgaagctatgcatcatgctatttatcaaaccccaaatggtgagctcattgatgtgtctgcaaccagtgggccaagatctggaaactacaccactttcattccatcaaacgaattggcaatcaacctttcagaaccaccgagaatcccaagaagaaattaccctttagtcaatgatcctgatttaattcgtcatttatacctttctgaaaggaatttctctgcacatacttcttttgtacgcgattttttgaaaaacggatatgcaatattctcagaaggagaggtaaaacaaatcaaaagcatagataaggcatttgaaaaaaaatacaaacctgaaattgaaaaaacccacaaagaagggcttgcagttagaaaaaaactacttattaggtatttccgataa

SEQ ID NO: 241126 - DNA, 303 bp, Klebsiella pneumoniae
atgctccgccagctccagcaatacgccaagtcccatcgcgttgtcgtcgatgccctgcagcgtcaggccgccgaggttgttctccacgtctttatcgctctgcggcgcataggtgtcgaggtgtgccatgataataatctgctggcgcactttaccttcatgggcggcgatcaccgtactgccggtggcgttatgccagttcttgcgctgattgctgtcggtatagatatagcgggtattgaagcttcgcacgtcgctctgataccccatcagggcgaactgctggcgcagatagtcagctga

SEQ ID NO: 241127 - DNA, 237 bp, Klebsiella pneumoniae; identical to SEQ ID NO: 212139

SEQ ID NO: 241128 - DNA, 552 bp, Klebsiella pneumoniae
atgcgcctttttggttacgcacgggtatcaactagtcagcagtcgctcgatattcagatcagggcgctcaaagaagcaggtgtgaaagcaaatcgtatctttactgataaggcatccggcagttcagttgatcgtccggggcttgatctgctgcgcatgaaggtggaggatggtgacgccattctggtgaagaagctcgaccgtcttggccgtgacactgccgatatgatccagttaattaaagcattcgacgctcagggcgtagctgtccggtttatcgatgacggaatcagtactgatggtgacatgggaaaaatggtggtcactattctatctgctgtagctcaagccgaacgtcaaagaatattagaacgaacaaatgaaggtcgccaagaagcaatggcaaagggagttgtgttcggtagaaaaagaaaaataaacagaggtgcgatattaaatatgtggaaacaaggtttaggagcctcacacatatcaaaaacaatgaatattgctcgttcaacagtatataaagtaataaatgaaagcaactaa

SEQ ID NO: 241129 - DNA, 372 bp, Klebsiella pneumoniae
atggccgaaccgacgctgagcgagaaactgcgcaccggcaatttgtttgcggaacagtgcccgtcgcgcgatgtgcttaaacatgtcaccagccgctggggcgtgttgattctggtggcgctgcgcgagggaacccaccgtttcagcgatctgcgccgtaagatgggcggggtcagcgaaaagatgctggcgcagtcgctgcaggcgctggagcaggatggttttatcgaccgcgtctcttatccggtggtgcccccgcacgttgaatatagcctgacgccgctcggcctgcaggtgagcgagaaggtggccgccctggcggactggatcgaggttaatctgccctcggtgctggctaaccacggggagtga

SEQ ID NO: 241130 - DNA, 1101 bp, Klebsiella pneumoniae
atgcggggagcgcagggtctgaggtttgcctttgatccacgccttcccgctgtccgccgttttaatgccgaagatcacctcggcggtttccgtgcgtccggaacccagcaggccggcgaggcctacaatttcgcccgggcggacctgcaggtcgaacggggcgatggttccttttttaccgtagccttcaaacgccgctaccggtttatcgctcagcagggtacggcccgcccgctgcagggcattgtggtccagttcgcgacccagcatcattttcaccagctcaatctgcggcagctcgcgggtctcacggcagcccacaaatgtgccgttacgcagcacggtgatgcggtcgctgaccgcatagacctggtcgagaaaatgggtgacgaagatcaggctgacgccgttatccctgagctggcgcatcagggtgaacagcatctccacctcctgggtatcgaggctggcggtgggctcgtcgaggatcagcaccttggccgacaggtcgatggcccgacagatagcgacgatctgctgcatcgccaccgaaaagcggttcagcggctcgcgcacgtcgagggaaaagccgtaggaggccatcagcgccgtcgccctggcctccatctctttacgtcgcagcagaccaaaccgccgcggctcacggccgatgaacaggttatccgccaccgacatattaggcagcaggttcacttcctggtagacggtgccgatccccagctgctgggcatgggcggtatttttgggcgaaatagcctggccttccagccagatagtgccgcgatcggcatgataaacgccggtcagcgctttgatcagcgtcgattttccggcgccgttttcgcccaacagggccatgatttcgccgcgccgcaggctaaagttgacgttatccagcgccttaacgccggggaagaatttactaagtccttcggtgcgaaggatctcctggtgtgcctcggcgctcataatcgatgtcaccttcaaatgatgtcaggttaccccgggtcgcgctgggcttcccggggtttctggaacgctgctttttaccctctcccaccggggggagggatggaatga

SEQ ID NO: 241131 - DNA, 561 bp, Klebsiella pneumoniae
gtgagagtacgcgaaaccagcgctgatgccatcccaaatatcgtaggtcagagaggtgccgaagccgtcgccgttctgtttgctccaaccacgaccgttgttggtcgcgccttcgccgctgacgctgccgtttttaccctgatactgcagagcaaagttcaggccgtcaaccagaccgaagaaatcagagttacggtaggttgcaacgccgttagcacgggactgcaggaagttgtcagaaccgtaggtgtcgccgccgaattccggcagaacgtcggtccaggacgttacgtcgtatactacgccgtagttacgaccgtagtcgaaagagcccgcgtcgccaaatttcaggcctgcgaatgccagacgagtccatgcctgatcgctggagctttcagtgttgttcgcctgaacgttgtattcccactggccgtaaccggtcagctggtcgttgatctgggtttcgcctttcacgcctacacgcatgtaggtctggtcgccgtcgacgctcttgtcgtcagagaagtagtgcagaccgtcaattttaccgtacaggtctaa

SEQ ID NO: 241132 - DNA, 2841 bp, Klebsiella pneumoniae
ttgaaatatcttgcctcttttcatacaaccctgaaggtttcacgttatctgttcagagcgctggcggtattgctgtggctgcttattgcgtttgtctctgtgttttatatcgtcaacgcgctgcacgagcgggaagccgaaatccatcaggagcttaatctcaacgccgatcaggcccagcgctatatccagcgtaccgcggatgtaatgaaagagctgaagtatgtcgccggtaaccgcttgtcggcaggggacgcgatagcgcaagggcaaaacggcgatatggcggtgcccaactttgaacccctgtaccccgattccgactgcagcgcgatgagcgccacctggcgtaattcgctgcagtcgctggcatggtttatgcgctactggcgggataattttactgccgcctacgaccttaaccgcatctttctcatcggcagcgataacctctgcatggccaactttggcctgcgggacgtgccgattgagcgcgatcaggcgctgaaagtcctgcatcagcgcatagagcaatatcgcaacgcgccgcaaaacgagcgcggcaacaacctgttctggataagccagggcgttcgccccggggtgggctatttttacgccctgacgccggtctatatggccaatcgcctgcaggcgatgctgggcgtggagcagaccatccgcatggaaagcttctttacgccgggcagcctgccgatgagtgtgacgatctttgacgataacgggcagccgctgatttcgctggccggtgcggaaggtaaaatccagagcgaagcgaagtggatgcaggagcggatgtggtttggctacagttcgggtttccgcgagctggtgctgaaaaaaagcctctcgccgtcctccctgagcatcgtctattccgtctcggtagatcaggtgctggagcggatccgtatgctgatcatcaatgctatcgttcttaatatcctcagcggcgcgatgctgttcgcgctggcgcggatgtatgagcggcgcatttttatccccgcggagaatgacgcccagcgcctggaagagcacgagcagttcaaccgcaaaattgtggcttctgccccggtagggatctgtattctgcgcactgccgacgggaccaatattctcagtaatgaactggcgcacaactacctgaacatgctgacccacgaggaccgccagcggctgacgcagatcatctgcggccagcaggtcaattttgtcgacgtgctgaccagcaaccataccaacctgcagattagctttgttcattcacgctatcgcaatgaaaacgtcgccatttgcgtgctggtggacgtttccgcccgcgtgaaaatggaggagtcgctgcaggagatggcccaggcggcggagcaggccagccagtcgaaatcgatgttcctggcgacggttagccatgagctgcgtaccccgctgtatggcatcatcggtaacctcgatctgctgcagaccaaagcgttgccgaaaggcgtcgatcgccttgtgacggcgatgaacaactcctccagcctgctgctgaaaatcatcagcgatattcttgatttctcgaaaatcgagtccgagcagttgaagatcgagccgcgggagttctctccgcgcgaagtcatgaaccatatctccgctaactatctgccgttggtggtgcgcaagcagctgggcctgtactgctttatcgagccggacgttccggaacaaatgtccggcgacccgatgcgcctgcagcaggtgatctcaaatctgctcagcaatgcgataaagttcaccgataccggctgtattgtcctgcacgtccagtgcgcgggggattatctgcagattagcgttcgcgacactggagaggggatcccggcgaaagaggtattgcgcctcttcgatcctttcttccaggtggggaccggcgtgcagcgcaattttcagggcaccggccttggcctggcgatctgtgaaaaactgatcagcatgatggatggcgatattgctgtcgaaaccgagccggggatgggtagccgctttaccatccgtattcctctgtatggcgtgcagaatacctcaccggtgagcagagacggtttcgctagcaagacctgctggctggcgattcataacacttcgctggcgatgttcgtcacctcgctgctcagctaccacggcctgacggtccgccgccatgccggcgaaacgccggacgccgaggatgtcttactcactgacgatgaggcgctgaacggatggcagggaagggccatggtcatcttctgtcgccgtcatatcggtattccgcaggagcggtccgccggcgaatggctgcacagcgtgacgactccccacgaactgctgccgctgctggggcgtattttccatgttgcgctcgccagtgcggaaaatagcccggcgctgatggccccggaggcgcaggccggcaataacgacgacatgatgatcctcgtggtcgacgatcacccgatcaaccgccgcctgctggcggatcagctgggttcgctcggctaccagtgcgtgaccgcgaacgacgggatcgacgcgctcaacgtcctcagcaagcagcacatcgatatcgtgctcagcgacgtcaacatgcctaatatggatggttatcgcctgacgcagcgcattcgtcagcttggcctgacgctgccggtgattggcgtaacggccaatgccctggcggaagagaagcagcgctgtctggaatcggggatggacagttgtctgtccaagccggtcaccctcgacgtactgaagcaaacgctgacggtatatgcggcgcgggtgcgtaaagggcgggaataa

SEQ ID NO: 241133 - DNA, 1251 bp, Klebsiella pneumoniae
atggaaagcaaagtagtagttccggcggaaggtcaaaaaatcaccctgcaaaacggcaaactgaacgtccctcacaatccgattatcccgttcattgaaggtgacggtatcggcgttgacgttaccccagcgatgctgaaagtggttgatgccgccgttgagaaagcctataagggcgagcgtaaaatttcctggatggaagtttacaccggtgagaaatcaacccacgtctatggccaggacgtctggctgccagctgaaaccctcgatctgattcgtgactaccgcgttgctatcaaaggtcctctgaccaccccagtcggcggcggcattcgttctctgaacgtggcgctgcgccaggagctggatctttacgtctgcctgcgtccggtacgttactaccagggcaccccgagcccggttaaacacccggaactgaccgatatggttatcttccgtgaaaactcagaagatatctatgcgggtatcgagtggaaagccgactctgcggaagcagacaaagtgatcaaattcctgcgcgatgagatgggtgtgaagaaaattcgcttcccggaacattgcggcatcggcatcaagccgtgctctgaagaaggcaccaaacgcctggtgcgcgccgcgattgaatacgcgatcactaacgatcgtgattccgtcactctggtgcacaaaggcaacatcatgaagttcaccgaaggcgccttcaaagactggggctaccagctggctcgcgaagagttcggcggcgagctgatcgacggcggcccgtgggtgaaaatcaagaacccgaacaccggcaaagagatcgtggtgaaagacgtgatcgccgatgcgttcctgcagcagatcctgctgcgtccggcggaatacgacgttatcgcctgtatgaacctgaacggcgactatatctctgacgccctggcggcacaggttggcggtatcggtatcgccccgggcgccaacatcggtgacgagtgcgcgctgttcgaagcgactcacggtactgcgccgaagtatgccggccaggacaaagtgaacccgggctccatcatcctgtccgcagagatgatgctgcgccacatgcagtggttcgaagccgcagacctgattgtcaaaggcatggaaggcgctatcgccgccaagaccgtaacctatgacttcgaacgtctgatggaaggcgctaaactgctgaaatgtagcgagtttggcgacgcgattatcgcgaatatgtaa

SEQ ID NO: 241134 - DNA, 297 bp, Klebsiella pneumoniae
gtggcggcggaagcagtaacgacaatttaccgcacaaccgcctttcaccagcagcagggcccggttgcgatacttgtgcaacagaccgggcaccacgctgtgctgttcttccagtggatcggtggagtagccgggggcgacgataaactcttcctcggcggtaagtacctgacgaagcagtggatcgttagggttgcctttctccatgcgggcgataaacgcgcgcgggacgcgcagcgggaacaggcgtctggcctcgcgtccggccagcagtttttcatcagcgtctacatttaa

SEQ ID NO: 241135 - DNA, 909 bp, Klebsiella pneumoniae
gtgattaatttacagcgtctggatctcaatctgttgcgcaccctggatgtgctgcttagcgaaaacaacgttacccgggcggcgcagcggctgaatctgtcgcagccctcggtgagtattcagctcgccaggctgcgggagattttcgccgatccgctgctgatgccgggcccgcgcggcatgcagcccaccgcccgcgccgatgagcttcgccagccgctgcgcgccgcattagccgcgctggagcaggcggtggcgccggtcagcccttttgatccggccacggcggcggagacctggcgggtggcggcgacggactatatggcctcggcgatcctcctgccgatgctggctgggttacgccaggcctctcccggcagtcggctggcggtattcgagctgcagcctgcgcggctggagcagcaggcggccagcgatacagtagatcttttctttcatacccgcgagggcgcgccgccggggctgcatcagcgcctgctgtttcgcgaacgctacgtgctggctggccgggcggaacattcggcgctgcggcctgggcttagcctggaaacgttctgtcagctggagcacgtgatcgtctccccggacgggggcggcttcagcgcggcgaccgatatcgcgctggcgaacctcggactgatgcggcgggttgtcctttccgtgccacatttcctgtttatgctggagaccctgcgcaatagcgatctggtggcggtcctgccggagcggctggtgcgcgggcagagcgggctggtggtcgtcgagccgccgctggcggtcgccggctttgagatgctgatgctgtggcacgagcgctggcaccgcgacccggcgcatcaatggctgcgtcagttcattgtgaattcactggaggaacagacatgctga

SEQ ID NO: 241136 - DNA, 729 bp, Klebsiella pneumoniae
gtggtcagggataaaaaaccgcgggccggaatgaccataagcgatgcagtaaacagcatcagggccagcgtaaacagggttaagcccaggttgtcgggtgtccgcggctcgcttttttctgtcgcaggcagagataccaggcctataagcagaacccctgccgagagcagcgcaaacagggcgtatacgccgcgccaacccaccgcgtcgatcatgaagccgatcagcagcggaccgaacgccaggccaatgccgaacaccgtgcccaggatgctgaatgcccgcgtccgctgggcgccatcatacagctgggccagcgccgcactgccgctggctaaaatcatcgccgcggccaggccctgcagcgccctcaacacgcctgacaggaagagattgtgcgtcagacaaaacagcagactgctcaggcaaaacagcgcggcgccggcgataaaaatacgttttctgtcgatggcatccgccgccaaccctgcggccagcaaaaagctgccgaatgtcagcataaagccattggtcagccacgacagcgcagcgggagagccgcccagcgactgctgtatcgcgggggtggtcatgacgccgccggtaaaacttaacggcagcagcaaggccgccataaagacagaaagcgcggccagggcgctggcgtatcgggaaggtgttctggcggggagtaacatcgggcggccctcatcagtcggcaaggaatga

SEQ ID NO: 241137 - DNA, 546 bp, Klebsiella pneumoniae; identical to SEQ ID NO: 135838

SEQ ID NO: 241138 - DNA, 957 bp, Klebsiella pneumoniae
atggcaccgattgcagtcaccctactcaccggttttctcggcgcaggaaaaaccaccctcctgcgccatatcctcaatgagcagcacggtttcaaaatcgccgtaattgaaaacgaattcggcgaagtctccgttgacgatcagctcatcggcgaccgcgccacgcagattaaaaccctgaccaacggctgtatctgctgtacacgctccaacgaactggaagacgccctgctcgatctcctcgacagtcgcgatcgcggcgaaatcgagtttgaccggctggtgattgaatgcaccggcatggccgacccggggccgattatccagacctttttctcccatcaggtgctctgcgagcgctatctgctggacggcgtgatcgccctggttgacgccgtccatgccgaccagcagatggatcagttcaccatcgcccagtcgcaggtcggctacgcggaccggatcctgttaaccaaaaccgacgtcgccggcgacaccgaaaagctgcgtgaacggctggcgcgcattaacgcgcgggcgccgatttataccgtcattcacggcgatatcgatttaagccagttgtttaacaccagcggttttatgctggaagagaaggttgtcagcgccacaccgcgctttcattttgtggcagaaaaacagaatgacgtctcgtcgattgtggtcgagctcgactatccggtggatatcagtgaagtttcacgggtaatggaaaatctgctgctctccttcgccgagcaattgatgcgttataaaggcatgctgtggatcgacggcgagccaaatcgcctgctgttccagggcgtgcagcgcctctacagcgccgactgggatcgcccgtggggcgatgaaacgccgcacagcacgctggtgtttatcggcattcagttgccggaagaggaaattcgcgcggcgtttgccgggttacgacgctaa

SEQ ID NO: 241139 - DNA, 204 bp, Klebsiella pneumoniae; identical to SEQ ID NO: 139580

SEQ ID NO: 241140 - DNA, 2151 bp, Klebsiella pneumoniae
atggataccaaaaaactattcaagcacataccctgggtgattctcggaatcatcggggcattttgcctctcagtcgtcgccctacgccgcggtgagcacgtcagcgccctgtggatcgtcgtcgcatcggtttctgtgtacctcgtcgcctaccgttattacagcctgtacatcgcgcagaaggtgatgaagcttgacccgacgcgctccacgccggcggtcattaataacgatggcctgaactatgtgccaaccaaccgctacgtgctgtttggccaccactttgccgcgatcgccggcgccggcccgctggtcggcccggtactggccgcgcaaatgggttatctgccgggtaccctgtggctgctggccggcgtggtgctggcgggcgcggtacaggacttcatggtgctgtttatctcctcgcggcgtaacggcgcctcgctgggtgagatgattaaacaggagatggggccggttccgggctctatcgccctgttcggctgcttcctgattatgatcatcatcctcgcggtgctggcgctcatcgtggtgaaagcgctggcggaaagcccgtggggcgtgtttaccgtctgctcgacggtgcctatcgccctgtttatggggatctacatgcgcttcctgcgcccaggccgcgtcggtgaagtgtcggttatcggtatcgtgctgctggtggcctctatctggttcggcggcgtgattgcccacgacccgtactggggcccggcgttgacctttaaagataccactatcacctttaccctgattggctacgcgttcatttccgcgctgctgccggtatggctgattctggcgccgcgcgattatctggccaccttcctgaaaatcggcgtgatcgtcggcctggcgctggggattgttatcctcaacccggacctgaaaatgccggcagtgacccagtacattgatggtaccggtccgctgtggaaaggcgccctgttcccgttcctgtttatcaccatcgcctgcggcgcggtctccggcttccacgcgctgatcgcctccggtaccacgccgaagctgctggccaacgaaaccgatgcccgctttattggctacggcgcgatgctgatggaatcctttgttgcagtcatggcgctggtcgcggcctcgattatcgaaccgggtctctacttcgcgatgaacaccccgccggcgggcctgggcatcgtcatgccgaacctgcatgaaatgggcggtgaaaacgcggcgatgatcgcagcgcagttgaaagaagtcaccgtccacgcggcggcgaccgtcagctcctggggctttgtgatttcacctgagcagatcctgcagacggcgaaagatatcggcgaaccttcggtactgaaccgcgctggcggcgcgccgacgctggccgtcggtatcgcccacgtattccataaaatcatcccgatggcggatatgggcttctggtaccacttcggtatcctgtttgaagcgctgtttatcctcaccgcgctggatgcgggtacccgcgcaggccgctttatgctgcaggatctgttgggtaacttcgtgccgttcctgaaaaaaaccgactcgctggtcgccgggattatcggtaccgccggctgcgtcgggctgtggggctacctgctgtatcagggcgtggtcgacccgctgggcggcgtgaagagcctgtggccgctgttcgggatctctaaccagatgctggccgccgtggcgctggtgcttggcaccgtggtgctggtcaagatgcagcgcaccaaatatatctgggtcaccgttatcccggcggcatggctgctgctgtgcaccacctgggcgctgggcctgaagctgttcagcagcaacccgcagatggaaggcttcttctttatggctcagcagtataaagagaagattgccgccggcggcgagctgaccgcgcagcagatcgccaacatgaaccatatcgtggtcaacaactacaccaacgccggcctgagtattctgttcctggtggtggtgtatagcatcatcttctacggcatcaaaacctggctcaatgtccgcaacaataaggtgcgtaccgacaaagagactccgtatgtgccggtaccggaaggcggcgtgaagacctcgtcacatcattaa

SEQ ID NO: 241141 - DNA, 624 bp, Klebsiella pneumoniae
atgaaatttgtaaagataatgatcatcgccagtgctttttacttaacatatgctcatgcaagagagatacatcaggctgttgatgagccggcagccccttataatttgcgctgggggatgagttacgatgaggccagaaacacgcctttatattctctggaggtatcagatatcaattatgccggaaaagacccggatctgattatctcaacgctgactccccaggaagtgggggcgttgaaatatcaggagatgaagctttatttcgataagaataaagggctaaaaagtgtttttgttagcgctgatgttgattccagtcagcaggcctataaagttgatgatggccgggaagcactcgccttatataatgaggaagttaaggttcttgatcgagaatatgggccagcgacaatcaaagaagagttcattgcagaaagagggaaattctatcaaagtcttgccgcctgcattgcaaaacagcaggagtggtataataaaagattagatctgaataaaataacaaattgttcaacctggcaacgtacttataaaaaaggtcgggtaaccgttttgctatacatcgaaccgagacaagtttccaaacattatatttataaataa

SEQ ID NO: 241142 - DNA, 822 bp, Klebsiella pneumoniae
gtgagaatgtataagattttttttagaattattgccatggtcattatggttatgatcctttctgattgtcgtcagtcgtattatattgccagaaatacggggcgcaatataatgaccttatccgaccatcagcgcgctaaatcggcgttaaacgctaacgatttaaatgcagctcagggctacctgacgggagaaaaatacaataatcgctacaggcctgttagcggtgaggaatcctggggaagtttacaatatcgggcggcgaaaatcgtcgccaacgccgcggcgaacggtcaaaaagtgcgtaatgatgcgctctatctcgcttatatctctttgtttgaagcagaagagggagtgcccgaacatcccgatattatgttgggttacatgcataaagccatggcgctactgttagcgaatccgcaattactcgataaaatcgattctaaaaatgtcagtactttacccagccagtttacccttgaacgctatgctgtatggcaatatttatacgatggcggcgagattgactggaccaaaaaagcgcctgaaggtgaaggttatacaattgctggtgaaagctatcagacctggaatatcaagttaaaaaaagccatctggaatcggggagacgcttttttaacaaatataggtaaacaacaatttattcatgacgctatagattattcgcaattcccggttattgcctgtaccgccaggcgaaaaggctggcacttaacattacctgctgactaccgggaacaaaatttccgcggcggtggacgttttgattgggcttcatgtcgcgctgttgaataa

SEQ ID NO: 241143 - DNA, 513 bp, Klebsiella pneumoniae
atgcaattagatgaacaacgcctgcgttttcgcgatgccatggccagcctgtcggctgcggttaacgttgtcaccaccgcaggcgaagccggccgctgcggcattaccgccacggcggtatgctcggtgacggatacgccgccatcggtgatggtttgtatcaacgccaacagcgcgatgaacccggtgtttcagggtaacggcaagttgtgcatcaacgtgctgaaccacgaacaggaaatcatggcccgtcatttcgccgggatgaccggggtgacgatggaagagcggtttgccctcagcggctggcagcagggcgcgctcgggcagccggtgctgaaaggttcgctggccagtctcgaaggcgagattagccaggtgcaaaccattggtacccacctggtgtatctggtggagatccgcaatattaccctgagcccgcaagggcacggcctgatttactttaaacgccgtttccacccggtgatgatggaaatggaagtggcagtctaa

SEQ ID NO: 241144 - DNA, 1563 bp, Klebsiella pneumoniae
atgaaacctgaagatttccgcgccgacgcgaaacgcccgttaactggcgaagagtatttaaaaagcctgcaggatggccgcgaaatttatatctacggcgagcgcgtgaaagacgtcaccacgcatccggccttccgtaatgccgcggcctccgtcgctcagctgtacgatgcgctgcacaaaccggagatgcaggattccctgtgctggggcaccgataccggcagcggcggctacacccacaaattcttccgcgtggcgaaaagcgccgacgatctgcgccagcagcgcgacgccatcgccgaatggtcgcgcttaagctacggctggatgggccgcaccccagactacaaagccgccttcggctgcgcgctgggcgccaacccggcgttttacggccagttcgagcagaacgcccgcaactggtacacccgcattcaggaaaccggcctgtactttaaccacgcgatcgtcaacccgccgatcgaccgccacaagccagctgatgaagtgaaggatgtctacatcaagctggaaaaagagaccgatgccgggatcatcgtcagcggcgcgaaagtggtcgccaccaactcggcgctgacccactacaacatgatcggcttcggctccgcacaggtgatgggcgagaacccggacttcgcgctgatgttcgttgcgccgatggatgccgaaggcgtcaagcttatctcccgcgcctcctatgagatggtcgccggtgcgaccggctcgccgtacgactatccgctttccagccgtttcgacgagaacgacgcgattctggtaatggataaagtgctgatcccctgggagaacgtgctgatttaccgcgactttgaccgctgccgtcgctggaccatggaaggcggttttgcccgcatgtaccccctgcaggcctgcgtgcgtctggcggtaaaactggactttatcactgccctgctgaagcgttctctggaatgtaccggcaccctcgaattccgtggcgtgcaggccgaccttggcgaagtggtggcgtggcgcaacatgttctgggcgttaagcgattccatgtgctcggaagcgacgccgtgggtcaacggcgcatggctgccggatcacgccgcgctgcagacctatcgcgtgatggccccgatggcctacgccaagatcaagaacatcatcgagcgcaacgtcaccagcggcctgatttatctgccgtccagcgcccgcgatctgaacaacccgcagatcgaccagtatctggcgaagtacgtgcgcggctccaacggtatggaccacgttgaacgtatcaaaatcctcaaactgatgtgggacgccatcggcagcgaattcggcggccgccatgaactgtatgaaatcaactactccggtagccaggatgaaattcgcctgcagtgtctgcgccaggcgcagagctccggcaatatggacaagatgatggcgatggtcgaccgctgcctgtccgagtacgaccagaacggctggacggtgccgcatctgcacaataatgctgatatcaacatgttggataagctgctgaagtaa

SEQ ID NO: 241145 - DNA, 891 bp, Klebsiella pneumoniae
atgtgccagcattccatcgccaacatcgacatcaataaagattacgacgagagtctgggtaccgaagaggtgcactaccagtcgttctcccgcatggcggccttttttggccgcgacatgcaggcgcatcgccacgaccgctatttccagatgcactaccttgataccggacagattgagctgcagcttgatgaccatcgctattcggtgcaggcgccgctgtttgtgataacgccgccctcggtaccgcacgcctttattaccgagtccgatagcgatggccatgtgttgacggtccatgaggagctgatctggccgctgctggaggtgctttatcccggcacgcgggagaccttcggcctgccggggatctgcctgtcgctggcggataaacccgacgagctggcggcgctggcccactactggcagctgattcgccgggaatctaccgcccagttgccggggcgggagcataccctggcgctactggcgcaggcggtctttaccctgctgctgcgtaacgcaaagctcgacgatcacgccgccagcgggatgcgcggcgagctgaagctattccagcgctttaaccagatgatcgacagccactaccatcagcactggacggtaccggattacgccagggagctgcatctgaccgaatcgcggttgaccgacatctgtcgccgcttcgccaaccgttcgccgaagcggctgatattcgaccgtcagctgcgcgaggcgaagcgcctgctgctgttctccgatagcgcggtcaatgagattgcctggcagctggggtttaaagaccccgcctattttgcgcgcttttttagccgccaggtcggctgctcgcccagcagctaccgggcgcaaaaagtaccggtttcgtaa

SEQ ID NO: 241146 - DNA, 1359 bp, Klebsiella pneumoniae
atgactacctctaccctgcaacacaatgataataaagccgatgaagtagaaaaccgggtgatcaaaaagctgttccgccgcctgattaccttcctgtttgttctctttgttttctcatttttggatcgcattaatatcggcttcgccggtctgacgatgggtaaagatctcggcctgacctccaccatgttcggcctggcggcgacgctgttctacgtcacctacgtgctgtgcgggatccccagcaatatcatgctggcgaaagttggcgcgcgccgctggatcgccgggatcatggtggtctgggggatcgcctcgacctgcaccatgttcgccaccagcccgcatacgctgtacatcctgcgcatgctggtcggcatcgccgaggctggttttctgccggggatcctcgtctatctgacctggtggttcccggcctaccatcgcgcccgcgccaacgccctgtttatgatcgccatgccggtgaccatgatgctcggctcgatactttccggctatattctggcactcgacggcctgtggaacctgaaaggctggcaatggctatttctgctggaaggcctgccgtcggtggtgctcggcgtcgtcacctggttcttcctcaacgacacgccggataaagccaactggctggataacgaagagaaacaggcgctgaaggcgatgatcgatcgcgaacgggaacatgcggcgatcgtcccggcttcgccgcgttccacgctgcgcgaagtactgacgccagcggtgctgatgtacaccctcgcctacttctgcctgaccaataccctcagcgccattaatatctggacgccgcagattctgcagagcttcaacaccggcagcagcaacatcatgattggcctgctggcggcgatcccgcagttctgcactattttcggcatgatctggtggagccgccgatccgaccgccgcaaagagcgcaagatgcataccatcctgccctacctgttcgccgcggcgggttggctgctggcttcggcaacgcaccacagcctgatccaactgatcggcattattatggcttcggtgggatcctttaccgcgatggccattttctggaccaccccggatcgggtgatcagcctgcagtcgcgcgcggtggcgttggcggtgatcaacgctatcggcaacgtcggctctgccgtcagcccgctgttgatcggcattttgcgcgataccaccggcagctttagctccgggctgtggtttgtcgccggtttactgatcgtcggtgcgctggtgcttacccgcattccaatgagccagcgtgaggacgccgccgccgcgccgggattagcggcgcaaaaaggccactaa

SEQ ID NO: 241147 - DNA, 804 bp, Klebsiella pneumoniae
atgctcgataaacagacccgtaccctgattgcccagcggctgaaccaggccgaaaagcagcgtgaacagatccgcgcgatctcgctggattatccgtcgatcaccattgaggacgcctacgccgtccagcgcgagtgggtcgagatgaagatcgccgaaggccgcgtgctcaaaggccacaagatcggcctgacctctaaagcgatgcaggccagttcgcagatcagcgagccggactacggcgcgctgctcgacgatatgttcttccacgacggcagcgatattcccaccgaccgctttatcgttccgcgtatcgaagtcgagctggccttcgtgctggccaaaccgctgcgcggcccgaactgtacgctgtttgatgtctacaacgccaccgactacgttatcccggcgctggagcttatcgacgcgcgctgccacaacatcgacccggaaacccagcgtccgcgcaaagtgttcgacaccatctccgacaacgccgccaacgccggggtgatcctcggcggccggccgattaaaccggacgagctcgacctgcgctggatctccgccctgctgtatcgcaacggcgtaattgaagagaccggcgtcgccgcgggcgtactcaatcatccggccaacggcgtggcctggctggccaacaagctggcgccgtacgatgtccagctcgaagccgggcagattatcctcggcggctccttcacccgcccggtcccggcgcgcaagggcgataccttccacgtcgactacggcaacatgggcgccatcagctgccggtttgtctag

SEQ ID NO: 241148 - DNA, 381 bp, Klebsiella pneumoniae
atgccgcattttatcgccgaatgtaccgacaatatccgcgagcaggccgatctgcctgggctgttcgccaaagtcaacgaggcgctggccgccaccggcatctttccgatcggcgggatccgcagccgcgcccactggctggatacctggcagatggccgacggcaggcaggattacgccttcgtgcatatgaccctgaagatcggcgccgggcgcagcctggagagccgtcaggacgtgggagatatgctgttcgcgctgatcaaatcccacttcgcgacgctaatggagagccgctatctggcgctgtcgttcgccatggaagagctcgacccgacgctgaactacaaacaaaacaacgtgcacgcgttatttaaataa

SEQ ID NO: 241149 - DNA, 270 bp, Klebsiella pneumoniae
atgaacagctacacccgcgaatttgaccatcaaatggatgagcgggtggtgaagctatggcgcgagggcaaattcaaagagttctgcaccatgctgccggagtatgccgactactgctacggcgaaggcaacatgcacgacacggtgatgctgctcggcctgctgggttgggataaatacgacggcaaggtggagtttatcaccgagctattcgccagctccggtaccggccaggttaacgccgtgttcccgttgccagcgcaggcgtaa

SEQ ID NO: 241150 - DNA, 897 bp, Klebsiella pneumoniae
atgaaactcccgccgctgaatgcgttgcgctgctttgaggcggcggcgcggctgctcagcctgaagctggccgccagtgagctttgcgtcacgcccagcgccgtcagccagcagattgcccgccttgaggagacgctgaatgtcccgctatttatccgtactccgcgacggttacagttaacggcggtgggagagatctacctgcgggccgttcagccggcgtttcatcagatagccgccgccacccagcgtctgcaggtgcccccgggaccagaaaaggtggctatcagctgtaccagcggcttcgccattcagtggctgctgccgcggctggctgattttgaacgacgctatccgcagatagagatccagatcggcaccaccaaccggcgagtggatttgctgagtgaagggatcgattttgccgtgcgtcatggtgtcggcggctggccggaactgcaggcttaccgcctgctggatgacgacctgatgccggtctgtagcccgcagctgatcgctccgcgccggacgctcaccgatgcgagcgatctactgcagtatccgctgctgcacgatgaacatcgtgaagactgggcgctgtggtgtgaggccgtggggctggcgccgcacttcgcgcggcgtgggccggtgttcactgattccaacggcgtgatggaggcggcgttcgccggtatggggatggcgttgctgcgacgctcattcatagcgcctgcgctgacgcaggggcggctggttaatcctctggcgcagcccatcgcctgtccgctggcctatcatctggtttaccacgagaccgcgctgctggcgcctgccaaccgctgttttcgcgactggctgcttggccagcgcccggccgttgctgaggagcgcgcgtag

SEQ ID NO: 241151 - DNA, 909 bp, Klebsiella pneumoniae
atgcgtgttatcgactatggccgcctgctgctgctcgccgccctctggggcgccagctttttgtttatgcgcatcaccaccccggccttcggggcgttgaacagcgcttttcttcgcgtactgttcgccgctatcgcgctcgggctgttactcggcgtgcagggtaaatggagcgggtatcagggaaaattcacatccactctgcagctgggggtcattaattcaggccttccttttctcatgtactgccttgccgcgcaatggctgccggcagggtactccgccacgcttaacgccacggcgccgatgatgggggtgctgatcggcgcgttatgctttgcagaaccgttaaccctgcgcaaaggcggcggcgcgatactgggcgccattggcgtggcggtgatcgcgcgcccgacatctggccttagcgccgccctgctgctgccggggattggcgcctgcctgaccgcgaccgcctgttacggtctggccggctttctgacccgccgctggatccagcagcgaggcggcctcgaggctgaacgcgtcgcgctgggtagccaggtcggcgccacgctgtttctgtttcctttctttctctggtcctgctggcatgggcctgccgtagactggcggcagagtctgccgtggatagcgatagtcatgctgggcgtggtctgcacggcggcagggtatattctctacttccgcttgattgcagatatagggccgctgcgttcgctgtcggtgacctttttgatcccaccttttgcggcgctgtggggctatctctgcctcggagagacagtggaggaaggattgattctcggcgcgctgctggtttgtgtagcgctatggatgattatcgtgccgtcggggcgaaaacgcggggtaccggacggcgcatga

SEQ ID NO: 241152 - DNA, 621 bp, Klebsiella pneumoniae
atgagccagtttttttatatccatccggataacccgcaggcgcggttgattaaccaggcggtggagattgtgcgtaagggcggggtgatcgtttatcctaccgactccggctacgcgctgggctgcaaaattgaagacaagggggcgatggagcggatctgccgcattcgtcagctgccggacggccacaactttaccctgatgtgccgcgatctgtccgagctgtcaacctacgcttttgtggataatgtggcgtttcgcctgatgaaaaacaacacgccgggcaactatacctttatccttaaggggaccaaagaggtgccgcgtcggctgctgcaggagaagcgtaaaaccatcggcatgcgcgtcccgtctaaccccatcgctcaggcgttgctcgagaccttaggcgagccgatgctctccacgtcgctgatgctgcccggcagcgactttaccgaatccgacccggaagagatcaaagatcgtctggagaaagtggtggacctcatcattcacggcggtttccttgggcagcagccgaccacggttatcgatctcactgaagacaccccggtggtgctgcgcgaaggcgtcggcgacgtgaggccgtttctctaa

SEQ ID NO: 241153 - DNA, 864 bp, Klebsiella pneumoniae
ttgagcgacagccaatacgcagtgatttacgatctgcacagccataccaccgcctctgacgggcggctgactccgcaggaactggtccatcgcgcccatgagatgcgcgtcggcaccctggcgatcaccgaccatgacagcgtggcggcgatcccggcggcccgggaggagatcgcccgcgccggattacccttgaccctggtgaacggcgtcgagatttccaccctttgggagaatcacgagattcatattgtgggtctgaatattgatattgcgcacccaacgatgaccgccctgctggaggagcagaaagcgcggcgccagcagcgcggtcagatgattgccgagcgcctggagaaggcgcggatccccggcgcctgggaaggggcgctgcgactggcggacggtggcgccgtcacccgcggccattttgcccgttttctggtggaggccggccatgcgaaaaacatggcggaagtcttcaaaaaataccttgcccgcgggaaaaccggttacgtgccgccgcagtggtgtacaataaaacaagcgattgatgtgattcatcattctggcggcaaggcggtgattgcccatcccgggcgctacgatctttccgccaagtggttgaagcggctgttggcccactttagcgagcagggcggtgatgccatggaagtggcccagtgtcagcaggcgccccatgaacgcgcccagctggccaccctggccgtgcagtttggtcttctggcgtcgcagggatccgattttcatcagccctgcgcgtggatcgaacttggccgtaagctctggcttcctgccggcgtggaaggcgtctggcacagttgggaagcggccgccgaataa

SEQ ID NO: 241154 - DNA, 1563 bp, Klebsiella pneumoniae
atgcaaacatccaaaccggcactcgagcttctcaccagcgacgccatctaccgggagaacccgacggcgttattccaccaactgtgcggcgcccgtccggcgacgctgctgctggaatccgctgacatcgacagcaaagatgacttaaaaagcctgctgctggtcgatagcgcgctgcgcattacggcccttggtgacactgtcactattcaggccctctccgccaacggcgcggcgctgctggaactactggacggcgcgctgccctccgggatcaacaatcagcgccagcccaacggccgcatcctgaccttcccggccgtcagcgccctgctcgatgaagacgcccgtctctgctcactgtcggtgtttgacgccttccgtctcctgcaggagctggtgagcgttccggacaacgagcgcgaagcgatgttcttcggcggcctgttcgcctatgacctggtggccggttttgaagatcttccccagttgcaaagcgacaccgcctgcccggactactgcttctatctggcggaaaccctgctggtcatcgaccatcagaccaagcatacccgcattcaggccagcctgttcaccccgctggagagtgaaaaacagcgcctggagcagcgcctgagccagctgcgtcagcagctgaacgagccgccggcgccgctaccggttaccaccgtggccgaaatgcgctgcgacgttgaccagagcgatgaagagtacggcgcggtggtgcgcaaaatgcagcgcgcgatccgcgccggggaaatcttccaggtggttccttcccgccgcttctctctgccctgcccatcgccgctggccgcttatgatgtgctgaagaagagcaaccccagcccgtacatgttctttatgcaggacaatgatttcaccctgttcggcgcctcgccggaaagctcgctgaagtatgatgccgtcagccgtcagattgagatctaccccatcgccggcacccggccacgcggccgccgcgccgacggctcgctggatcgcgacctcgacagccgcatcgagctggaaatgcgcaccgatcataaagagctttccgaacacctgatgctggtggacctggcgcgtaatgacctggcgcgcatctgcaccccgggcagccgctatgtcgctgatttaaccaaggttgaccgctactccttcgtgatgcatctggtctcccgtgtagtaggcgaattgcgtcaggatctcgacgtcctccacgcctatcgcgcctgcatgaatatgggcaccctcagcggcgcgccgaaggtccgcgccatgcagctgattgccgccgccgaaggtaaacgccgcggcagctacggcggcgcggtgggctatttcaccgcccacggcgacctcgacacctgcatcgtcatccgttccgcctacgtgcaggaaggtatcgctaccgtccaggccggagccggcattgtgctcgactcggttccccagtcggaagcggatgagacccgaaataaagcccgcgcggtgctgcgcgccattgcccaggcccatcacgcgaaggagattttctga

SEQ ID NO: 241155 - DNA, 1596 bp, Klebsiella pneumoniae
atggctgacattctgctgctcgataatatcgattcctttacctataacctggcagaccagctgcgcgccaacggccataacgtagtgatttatcgcaactccgttccggcgcaggcgctgattgagcgtctgggcaccatggacaacccggtgctgatgctctccccgggcccgggtacgccaagcgaagccggctgcatgccggagctactgacccgtatgcgcggcaagctgccgatcatcggcatctgcctcggccaccaggccattgtcgaagcctacggcggctatgtcggccaggcgggcgagatcctccatggcaaagcctccagcattgagcacgacggccaggcgatgtttgccggtctggctaacccgctgccggtggcgcgctaccactcgctggtcggcagcaatattcccgccgggctgacgattaacgccaatttcaacggtatggtgatggcggtgcgtcacgatgcggaccgggtgtgcggcttccagttccacccggaatcgatcctcaccacccaaggcgcacggctgctggagcagaccctggcctgggcgctgcagaagctggagcataccaacaccctccagccgatccttgagaaactgtaccaggcggaaaccctgagccagcaggagagccaccagctgttctccgccgtcgtgcgcggcgaagtgaagcctgagcaactggccgccgcgctggtcagcatgaaagtgcgcggcgagcagccgcaggaaattgccggcgccgctaccgcgctgctggaaaacgccgcgccgttcccgcgcccggactacctgtttgccgacatcgttggcaccggtggcgacggcagcaacagcatcaatatctccaccgccagcgcctttgtcgctgcggcctgcgggttaaaagtggcgaaacacggcaaccgcagcgtctccagtaaatcaggctcttctgacctgctggcggccttcggcattaatctcgatatgaacgccgataaatcccgcgccgcgcttgatgagctgggcgtctgcttcctgttcgcgccgaagtaccacaccggtttccgccacgcgatgccggtccgtcagcagctgaagacccgcaccctgttcaacgtgctggggccgctgatcaacccggcgcatccgccgctggcgctgattggcgtctacagcccggaactggtgctgccgatcgccgagaccctgcgcgtgctgggttatcagcgcgcggcggtggtgcacagcggtgggatggatgaagtttcactgcatgcgcctacggtggtggccgaactgcataacggggaaattaaaagctatcagctgaccgccgacgacttcggcctgacgccttaccatcaggcgcagctggcgggcggcaccccggaagaaaaccgtgacattctgacgcgcttgctacaaggtaaaggtgaagccgctcacgaagccgccgtcgccgccaacgtcgccatgttgatgcgtttacacgggcatgaagatctgaaagctaacgctcagcaggtactggatgtgctgcacagcggcgcggcctatgacagagtgaccgccttagcggcaagagggtaa

SEQ ID NO: 241156 - DNA, 1359 bp, Klebsiella pneumoniae
atgcaaaccgttttagcaaaaatcgttgccgacaaagcgatttgggtgcaagcccgcaaacaacaacaaccgttagccagttttcaaaatgagatcgttccgacgcagcgcaatttctatgacgcactggccggcacccgcaccgcgtttattctcgagtgcaagaaggcctcgccgtcgaaggggttgattcgcgaggatttcgatccggcagcgatcgccagcatctacaagcactacgcctcggcgatctcggtgctgtgtgatgagaaatatttccagggcagcttcgatttcctgccgatcgtcagccaggtcgcgccgcagccgatcctgtgtaaggacttcaccatcgacccttaccagatctacctggcgcgctactatcaggccgacgcctgcctgctgatgctctcggtgctcgacgatgaacagtatcgtcagctctcggcggtggctcacagcctgaatatgggcgtgctcaccgaagtcagcaatgaagaggaactggagcgcgccatcgccctgaaggcgaaggtggtgggcattaacaaccgcgacctgcgcgatatgtcgattgaccttaaccgcacccgtcagctggcgtcgcgtctcggcccggatgtcacggtgatcagcgaatccggcatccatacctatgccgaagtgcgcgagctgagccacttcgccaacggcttcctgatcggctccgccctgatggagcaggcggatctggaaacggcggttaaacgcgtgctgctcggcgagaacaaagtgtgcggcctgacgcgcccgcaggatgcccaggtggcctgggagtccggcgccatttacggtgggctgatcttcgtcccgacctcgccgcgagcggtgaatgacgcccaggccaaagcggtgatcgccgctgcgccgctgcagtacgtcggcgtcttccgcaatgcgccgctggaggaggtggtcgcccgcgcgcaggctctggggctggccgccgtgcagctgcacggtgatgaagaccaggcctatatcgacgcgctgcgcgacgccctcgcggacaaagtccgcatctggaaagcgcttagcgtcggcgaaaccttcccggcccgtacgctccaccatgtcgacaagtacctgctcgacaacggccagggcggcagcggccagcgctttgactggagcctgctgcagggccaggatctgcgcaacgtcatgctggcgggcggcctcggcgccgataactgtgtggaagcggccaaaagcggctgtgccggactcgatttcaattcaggcgtagagtcgcaacccgggattaaagacgccagcaagctggcctccgtattccagacgctgcgcgcatattaa

SEQ ID NO: 241157 - DNA, 1194 bp, Klebsiella pneumoniae
atgagcactttactgaacccctacttcggcgaattcggcggcatgtatgtgccgcagatcctgatgcccgccctgcgccagctggaagaagcctttgtcagcgcgcagaaggacccggcctttcaggcggaattcaccgacctgctgaaaaactacgccggtcgtccgacggccctgaccaaatgccggaatctgaccgaaggcacccgcaccaccctgtacctgaaacgcgaagatctgctgcacggcggcgcgcacaaaaccaaccaggtgctgggccaggctctgctggccaaacggatgggcaaaaccgaaattatcgccgagaccggcgccggccagcacggcgtcgcctcagcgctggccagcgccctgctcggcctgaaatgccgtatctacatgggggccaaggacgtcgagcgccagtcgccgaacgtcttccgtatgcgcctgatgggcgccgaggtgatcccggtgcacagcggctccgccacgctgaaagatgcctgtaacgaggcgctgcgcgactggtccggcagctacgaaaaggcgcactatatgctgggcaccgccgccggtccgcacccgttcccgacgattgtgcgtgaattccagcgcatgattggcgaagagaccaaagcgcagatccttgaaaaagagggccgcctgccggacgcggtgatcgcctgcgtcggcggcggatcaaacgccatcggcatgttcgctgattttatcgaggaaaccaacgtcggcctgatcggcgtggagcccgccggacacggtatcgagagcggcgagcacggcgcgccgctgaagcatggccgcgttgggatctacttcggtatgaagtcgccgatgatgcagaccgccgacggccagatcgaagagtcttactccatttccgccgggctggacttcccgtccgttgggccgcagcacgcgtttctgaacagcaccggtcgcgctgactatgtgtcgatcaccgacgacgaagcgctggacgcgtttaaagcgctttcccgccacgaagggattatcccggcgctggagtcctctcacgctctggcccacgcgctgaagatgatgcgcgagaacccggaaaaagagcagctgctggtggttaatctctccggccgcggcgacaaagacattttcaccgtacatgacatcctgaaagcgcgaggggaaatctga

SEQ ID NO: 241158 - DNA, 810 bp, Klebsiella pneumoniae
atggaacgctatgagacgctgtttgcccaactgaaaaatcgccaggaaggcgccttcgtcccctttgtcacccttggcgatccgggaccggagcagtcgctgaaaattatcgatgcgctgatcgaaggcggcgccgatgcccttgaactggggatccctttctccgacccgctggcggacggcccgaccatccagggcgcggccctgcgcgccttcgccgcgggagtgaccccggcgcagtgctttgagatgctggcggcgatccgccagaagcatccgaccatcccaatcggcctgctgatgtatgccaacctcgtcttcagcccgggcatcgatgcgttctatgcccagtgcgcccgcgtcggcgtcgactcggtgctggtggccgacgtgccggtggaagagtccgccccgttccgccaggcggcgatgcgccataacatcgcgccgattttcatctgcccgcccaatgcggatgacgatttactgcgccagattgcctcttatggccgcggctacacctatctgctgtcgcgcgccggagtgacgggtgcggaaaatcgcgccgcgctgccgctgcaccacctggtggagaagctggcggaatatcacgccgcgccgccgctgcagggctttggtatctccgcgccggagcaggtgagcgccgccattgacgccggagccgccggggctatctccggttccgccatcgtcaaaatcatcgaacgccacctcgatgagccgcagaccatgctcgacgagctgaaagccttcgtccagagcctgaaggcagcgaccaaaaccgcctga

SEQ ID NO: 241159 - DNA, 1398 bp, Klebsiella pneumoniae
atgaataacgaacaggctgcagagatcctgcaggatatctttcaacatgcggtcaacagtgcccgcgccgggccggtgaccctggctaacctgccggaaaaacctcgcggccgttgtgtggtgatcggtgcgggtaaagcgtccgcggcaatggcggctgccgtggatgcggcctggccggatgtggcggtgtcgggcgtggtggtgacgcgttacggttacgcggttcctgcgggccgcatccgcattattgaggcggctcatcccgtatcagatgccatgagcgaggttgccgcaatgctgattgtggagacgctgcgcggtttaactgccgatgatctggtgctggcattgatttcagggggagggtcggcgctgatggcgctgcccgccccggggttaacgttggcagataagcagaccatcacccgggccctgctccatagcggggccagcatcaaagagatgaatctggtacgtcgtcatctctcagcggtgaaaggcggaaagctggcgaccatggcgcaaccggcgcgcatcgtatcactgattatcagcgatgtgcctggcgataatccgacggacgtagcgtctggccccaccgttgccgataacagcgcaccacgtgatgcgctccgggtactgcagcggtatggcattgcgatcccgaagcccgttagcgaacggctaaaccagccggccggcccggtggaaaacgccgcgacaggcgaggtcaggcttatcgccacgccggcgatggcgttagcggcggcggctctggccgcacgacaacatgggttcaccccccttattttgggggatgctatagaaggtgaaagcagggaagtggcggtggtcatggccggtatggcgagatcggcgaagcagtatggtcacccgatttcagggcctgctgtgctgttgtcaggtggcgaaaccacggtgacagtaaacaacactcagcctggaaaagggggccgcaataccgagtttttactcagtctggcctgtgcgctccagggggaacacggtatctgggccatggcgggagatagcgatggtattgatggcacagaagatgccgcaggtgcgatcgtcttcccggatacgcttgcgcgcggcaagctgagcggtcttaatgcagtgcaatatctggatggccatgatagttactgctattttcacgcgcttaatgatttgctgatcaccggcccgacgttaaccaacgtcaatgatattcgggcaatattgattgcctcactgtatcgctctcctgtgccagggagagcgatatttttccctttcaacatagttcaaatcttcggtatccgcccgccatccatttccacgctaaagcgcatcgcctggcgtcaaggtgtcgatcatcggtccgtctga

SEQ ID NO: 241160 - DNA, 1089 bp, Klebsiella pneumoniae
atgcgtcactacaaaattgctgccatccctgcggacggtatcggaccggaagtcatttcggcaggtattgaagtcttgcacgcgctgacgcgccacgatccgcaactgaaatttgatatagagacctttgactgggggtcagactattacaaaaaacatggcgtgatgatgccggaagaagggctgaacatgctgaaagcatttgatgccatttacttcggcgcggtgggggccccggatgtccctgaccacatcacactctggggcctgcggctgcctatttgccagggctttgaccagtacgccaatgtgcgacccaccaaaattctgccgggcgtcacttcaccgctgcgcaaccgcgggcctggcgatcttgactgggtcatcgtgcgcgaaaactccgaaggtgaatattctggtaacggcggccgtacccaccgtggtttacctgaagaagtcggtaccgaagtggcaatctttacccgtgttggggtgacacgcattatgcgctatgccttcagactggcacagtctcgtccacgtaaactgctgaccgtggtgaccaaatccaacgcccagcgccatggtatggtgatgtgggatgagattgccgctgaagtggcgcaggaattcccggatgtgcagtgggacaaaatgttggtcgatgccatgacgcaccgtatgacgttgcatccccagaccctggataccatcgttgccaccaatctgcacgccgatatcctttccgatctggctggcgcgctggcgggtagtctgggcgtagcgccgaccgcgaatattgatcctgaacgccgcttcccttccatgttcgaaccgatccatggttccgcattcgatatcaccggcaaagggattgcgaaccccattgccactttctggaccgcggtacagatgcttgaacatctgggcgaacgccatgccgctgcgctgattatggaaagcattgagtatgtgtgtgaaaaaggcattctgacgccagatgtcggtggctcagccaataccgcggaggtgacacgcgccgtggtgcactacattgacgctaaagctgacattgccgagaccgcataa

SEQ ID NO: 241161 - DNA, 1311 bp, Klebsiella pneumoniae
atgaaaaacgacctcgaaaagaaggtgatgcgtaaggttaccctgcgcattattcctttcatcatgctgctgtacttcattgccttccttgaccgcgtcaacattggctttgccgccctgaccatgaatcaggatctgggattttcacccaccgtttttggtctgggcgctggaatttttttcctgggttattttctgtttgaggtaccgtcaaacttaattcttcataaagtgggcgcccgcatctggatcgcccgcgtcatgattacctggggattcgtctctggctgcatggcttttgtgcagggcacgacgagcttctacattctgcgttttctgctcggcgtggcggaagccggtttcttcccggggatcattctctatctcagctactggtttcctgccgccaggcgtgcgcaggtcactgccatctttatggccgcagctcccctgtcgacagcactgggatcgccggtttcggccgcactgctggagatgcatggcttccttggctacgccggctggcagtggatgtttgtactggaagctttgccggcgctggtgctcggtgttgtggttctgttcttcctgacggatcgtccggccaaggccaaatggctgactgatcaagagcgtgcctggctggaaaacgccatgcaagacgaggagcgggcacgggcggcaaaacagagccattccagcgcatggcgagggctagcggatatacgcgtcctggcgctggcgctggtctatttcggtacctcagccgggctgtatacgcttggcatctggtccccgcaaatcattcgcagtttcggtgcttcctcgctggagattggtttcctgaacgcctttccggcggtgatcggcgtcatcgccatgatcctctgggcgcgtcattccgatcgaaccaaagagcgcagctggcacgtcattggcgcctgcctgctggcggttgccgggctgatatacgccggtaatgtcagcacattgtttaccgtaatggtcgccttaacgctggtcaccgtggggattagcgcatcaaaaccccctttgtggagcatgccaaccctgttcctcagcggcccggctgcggccgctggcattgccgctatcaactccatcggcaacctcggcggtttcgttggcccgatgatgattggcgtgatccgcgagcaaaccggtagctacagctggggcctgtactttgtcgccggattgctggcgctctcggccctcgtggtcatgattctttctgccagagcgaacaaatcgccgacggcagagcttccacatcctcatactcattaa

SEQ ID NO: 241162 - DNA, 1653 bp, Klebsiella pneumoniae
atgaaacctgtccagaggctttacctgtcgggtgataaggtccatttctccgatatgcagctggtgcttgagctgaacagctgcggtcgcgggtttatcaccgcgcagaccggaacagattacaccggcaaactggtgcgcgtggatgtaggctacatggataaagtgctgcgctggtttaccggatacgtggaacgatcgcagccggtggaaaacggttttcagcggctgtttgtcagggagttggcgggcgtctttgataaagcctggccgtgctcgatgcagcatccaaccctgcgccagttggccgcgtggctgactgagcacagtggcatcaccgtgcaggtgccggatgccgtttattctgataccccgatcccacattttacccacagcggcaccggcttccagctgctgaacggggccggacaagcgtttgccgtcccggactgtatctggtatcagttgccggacggcgatctgtacatcggtggcgcggataagtccctgtttgccgggcggccggtagagctcccggcagagtttggccgtgcaggtgccggaggtaacagcatcactcttccgctgatccagtccatgaggccgggcgtggagatgaacggccagcgcatcacgaaagtggagctgaacaacggcgatatggtgttgacctggacgccacgcaacaaaaccactggccagccgttgcagaaaacgccgtttcagcgtcaggctgaaaagcattacccggagctggccagcggcctgcatacgccaaaaatggcgcgggtggtggcgcacacggaaccggcagccagtggcaattttgccgatccgttccgtccgcgttacgcggttaacgtgcagttgctggacgctgacggcaacccggacggtgacacgccggtgtattccgctgtcccgctgccggttccgatggccgggcatgattccggcatgtttcagtatccgccggtgggcacgctggttgaaatgggattcaccggcgggcgtgctgataagccgtttatccggcagacgctggcagacggtcacagcctgccggatatccagccgggtgaacagctgcaacagcagcgggaaggggtatcgcaacgcatcacgcaggcgggcgactgggtgcgccagactgaccagacaatcagcgaatcatccatgacgcgaaacgttaccgcagacacggaaacgcgggagctggtcagccgggaaacgaccgtgaaagctgcggacaaaaccacggttgtcggcactcactccctgatggccggtgcaatccagcaggtcagtgccggtgatttcagccaggcggtgaagggcaacagactggctgcagtaagtggaaatgttcaggaagagattgccggaaacctgtcggagcagattggccagctgcgcaaaagcatcgcgggcgccagacaggacatcattgcgccggtggtgtggattgggtccgggcaggtaaatattgcacagtgtctgctggatacgctggacctcgttaaatccctggccgacacgctggccagccattcgcaccccggcaccggcaacccgaacaacagcggcgaaatcgctgctcacggcagcacggcaaccgcgctgaacgggaaatattctccgataattggatag

SEQ ID NO: 241163 - DNA, 549 bp, Klebsiella pneumoniae
atgacatcgatcccgacactggcgcttaacggcgagggcatcccgctgcaaaacatgacggtcacgctgtcgatgcagtttcaggactcagaccagggcggccagaccagttcaacggcaaaagcagagcagggcgtgaagggaaaagagctgcgcatcaccggacttatcccgtttacccgtgccgatgtactgaagcgcatttttgagctggccattgcccagggcagtgacggcaaacgcgttcgctaccgcgtggcgcatgaaactgcccgcgccgtggggttgcgtgaagcgatgttcaccggcacgatcgatgcgccgaaacaggatggcaaaatggcctggctggtgacgttcaccctgaccgaacagatgagtgtgccggagaagcgcgaagagcgggcggccagcaagaccacggcgaccaagcagacggctggcaccgggacgggcggtacatccgggacagcggcggctgaggacgaaacaaaaatgacgtggtttgaaagcagaatactgaaaccgtttaacgacgcgctggggtga

SEQ ID NO: 241164 - DNA, 726 bp, Klebsiella pneumoniae
atgtggaaatacagcaatattcagttcagtgatgccctgtcagccgtgaactgttcagtggtcccggcgcatccgtggatatacgggctgggtcagcagacagagaacggcctgtacctgagtccgtccaatgccgtggcctggctggcccggcagctggccagcacgggcagcgtgtccgatgtggtgattgtgctggtcaccggtgacggccatgatgattttatggcgaatatcgatggcctcgtcagtgtcctgccggttccggccatgatgcaggtgaaacgcctcgctcagtcagccgcgctgctggccacggaaaaaatggtgatcccgggcggcatggaaaccgcgctaccgtctgcgatcgcgttcacacctgccacgctaagggcggcgctgaatgcgaagactgttgcaaccgcgcagcaggcggcgggcgcgggtgtcagcctggacggcatgaaatctgcccttgagggatttatcagtcagcgggcgcagctgcttaacgacatggcaagcgggctggaagcgctgaaagggaaaagcgcgcaggcatggacgttcgtggcctccggcgacgtggccaccacgctggccgggctggccagagatattccggcagcgtcagccgtgcactgtgcggcggtgatgctggccggtgaggatttacagggaatacggagccttattcatgacatcgatcccgacactggcgcttaa

SEQ ID NO: 241165 - DNA, 492 bp, Klebsiella pneumoniae
atgaatcatgcaattgttattgaaggtgtggtgttcgaaaacccgacgcgggaaaaagttctggaaacccttccggattatgatgtgtcagaaattgataatattctggctgagcttcagcggagtactgacgcctcagaacagaatacgtttaatattcttgaagcatggaaagagcagaagcgtgcggaaattaacagctggcgtgatgcgcagtttattctgccggtcacgttcacttatgacggtaaagcctatctgtcatcaatggataacgtcagtattctgaagtgctatcaggattatttacccgatgggacgatctggacggctgaagacgacagcgatttattactgaatgcgcaggtggtcagtgaattactgaacctgatgcaggcgtcattatctgaaacgtattcgcgtattcatgctgaggcgcgggataaaaagagtcttgtcgaaagtgccactgacattatcggtgaagagtaa

SEQ ID NO: 241166 - DNA, 1482 bp, Klebsiella pneumoniae
atgcgtgatctgatccttcaactcagcaaaagttcgatttattcaacaaagcctagcgaagatataaatattaccgatccgacaacggcgacggcggtgggtgagaagatgaccatcaatatatatggtgacgggccgaatgcaacggtgtttgcctgtgcagtaccgggcatgaaactgtttaatatcaaatgcactgtgcatctgagtgatttcggtatgcgtgggtttcgtgctgctgatggcagttcgacgaccacgctgatgacgttgggcgatctgaccggggataacccggtcagtggttcgtctttccgtcgcttaaggttcaattattcacatcataatattgtgattaatcacgcattcgattgttattttgagcaggtcaacgttcatgatattccgggcggaacggtgaatgatgaatccacggcaattgatatcaaagcggtggtgaaagacaacaccaataatctttttttcaataaggtgcatcttgaacaggcatatggaaataatgtgacattcctgcgtgcgagaaaaccaaagcaagcaggtagctatcatcacacgctggactttaccgggcttcatgttgaaactcgtcgctatgatgccagaaatatagaccttgaaggggtgattacgtccggattcagggggctacatttcatcaggaataatacgcggggtggtgatacaacctataaagtgtcacgccgtattgttacattaaaggactgtaataacctctgcttcggtgatggtctgatctcccacagtggggattcatttgaagatatgattgcaccaatactgcatacgggaacggttaaaaacgtcgtgtatgagcgtatgcgtattgttccatgtaataccagcgtcagtgatattgacagctatctgactaatgaatctacggatacgctacttattgcaaacgtattcagggattgtttatttaataacttcgatacatccgtgctggttaacacactgtttaagttaagcagtcgtaaacacatcaaccgtgcgcattatatgaccgttgatgagagcggctttctgatcggttcattcagtaacagtgcggagggactgtccaaaaaagacatttcccgactttcaaatgacggtgatctgtcagtggcttcgcgctgtgcgccgtcgctggtaactgtagaggcgggaaacgctgtcacgtatatcctgcctaatccaggggggaagaacgccagtaaacgcggcgtggtgacgttgttttcaaaaaacaatctcagtacggggacggcaatttttaccacgtcgggcggcgatctgaaagaacatgctaatggtggcctgtataaaatcaaagccacaaccgacagggtgagcggatatgtcaacgtctcactgagtggtggcaatctgttaattgaaaacctgaccgcgaacccgtttaacttcgggatggatttcctcggatttatggactga

SEQ ID NO: 241167 - DNA, 1188 bp, Klebsiella pneumoniae
atgagtcagacggttatcacatccgcattcgaacagctgaaagcccagcaggcggccaatggcggcgttgtcgtcctggatgaatttgtttttgcaaacgtcccggacctgaatattaccgatccgattgaccgcgcggagcagctgcctgacgcgtcactgattgtgcatcgtcaggacgtgggcaaaaccggcatggtcaataacaatgccgtggtgtattcggtggtgatgggcgcggacatcggcgattttgcgtttaactgggtcggtctggtcagtaaggccaccggcgtggtggcgatgattgttcatgcgccgttgcagcgcaagattaaaaccgccgccggtcagcagggtaacgtgctgacgcgctctttcctgatggaatacaccggtgcatcagaacagacgcagatcatcacgcctgctgatacctggcagatcgatttcacggcccgtctgaacggggttgatgaacgcagccgcctggagaatcaggacatttacggtccggcttctttctttggtgaagggtttcgcgtcagcaaaaatggcgcgcagtactcggttgcgccgggcgtgggatatgtcgccggtctgcgtacagacctgctttacaggcaaaacatcaatgtcagtaagctgccggtaaaagtctgggcagatgtcagctggaaaggcacgctgaccagcgtctggggttcggtcaccaggattgttgtggcggaaagcctggcggattatcacgaagacgatgcgccgcattacgtgacggccatcgctgagattgatgccagcgggaatatcactgacctgcgaccggatgcgtcaattgccagtctgccaatgcgtctggcgtcttatgatgtgggagacggcaccgatctgattgaatggcgtcgtaagaagctggcggatacgatttccggtctgtcacgatttatggctggccgttcgttgtcactgtatgaatttgctgaccgtgtcaccagcaaaaataacaatgccgatccctcattctgggactggacgcctgcgctgaaagctctgtttgaaaacgcgctgacgtataattctctgtcggttacatccgggatcgcttatcgcaatatgtccgtgcattgccccggtggccattacctcattagcgaagaggctttgttgaataaatcagatttcgggtaa

SEQ ID NO: 241168 - DNA, 639 bp, Klebsiella pneumoniae
atgactgattttgataaaaagctggccgggctgcggctgccgtcatggatgcgtaatggtgaacctgcggcgctgctgcgggcatcgcgccggttctggcagcaggtttacggctggataacgtggccggttaatcagttcgatccgctgacctgcgcagagccgctgctgcggctgatggcatgggaccgcgatatcacccgctttaacggtgagccgctttccctgttcagaaagcgcgtggcgtatgcgttcgtcaacgccggtgacgccggttcggtggccgggtttatcgccatctttgggcgtctgggaatcggttacgtggagctggttgaacgcgaatcggaaaccgactgggacgttatcaccgtccggctttccgatggccagctggcgcagaatcccgatctgctggtgcagatcatcaggcagtacggcagaacctgccgccggtatcggtttgaggttttgtccgcgctgaaacttcacatcaatgccggctgggatggcggggagctggtctgctatcacgccggtgactatatcggcgcagtaaacaaatcgggcggggaatacatcgtttacccggccagcacagaaattaatgacaacgccgtatttggcgcaaaattgtag

SEQ ID NO: 241169 - DNA, 1185 bp, Klebsiella pneumoniae
atgacgcagaaacctgatgttgattttgcagaggtggtaaaggccagcggtatgccgaccacagaagacgaactgcgccagcgttttaacgcgattgtcgcggaagaggggcttatcaccaatacgtcgcgtatgtcgcccttctggcggctgattacggcgatcgtcacctcgccggtgctgtggctgaaagacgtgctgattaacaccgtgctggcaaacatgtttgtcgccacggccaccgggcagatgctgcgcctgctggcctgggcggtaaacgtcacggcgaaaccggccagtgcggcagagggcgtgatccgcttctggaagaccagcgcaaacgctgcggtgacggtgccggacgggacgcgcatccagaccgaacgcatcaacggcgtggtgtatgagctggtcaccgtcggggattttaccatcccggcaggcagcgccagcgccctggtgccggttaaggccacggccaccggtggtgcgtataaccttgcgcccggctatttccgcatcctgcctgtagcggtgtccggcatcagccgtattgccagtgaagaagactggctgacggtgccgggcgcggatgcggaaagcgatgacgacctgcgtgaccgctgccgcaaccagtttaacctggtcggtaattaccactctgatgcggtgtaccggtcgatgatttccggggtgctggggctgagcatagaccgcatctttttcgagcatgacgcgccacgcgggccggggacggcgaatgcgtttctgctgctggattccggcgtggtgtctgcaccgttcgtggccacggtgaatgactatatcaacacccaggggcatcacggacacggtgacgatctgcagtgcttcggtatgccggaaacgcttcacgatctgaccgtcgtgctctatgtgccggacccggacaacctgagtgcggatgaaaaagcggtgatccgggcgggggtggaaaaccttatccgctgcgcctttcgggaaaattcggagtatgacgtgcgcaaaacgtggccgtgggcgcgcttctcattctccaatctcgggcgcgaagttcaccgcacgtttaccgctgtggattcggtcaccttctcgctgaccgacattgtcagcgggctgaacgtgccgcgcctgaacagcctgaccgtgagtattgagcatgactga

SEQ ID NO: 241170 - DNA, 330 bp, Klebsiella pneumoniae
atgagtgatttgttttatatcgacctgctgattgaaaacggaaacttttctcttaatacgggtaatgagccggtgatgtgcaataaccgcaaaagtattcagcaggatattgctcacgccattatcgaatcggggatggtgacggaattaattgctgaacgcagtccgacattacgtgccgatatttttacccggctggaactgctgattgaagacgatgagcggattatccccggcacggtgaccgtggacgaagaagcgattaaccggttgtgggtggcggccagtacctatgagtttggcgggatttcttacggggtgagcgtatga

SEQ ID NO: 241171 - DNA, 1974 bp, Klebsiella pneumoniae
atgaggcagcttgatcttaccctgcaactgattgaccggatcacccgtccgttacgcggtgtgcaggcaggcatcactgagtttgccgataaatcaaaagccagtttccagcgtattgccgtgggcggtgccgggctgctgggtgtcgggttagcgattaagggcgcactcggcccggcgattgaaatgtatgacgcattgcaggagcaggcggcgcggggtatcgacagcagtgcattgcagcaggtggaacgggacgcgaataccttctcgatggcttacggcaaaagcgcggttgagtttgtgcagtcaacagcggatatcaatgccgcgatcggcggactgaccggcacagagctgccgaaagtgacccgtgtggccaacctgatggccgccgccgtcggcagcagtgcggcggagtcagcggaatttatggggcagctgttcggcaacttcagggaagaggccgatcgcgtcggtaaggtgcagttcgcggagcagctggctgagaagatgacgttcatgcgccgcacctttggcgtgaatatgggcatggtcaaagacctgatggaaggggccaggggcgtcgggactaacttcggcgtgggcctcaatgaacagctggccgtgatgggcgagttacagcgcacgctcgggagtgaggcgtccggggcgtatgaaagctttatgaccggcgcggacgagggggcgaaaaaactcgggctgagcttcaaaaacaccgccgggcagatgctgtcaatgccggagattctgacaaaactccaggataaatacggcgagagtatcgccggtaatctggaggcgcaaaaggcgctggatgatgcctttggtgacagttcggcagtggtcaaacagctgtggggtaacgtggaaaccctgcaacgcaatatcactgtactgggcggcagtgacgggctgaagcgcacgcaggagatggccagcgcgatggtcaagccgtgggatcggtttatgcagattctggaagccgtgcggcgcatcgtggggatgacgcttatcccggtgatttaccccttcctgactcggctggctgatatggggcagacattcgggcgctggatgcagatgtttccgaacatcgcccgcgcagttgggatgttaacgctggccgtcctgagctttgccaccgtgggggctctggccaacgtggtgatgggggggatgggattcattatcaccggagtgaagggtatctggcgagggctgctgctggtgacaaagttgtacaccggcacggtctggctggcatcaaaggctgtcgtggcatggaatctgacgctgaatttcgtgcgcggcacgctgctcgccgtgcgcatggccgccgtgatggcgggtatcagttttaacctcctgagctggccgattctgctggtcatcggtgcggtggctgcgctggttgccgggggatatctgctgatagcccactgggaccaggtgaaagcggcggtgatggacacggccgcatttcaggctgtggccgccgtggtgacctggctggccggagtgtttgccgacgtatgggaaagtatctccgccggatggaacagttttgttgcgctgctggcgggcttttcggtgacggaaacgctgggacatatggccgccgggattatgaatttatttgcgaatctctggaatacgattaaaagccaggcgctcggttcactgaactggattatttccaaactgaataaaattcccggtgtggatatcgcggaaattggtgcgcctgcacagccggaatccgtaattaaaaacacgctgtcaaccggtggggaattaaaaggcgttgaaacgggcggtgtgagtaaaaccattaacagcagcgcgaaatcagtaacggataacagccgccggattgaaagggttgaaattaatatgccgaacggcatgacgccgcagcagttatcagaatggcaggagctggctggatga

SEQ ID NO: 241172 - DNA, 264 bp, Klebsiella pneumoniae
atgagtaaagaaaaaattgaactggcgattgccgggaaagatgtgtcatttgtgccgaatgtgacggcatataataaatacatcaatgaaatcaccatgaataataaagtctctcctgcacataactttctgatgcgtattgttacgccggaaacgaaagaagcgctggaaactattctggcattgccgggcgcagctttacaggtggtggggaaagtgctggaagaatatacccctgaacttgagattaccgtaaaaaactaa

SEQ ID NO: 241173 - DNA, 345 bp, Klebsiella pneumoniae
atggccagaaatctgctgctgatcctggtcagctgggtggcggtcttctttgccggatgggtgtgcgctgactggaagcgggacagcgatacgctgctgattgagcgggccgccactgcggcaggcaatcaggcccggcaggaggcgcagacggtggccagcaattcaggccgacagctggaacagaaactggaggatttaaagggtgcattacccgcatcaatccggactgaagtggttaagcctgtttttattaatgactgccttagcgctgactatgtccgcatgttcaacgacgcaatggaaaaatcagagcgtaccctttcaggaaaacctgaaaactaa

SEQ ID NO: 241174 - DNA, 342 bp, Klebsiella pneumoniae
gtgacgctcagtgaaaaacagcagttgtttgtttacatgatcgcacagcttatcagctttgcgcaggagaaggggctgcgcctgacctttggtgaagcgtaccgcacgccggaacaggcaaagctgaacgccagaacgggtaagggcatcagtaacagcctgcacacgcagcgcctggccgtggattttaatctgttcgtgaacggccagtataaaacccgcacggaggattatctcccgctgggcgagtactgggagagcatcggcggcagctggggcgggcgctttaagagcaacccggacggcaaccatttcagccttgaacataacggcgtgcgctga

SEQ ID NO: 241175 - DNA, 300 bp, Klebsiella pneumoniae
atgcaggagcatgaaaagagtctttacacgctgttaattatgggggcgctgatcgcgctggggaaagtgctggccagcgatgaaaaaatcaccctgcgcctgctggccggtcgcgtgatcctcggttcggccatctcggttgctgccggtgctgcgctggtgcagttccctgaaatgccgacgctggccgtcaccggcatcggtgccgctctggggattgccgggtatcaggcgtgtgaagtgtggatccgtcgccgcatgagcggcctcaacgggggaagtaacagtgacgctcagtga

SEQ ID NO: 241176 - DNA, 456 bp, Klebsiella pneumoniae
atgagccagcgcatcagtggtcagtcttttgatgtgaatatcgacggcgaaatgatccacgttgagaacgtgtcactggatatcaccgataacaccgccgccgcctcaacccgtggcgtgccggatggccataccagcggtgacgtttccgctgagggtgaaatcgaagtcagtagcaaggtgctcacgcagctgacggcgctggcccgttcggcggggtcatggcgcggcatcgagccggtggatttcctgttttacgccaaagtgggcagcgaggaaatgaaggtggaggcattcggctgcaagctgattatcagcaacgtgctgaccatcgatccgaagggcggcagcgtgacaacaagcaaggtcaagtatctggtgaccagcccgaaatttatcaacatcaacggcgttccgtacctggaatcgtccgccactgaaagccttatcagctaa

SEQ ID NO: 241177 - DNA, 939 bp, Klebsiella pneumoniae
atggataacgccgggcagaactggtcagggtatgtgcatgtgctggccgctgacagtgcgccgctggactgggtgagcgcggtggaaaaggcgcagagggcggcctccgttgagggcgtcgtgctgaccgatgaaatggccgataaggcgacgatcaacgcggccgccacgctgcgcaacacgttgctgtcgaaatatggccgctgggtgtggttcatgctggccgttgaagcgcctgctgccggtgaagcctgggcggattatctggagcgcctgagcacattgcaggacggcatcgccgcctctgccgtgcagctggtgccgtgcctgtggggcaatgagccgggcgtactggccgggcgactgtgcagccgcgcagtcaccatcgctgacagtccggcgcgggtgaaaaccggggcgctggtcagcctgggtaacgatgaactgccggttgacggtagcggtgagccgctggagctggccacgcttcaggcgctggagcgactgcgctacagcgtgccgatgtggtatcccgattatgacggctactactggtctgacgggcgtacgctggatgttgagggtggcgattatcaggtgattgagtatctgcgcatcgtggacaaggtggcgcggcgtgtccgtctgctggccattgcgcgtgttgccgatcgttccctgaataccacgccgggcagtattgccgccgcacagctgagttttgcaaagccgctgcgtgaaatgtcgctggcttcgcagattaacggcatccgcttccccggcgaggtgaaaacgccgctggatggcgatatcagtatcgtctggtcatccgctaaacaggtggcgatctacatggttgttcgtccggttgagtgtccgaaggacatcacggtcagtctggtactggataccagcatcacgcaggagtcagcagcatga

SEQ ID NO: 241178 - DNA, 1752 bp, Klebsiella pneumoniae
atgaaattcttagagaatatcccgtcttacctgtttttcaccggtaagggaggtgtaggcaaaacttcgatttcctgcgcaacggctatacgtctggctgaactgggaaagcgtgttctgcttgtcagtaccgacccggcttccaatgtcggtcaggtattcgatcagactatcggtaacactatccagcccgtgactgctgtgtctggtctttcggctctggagattgacccgcaggacgccgcccagcaataccgcgccagaatcgttgaccctattaaaggtcttttgcctgatgacgttgttaacagcatcagtgaacagctttcaggagcttgtacgacagagatcgctgcattcgacgagtttactggcttactgactgacgcttctctgctgacccgctttgatcacatcatttttgatactgccccaactggccacactattcgccttcttcagcttcccggagcctggagcagcttcatcgaaagtaacccggatggtgcttcctgtcttggtccaatggctgggctggaaaaacaacgcgagcaatatgctcatgcggttgaggcattatccgatcctgaacgaactcgccttgtgctggtcgcgcgattgcaaaaatcaacactgcaggaagtagctcgtactcatgacgaattatcagctattggccttaaaaatcagtatttagtcattaacggtgtcctgcctgcgagcgaagcagaacgtgatgcactggccgctgcaatatggcaacgggagcaagaggcgctggcaaatcttcctgccgggttatctgatttgccgacagacaacttatacctgcagccgctgaacatggttggtgtatccgcattgaaaggcctgctcaacgaacacgctgagataacatcgcttcctgaacaaagcccacagaacaagccagagaatatgtcgttgtctgtcctggttgatgatatcgcccgcagtgaacacggtttgattatgctgatgggcaaaggtggtgtgggcaaaaccacaatggctgcggctatcgccgtcagtctggcggataagggttttgatgtgcatctcaccacctcagatcctgctgcacatctcagtacaacgctcaatggcagcctcaaaaatctgcaggtcagccgaatcaaccctcacgatgaaactgaacgctatcgtcagcatgttcttgagacgaaaggcagggatctggatgaggctgggaaacggctgctcgaagaggatttacgttctccttgcacagaagagattgcggtgttccaggcgttttcacgcgtaattcgtgaagctggcaaacggtttgtggtcatggatacggcacctaccgggcatacgctattactgcttgatgctaccggggcttatcaccgtgagattgccaggaagatgggggataaaggtcattttaccactccgatgatgcagcttcaggaccaggaacgtaccaaagttttgctggtcactctgcctgaaaccacacctgtactggaagcggcaaacctgcagtccgatcttgaacgtgcggggattcatccctggggctggattatcaataacagcctttcgattgcacagacgcaatcgccgctgctttgccagcgcgccctacaagagcgtcctcaaatcgaggttgtgaaaaaccagcatgcaagccgcatagcgttagtaccggtaatggctgcagagcccactggcatcgagaaactcagagagctggttgtttaa

SEQ ID NO: 241179 - DNA, 363 bp, Klebsiella pneumoniae
atgaaaatgttaacggtgtttgatccggcgatgtgctgcagtaccggcgtttgtggttcggatgtcgatcaggttttggtcaatttttctgctgatgtgcaatggctgaaagggcgtggggttcagatcgaacgttataacctggcgcagcagcctatgagcttcgttgaaaacgaaaaagcgaaagcattccttgaggcttctggagctgaagggcttccgctgctgttgcttgatggtgaaacggtgatggccgggcgatacccaaaacgcgctgaactggctcgctggtttggtataccgctggaaaaggtgggtttagcttccaccagttgctgtggtggtaaaacttcctgttgttga

SEQ ID NO: 241180 - DNA, 705 bp, Klebsiella pneumoniae
gtgcacgttcaggagatcttccttgcccatgataatcgggccaaagccgatgacgtgggcgtagccggcgttcaacaccaccacgtccgggcgcagcttcagcaggtcggctgcaatgtcatcacgccagatggtatcccccatcagccacagcgtcttctcctgcggatggcgaaacaccacgccgcaggcctcgcccaggcgttcagccatcgccggcaccgcgtaggtgcggtcgctgccatgctgcccggaggtggttttcagcagacgcacgccggcaaattcgctgtctgccgacagcaggcgcagatcctgaaatccctggctgcgcagcagcgcggcgtcggcctcatgctggacgaacaccggcagggttttcgggatcgcggcgatcgctgccgcgtcccagtgatcgtcatgggtgtgggtgacgatcaccgcatcaacatcgacaattttatcgcgggaaaacggcagctcaaccagcggattgcgcaattcgctgcgcgcggtgcccggaaaacccggccaggcgcctttgtccgccagcatcggatcgatgagaaatcttttcccggcgtagtgaataatctgggtcgcattacggatgtgggtgatgttcatgttggcattcctctggggtcatctgacgaacatcgtactgagtcccctcctggctcaacaggggcgtttgggcaatga

SEQ ID NO: 241181 - DNA, 312 bp, Klebsiella pneumoniae
gtgcatggtattgccgatggtgccgccggcaaactgatgggtaatgagattgttgcgcaccagctcctggtacagcgcctcggcgacgtcatcttcaatcaccagcgaatggcccgcgctcaggccgtagcgcacgataaacgcctcatccactttcgcttcgatatccaccagcgtctggtcgataccgaccacccaggagacgctggattcattctccggctgaatttgctgcagcagcggatcgcgggcgttaacgggaaaatagtgtttagatttgcgtttaccgggaaatttcatagtggcgcttaa

SEQ ID NO: 241182 - DNA, 309 bp, Klebsiella pneumoniae
atgcgccagtcgctgatatacgggcttgaaccctggaaggcatcgggctgcatacgttttgccaaatctaatcgtattaattttaatcagtcttcaagatacaaggaaggcagcctcaccgccgttgcggctggagaggacgtccttcctgcttctgagcttactgctgctctgaagcaggtccgggagctccagcgcctgctgggcaagaagacgatggaagttgagatcctgaaagaagccgtggagtacggtcagtcgcgaaaatggatagcgcacgcgcccttgttgccaaaggacggggaatag

SEQ ID NO: 241183 - DNA, 1089 bp, Klebsiella pneumoniae
gtgtcaatttataactactggggtaaaactcgccagggagaacccggcgggggtgacgattaccatctgctgtgctggcattcccttgatgtcgccgcaatgggctactggatggtaaagcgagatatctatggtctggcaggttatttcaggcgtttagggattaatgatattgaaaacgccgcgcaattctttgcctggctattatgctggcatgatattgggaaattctcccgttcatttcagcaattatatacccatgataatctctgcgtgcagaaggatagtcgaaatacatatgaaaaaatatcccatgcgtcactgggatattggctatggaattcccacttcagcgattgtccagaattatttccgaactcatcactttccattcttaaacttaagcgtgtaattactctgtggatgcccttaaccactggccatcatgggcgtccgccggtggggatgcgcgctctggataatttccatccatccgatattaaagcagcgcatgactttctgttagctattaaatcgctattcccggacatggaaatcccgtccttttgggatgatgatgcaggtgtggagctgttcagtcacctgtcgtggtttatttcggctgcggtggtactggctgactggacgggctcatcgacccgcttttttccccgggtctcccaacgaatgccgcttgatgtctactggcggcaggcaaacgcgcaggcagagcaggcagtgaatgtttttcctcctgctgcggctgttgcaccatttacgggaatagagacattgtttccttttatccagcatcctacgccgctccagaaggcggtgcttgagctggatatcagccagcctggaccgcagctgtttatccttgaagatgttaccggagcaggcaaaacggaggcggcgttaatcctgacccaccgcttgatgtctgccggaaaggcgcaggggctgtttttcggtctgccgacgatggcgacggccaatgcgatgtttgaccggctggcacaatcgtggcttgccttataccagtctggcgccccagcctggtgctggcgcacagcgctcgcgggttga

SEQ ID NO: 241184 - DNA, 801 bp, Klebsiella pneumoniae; identical to SEQ ID NO: 134628

SEQ ID NO: 241185 - DNA, 390 bp, Klebsiella pneumoniae
atgcgcgaacttatcaacacgattgctcatattggctatcaggtcagtgacttaacgcgttcgcttgccttctatgaaccgctgggctttcagcgccagcagcggtttagcaagccatcgccacagggcactattgaagttgcgttcctggaaatggcgggcgccgtcctcgagctgtatcagcttcccgctggaacgccctttgacgcccctcgctgcggtatcgatcatctggcgctggaagtcagcgacctggatgcggtgcagcagcggctggcggcgctcggttatccgctcgatgaagggccgatagaagaagacaacgtgcgcttcctgcttattcgcggccccgatggcgaacggctcgagttcgatgcctgtaaacgctaa

SEQ ID NO: 241186 - DNA, 210 bp, Klebsiella pneumoniae
atgaaaagtctgcgccccttcgcgcacggtgagcgagccttcgcggaggccactcaacagacgaaaaagcagccagcgcgcgagccgcacgttgcgcggcacatcgggttcaagcgcaaagacgggatcggtcatgagcgttcactcctgctgacaggatggttgtacagcggcacgcgcttcagccacagccgcagcgcctgccagtag

SEQ ID NO: 241187 - DNA, 486 bp, Klebsiella pneumoniae
atgacacgcccggcgcagcacttgctgatggccctcgcgttcgatgtttactggacgctggtggtgatgttgcgcgagcgcggtctgctgatctggctgacgctggccattttcgcctggctgcggttgccggcggccagtcgtccgcccgccctgctgttggccgcggcgggctgcggcctggacgcctgctgggcgctggcggggctgatcgattttcgcggcgacagcctgctgcccctgtggatggtggccctgtggctgatgttcgccgtcgtctggacccgactgacccgcaccgcgacgcttcccggctgggtgctggccacggcggcgaccctcggcggcccggtggcctacctgatcggcgctcgcctcggagccatgaccctgctggtgccgacggcgcttgctgtggccgccatggcctgcggctggctggtgctcatgctgttattccatctggggatggggaggcgaaaatga

SEQ ID NO: 241188 - DNA, 156 bp, Klebsiella pneumoniae
atgttctatgacgaagactatgtcaccgcgctggaacacggcctgccgccgaccgctggtctgggtatcggtatcgaccgtatggtcatgctgctcaccaacagccacaccatccgcgacgttattctgttcccggcgatgcgtccgcagaaataa

SEQ ID NO: 241189 - DNA, 555 bp, Klebsiella pneumoniae
atggccggggaacacgtcattttgctggatgagcaggatcagcctgccggtatgctggagaagtatgccgcccatacgtttgatacccctttacatctcgcgttttcctgctggctgtttaatcagcagggtcagttgctggtcactcgccgttcgttgggcaaaaaagcctggcccggggtatggaccaactcggtctgcggacacccccagcagggcgagaccttcgagcaggccgtcacgcgccgctgtcgcttcgaactcggtgtggagatctctgatatcgcgccggttcacccggccttccgctaccgggcggtcgccccaaacggtatcgttgagaacgaagtgtgcccggtatatgccgcgcgcgtggtaagcgaagtgcagcctaacgacgatgaagtcatggactatcagtgggttgacctggcaaccatgttaagcgcgctggccgccacgccgtgggcgttcagcccgtggatggtgctggaagcggaaaatcgggacgcccgccaggcgctgaccgactttgttgcgcgtctgcgcgggtaa

SEQ ID NO: 241190 - DNA, 333 bp, Klebsiella pneumoniae
atggccccaggcgacataatcactcacgcctatttcagcctgcttagccagcgggtgccctttacggacgacgccaacaaaccgatcctcaaacagtcgttgcagccgtatttctggccccatattactctgaacgccaatctccagatcaaccagcccttcccgaagatagcgcgacgttttttccggcttaggcgcgaagcgtatacagacgtccggcgcggcgtcggcaaccgctgctataagcgcaggcccaaacgccaccacaaaaccatcgtttgccctgatggtaaaaagacgcgccagattttgcgcgctgaacgtttcagttga

SEQ ID NO: 241191 - DNA, 483 bp, Klebsiella pneumoniae; identical to SEQ ID NO: 241115

SEQ ID NO: 241192 - DNA, 558 bp, Klebsiella pneumoniae
atggctcatattcttgtcgtttccgggcatccggatcttaaccattccatcgccaacgccaccatcctcgatgagctggcgaccgccctgcctgatgcggaaatccgtcgtctggactggctctatccggacggcaaattcaacatcgccgctgagcaggaaagcctgctgcaggcggatgtgattgtctggcagtttccctttagctggtatgggctgcccgggttaatgaaacagtggctggacgaggtatttgtccacggcttcgcccatggctcaacggcgaaactgggtggtaaaaagctgatcctctccttcaccacgggagcgccacaggcgctctataccgctgacggtttctttggccatgccattgaggagtatctccttcccttcgagaccacggccaggctgtgcaatcttgagctgctggcgccggtttatacctgcggtattagctacgccgaccgggatgccgacaaaatcgctcagcaaaaaacgcttgcccgggaacacgcggccagactgatcgcgcggcttaatactctggtggaataa

SEQ ID NO: 241193 - DNA, 573 bp, Klebsiella pneumoniae
atgcagccgtactttcactggatcaatgaacctgccgagtggcgccgcgatgccgacggcctgacggtggtcactaataagcataccgacttctggcgccatacctggtatggcttcgagcgcttctctggccatctctatgccgcagaagtggcgggcgattttaccctgcaggcaaaaatctgtgcggatttcaccacgctttacgaccaggccgggctgatgatgatggccgacgagcagacctggctgaaggcgggaattgaattcaatgacgatgccccggccatcggcagcgtactgacgctaacccactccgactgggccaccgggcttttccccggcgacccgcgcaccttctggctgcggctgacccgcaagggcgacgcgttaaggctgcagtattcaaccgacggcgagcactggccgctgctgcggctcggctactttccgccaggcccggtgaaagcgggcgtcatgtgctgctcaccggagcgtggcggactggcggttgcgtttcaggatattcagctttccccgccgctggacaaagcgctgcacgatctgagctga

SEQ ID NO: 241194 - DNA, 294 bp, Klebsiella pneumoniae; identical to SEQ ID NO: 138650

SEQ ID NO: 241195 - DNA, 330 bp, Klebsiella pneumoniae; identical to SEQ ID NO: 211759

SEQ ID NO: 241196 - DNA, 798 bp, Klebsiella pneumoniae
atggcgctgaccgggatccccagcggttcaaggacgaaaaagccagccagcaacagcagcagcacgccccagccggtgcggaacgtcgctggatcttttattgccgtggccggcgctttcagtaacgccatatcccaggccggcgggatatccttgcgaaagaacaggtgcagcatcgccagggtggtgaggatcgccgcgagatcgaccggcaccatcaccgaagcgtactccctgaagccgatggcaaagaaatctgccgaaacgatattcaccagattcgacaccaccagcggcaggctggcggtatcggcaataaatccggcggccatgacaaaggccagcatcgttcccttgctgaaccccagcgctcgcagcatggcaatcacgattggcgtgaggatcagcgccgccccatcgttggcaaacagcgccgccacagccgcgccgagcaggataatccaggtaaacagcagacgaccccggcctcttccccagcgggaaacatgcagcgcggcccattcgaaaaagccagactcatcaagcagcaggctgataatgataacggcgataaaggtggcggtcgcattccagacgatatgccataccaccgggatatcggctacctgtacgccaccggtggccagcgccagcgccgcgccaaatgccgcgctccagccgatccctaacccccgcggctgccagatcaccagcaccagggtcaggataaaaatcgtacctgccagcaacatcgttcctccgccaatcacattcgaaaaatcatatatgttaagataa

SEQ ID NO: 241197 - DNA, 288 bp, Klebsiella pneumoniae; identical to SEQ ID NO: 210633

SEQ ID NO: 241198 - DNA, 876 bp, Klebsiella pneumoniae
atggccgctaatcttaccgagactgctatacgcggattgaagacaaaaagcacgtcgtactacgtgtggagcaacagtgctcagcgtggtaccggcaggcttggcgttaaggttcagccttcaggcagcaaagttttttatttccgttactacgttgaaaaagggaagaaagagaagttcatccagttgggcatctggcctgagatgaaactggtgacggccaatgagctggcgaaaaagtatggtgcctggcttgttgaaggaaaagaaccccagcaagagcttgagcaacagcgcctggccgagcagcacattatgcagatccatcgctctcaaggatcgtttgaagagctggtgcatggttacgttaacaagatgaagctcgataacaagcggacttgggctgatgtactgaagcgccttgaaaaagagtgctattcagtcattcctcgcgagaccaaagcgaaagatgtcacgtccttacagatcaaaacgatcttgtctggcatcatccagcgtgatgcggtggtccatgcaaaccgcattcgttcctatctgatggcggcatttaactacggtctgaaagctgataacgatccgatgaataccagcgtgggtattacgttcggtcttgaagttaatccggtatcggccataccgaagcagtcctcggcggagaaagtgggtgatacatggttaacgctggaagagctacgttttgtcatggagcagttcgctcaggccaccaacgttggtaagcgtgcagcgagaaccgtattgacggggatgtgttattcagttggcagtgctacgcgccaggggagtagttcgctgacccggtttatcggccagtcagcaatgacgtcaaggacataa

SEQ ID NO: 241199 - DNA, 1134 bp, Klebsiella pneumoniae
atgagaaaattgtgttatttcataaattcggattggtacttcgatttacactggatcgatcgtgccatcgcctcccgtgatgcaggttatgagattcacatcatcagccattttattgatgacaacataataaataaattcaaaacattcggctttatttgccataatgttactcttgatgctcaatcttttaatgcattagttttctttcgtacttaccatgatgtgcaaaaaattattaaaaatataaaaccggatctcttgcattgcatcactatcaagccatgtttgattggtggtgtgctcgcgaagaaatttaatctgccggtcatcgtgagttttgttgggcttggaagagtattttcttctgacagcatgcctttaaaattattgcggcagtttactattgctgcatataaatatattgccagtaataagcgctgtatatttatgtttgaacatgaccgcgacagaaaaaaactggctaagttggttggactcgaaaaacaacagactattgttattgatggtgcaggcattaatccagagatatacaaatattctcttgaacaggatcacgatgtccctgttgtattgtttgccagccgtatgttgtggagtaaaggactgggcgacttaattgaagcgaagaaaatattacgcagtaagaatattcactttactttgaatgttgctggaattctggtcgaaaatgataaagatgcgatttcccttcaggtcattgaaaattggcatcagcaaggattaattaactggttaggtcgttcgaataacgtttgcgatcttattgagcaatcaaatatcgttgctttgccgtcagtttattctgaaggtgttccgcgaattcttctggaagcatcttctgtgggtcgcgcttgtattgcttatgatgttggtggttgtgatagccttattattgataacgataatggaattattgttaaaagcaattcacctgaagagctggctgataaacttgcctttttgcttagcaatcctaaagcacgtgttgaaatgggtattaaaggacgtaagcgtattcaggataaattctcgagcgggatgattattagtaagacgctaaagacttatcatgatgtggttgagggatag

SEQ ID NO: 241200 - DNA, 1221 bp, Klebsiella pneumoniae; identical to SEQ ID NO: 235567

SEQ ID NO: 241201 - DNA, 465 bp, Klebsiella pneumoniae
atgatagataaaaataacctaccacaaagattatattacacacttcctgatgcagctaaagtcttggggtgtgaagttcgggatataattcattatgcggcaattcatgccttgcaactttcggtgtacataaaacttcatcattgtgagaccgattcatggtttcatcttaatatgccttcaagcaaagtagatgacattgatatattttccatgctaaggggcgatggctgggagattgacttcgtagagtttaaaagcaaatctgaaaaattctttgctgatggctattatgctaaggctgtaagcggatttttttatgttgatggttacaacctaattcctcttgaattcaatgagtctgacgaaatctctctggttggcgtttctactttaccgagcttcatcgatggacagtgtattgatgttaattatgtgttaggaaaaatgacatggattttataa

SEQ ID NO: 241202 - DNA, 570 bp, Klebsiella pneumoniae
atggcagatttacccgacgactattttctggatgccgacgatgaccttgtagatttcctggagggtcagggcgaagaatccattaaggaaacatatcaatcaaacaccacgaatattgagaatggatataaattactcaacattcagattgtagggattggatcttcattcttgcttttgacgcaaaagacaagttgggactatttgacagcaggcttagccgtttttatttttttgtggacgtggagtgctatttacctggttcatgcaggactttccgccaagaatcgggcgcttattcactcccctcccgagtgtctgtatacaaaaacatataaaaatattaatgagttaaattatcaatatctgcgcaataatggttataacggacctaaagaggctttacctgttatgcggaggtataggcttaagaatttaacggatacagcagcggaattacgcgcattaaactcaaccatcaggacgagccttgatagggcgagaatggctacgatcctcgccccagtaattgcattaattgcttccgctattactttttgtttctcctga

SEQ ID NO: 241203 - DNA, 990 bp, Klebsiella pneumoniae
atgacctcaaccacccagaatcaacgctacgccttacaggaactggaaaaagaggcgctgatgggcgccgagggcgaagagaccttcgcccgcgaagtgcgctgtatcgacctgtcgaactttgccgcaagaaaaaatgacattgccgaacaactgtgggaggcggcggtggagattggcttcttccaggtcagccatcacggtattccgctggcggatatccgccaggcgttcagcatgaccgaggcgtttttcgacctgcccgacgaggtgaagcgccagtatccgctggccggcaacgccggctgggaaagcaaagcgcaggttcggccgtcgacccgcaccccggatcaaaaagagtcgtatcagataacccggcctctgatggccgggcgctggcccagcgatcgggagttgccagcattccagcagacaatgctcgggtttgagtcgcagtgctggcagctggggatgaagatcctctcctgctttgctttaaagctcggttttccggaatcgttttttaccaccgcgcacgatccgcagcgtgacacctaccagagcaccttgcgcatgctgcattactatgcaaccgagcagtcgcagcaggggatgtggcgggccggcgcgcacaccgattttgactgcctgacgctgctgttccagcgccccggccagggcggcctgcaggtttgtcccggtaaagaccgcgaaagccagcagtggaccagcattgagccgcgcgaggaggtgatcacctgcaatatcggcgatatgctgatgcgctggagcgacgaccagctgccgtctaacttccaccgggtgagaaatccgctgccccacgaatatcaggggccgcgctacagcctggcgtttttttgccaggccaataaagatgtcgagatcctcgggccgcagaggaagtacccgcccatcagcgccgaggattatctgcagcagcggatccaggccaattttgccaaagggtaa

SEQ ID NO: 241204 - DNA, 990 bp, Klebsiella pneumoniae
atgaaaacaggcgcacgccttccccggggcatacgctggctgggcctgatggctctcggcggtgtctcgctggccgttcaggccgaggagaaaatcgttctgctgacctcctggtacgcccaggcggagcaggggggttattatcaggctcaggccaccgggctgtacaaaaaatatggtctcgacgtcgagatccgctccggtggaccgcaggtcaacggcatgcagttgctgttgtcgaagcgggccgatgtgatcatcggttacgacctgcagctgctggaaggcattcagcgcggcttccaggcaaaggccattgccgcgccctttcagtacgatccccaggggctgctgactcatgccgatgtcacctctctgcaggggctgaaagacaaaaccctgctggtttccagctccggtcaggcgacgtggtggccgtggctgaaggcgcaataccagctgagcgacgcgcaggttcgcccctataccttcaatattcaaccctttgtcgtcgatgacgctgtcgcccagcaggcctatgtcagctccgaggtgttccaggtgcagaaggccggagtgaaggcgaacttcttcctcttttccgaacacggctatcccccctacggcggcatccttatcgcccgcccggataccatcgccgagcgtaaagcggcgatggcgaagtttgtccgcgcctcaatggagggctgggtgagctatctcaaggatccggagccgggcaatgcgttgattaagcaggacaacccgaaaatgaccgacgatctgctcgcctggggcgtgacccagatccgtgagcatcacctgatcgacggcggggatgccgccagccagggctgggggacgatgaccgacgcgcgctggcagaagacccgcgactttatggtcagcgccggtctgctggcggcggccaccgactggaaacaggcctacaccaccgaatttgttcaggccatgcaggttaaaccctga

SEQ ID NO: 241205 - DNA, 900 bp, Klebsiella pneumoniae
atgtttgccttctcccgatttctgctctatttcactgaagtggcccgtcagggatcgtttcgtaaagcgtcagaggcgctgcatgtgtcggcgtcttccatcgaccgtcagattttgcgcgtggaacaggagctggcgatgccgctcttcgagcgccatcccaccgggctgaggctgaccgccgccggggagctgctcctgcacgcggccaataactggaaaaaggactttacccgggtctgcgagcagctggacgatctgcgcgggctgcggcgggggcatgtgcgcatcgccaccatcgatgccattaaccggcatttcttttcgacgatgctcaaagaggtgcataaacattatcccaacatctcttttacattgaccaccatcaacaatatccacatccagcaggcgctgatctccggcgaggcggatttcggcatcatgctcaatccgcagacctcccgtgaactgcaggtccgggcgtttgccgaaatgaatatggggatcgtggtgccgaccggccatccgctggccagccgcagcgcggtgcgctttagtcagtgcctcgactacccgtttatcctgccgtccgccccattgatgatcagcgagccggtggaggcgctggtgaacatcagcggcaacgaggtgaaggaggtggcggtatcgaataacattcacatgatccgcaccctgatcaaagagcagatgggcatcggcatcctgtgccggctggatattctcgatgagattgagtccggccagctggcgtttgtgccgctaaccgatccgcagcttaagcctttcacgctggcgctgtgcgtctcgcccgcccgccagctttcccttgccgcctcgatgatgctgaaccagctggagatgctcttcagccagctgtga

SEQ ID NO: 241206 - DNA, 882 bp, Klebsiella pneumoniae
atgattaacggttacattcctgccgcgcgctttcttccttttctgagctggacggacgtggccgccctgccggataaaagcaatacggttatcgtcctccccaccggggcgatcgaacagcacggcccgcatttgccctgctcggtggacagcgtgatatcttccggcgtggcgggccatgccctcgccaggctgccggcgacgatcccggcctacgccattccgccgatcgtctacggtaagtccgaggagcatctgcattttcccggcaccctgacccttagcggcgatacgctgctgcataccctgctggagatcgccgaatctctctatcgggccggttttcgcaagctgctgatgatcaacggccacggcggccagccgcagatcctgcagatcgcctgccgggaaatgcgcctgcgccacggggatttcatcgccatcccccacgacgtgttcaacgtgcccaactgcgaaaaacagtttctcagcccgcatgaacagcggatggcgatgcacgccgggcatagcgaaacggcgctgatgctggcgctggcgccggagtgcgtccatatggaacgggccgtcgctaatttccccccggaattcccctgcccaaccctgtcgaaaggccgtccggcggcggcgtgggcgtcgtatgactttggccccagcggggtgattggcgacccgaccccggcgacgcgggagcaaggcgaagggcttctcgactccctcgccgccagctgggcgcaggcgatcatcgagatccaccgcatggcctgggtcgaacgtcgcgaaccgacctggggcaaacagcactggcacggctttgtgcagtccctaccaccttctttcgctgctgaatccagggagccctga

SEQ ID NO: 241207 - DNA, 831 bp, Klebsiella pneumoniae
atgaataccgccccgaaactgaccgtgatgagcgatacccgctttatgcccgccgctgccaccccggccatcgaggtgctgtcggcggagaaaatctacagcaacggcacccgggcgctgctgcccgtcaacctgaccatcaatcagggggagtttattaccctgctcggcccgtccggctgcggtaaaagcaccctgctgaagatggtcgccggcctggtggagcccagcgacggcaagctgatgctgtggcggcgcgacagtcgggaaaaggcccagcatccgctgtcgttcgtcttccaggaagccaccctgatgccgtggagcagcgtgcgcaataacgtcaggctgccgctggatctggccggcgtgccgcgggcggagggaaatacccgggtgagtgaagtccttgagctggtgggcctcggcaagttcgccgacgtcctgccgcgcgaactctccggcggcatgcaaatgcgcgtctccatcgcccgcggcctggtcacccgaccaaagctgctgctgatggatgagcccttcggcgcgctggatgaaattacgcgtaacaaactcgacagcgacctgctgcgtctctggcaggagcaaaacctgacggtagtgttcgtcacccactcgatccacgaagcggtgtttctctcccagcgggtgatcatgatggcggcccgtcccggacgggtggtcgaagatatccccatccgcgagccgttcccgcgcagcgaggcgttccgcgtcagcccggccttttccctgtatgcccgtcagctgcaggacagtctgttgcaggccagccagtccggtatggagtcataa

SEQ ID NO: 241208 - DNA, 1233 bp, Klebsiella pneumoniae
atggataaattgcttgagcgttttttgcagtacgtttctttggacacgcagtcaaagcctggcgttcgtcaggtccccagcacggaagggcagtggaagctgttacgcctgttgcaggcgcagctggaagaaatgggactggtcaaggtaacgctgagtgaaaaagggacggtaatgggaactttgcccgctaacgttgagggcgatatcccggccatcggttttatctcccacgtcgacacctccccggatttcagtggtaaaaacgttaatccgcagattgttgaaaactatcgcggcggcgatatcgcgctgggtatcggcgatgaggtgctctccccggtgatgttcccggttctgcatcagcttttgggacagacgctgatcaccaccgacgggaaaacgctgctcggggcggacgacaaagccggcattgccgaaattatgaccgcgctggcgaccctgcaggcgaaaaatattcctcatggcgatatccgcgtggccttcacccctgatgaagaggtgggtaaaggggcgaagcatttcgacgtcgaggcctttgacgcccgctgggcctataccgtcgacggcggcggggtcggcgaactggagtttgaaaacttcaacgccgcctcggtgacgattaaaattgtcggtaataacgtgcaccccggcaccgcgaaaggggtgatggtcaacgcgctgtcgctggccgcgcgcattcatgccgaagtaccggccgatgaagcgccggagaccactgaaggctatgaaggtttttatcacctcaccagcatgaaaggcagcgtcgatcgggccgagatgcattacatcatccgcgattttgaccgtaagcacttcgaggcgcgcaagcgcaagatgatggagatcgccaaaaaggtcggcaagggactgcacccggactgttatattgagctggtgatcgaggacagttattacaacatgcatgagcaggtgatcgcccatccgcacgtggtcgatattgcccgccaggcgatggtggactgcgatattgaaccgcagatgaagccgatccgcggcggcaccgacggcgcgcagctgtcatttatgggactgccgtgcccaaacctgtttaccggtggctacaactatcacggcaaacatgagtttgtcaccctggaaggaatggagaaagcggtgcaggtgatcgtgcgtatcgccgagctgacggcggcacgcaaagggcattaa

SEQ ID NO: 241209 - DNA, 507 bp, Klebsiella pneumoniae
atgtcacaaaccgtgcatttccagggcaaccccgtttctgttcagggcaccattccgcaggcaggcgctaaagcgcagccgtttacgctggtcgccaaagatctctctgacgtcgcgctgagccagtacgccggcaaacgtaaagtactgaatattttcccgagcattgataccggcgtgtgtgccgcatcagtgcgtaaattcaaccagctggccgctgaactggacaacaccgtagtgctgtgcatttccgctgacctgccgttcgcccagtcccgcttctgcggcgcggaaggcctgagcaatgtggtcaccctgtccacgctgcgcggcacgtccttcctcgctgactacggcgtcgccatcgccaccggtccgctggctggcctggctgcgcgtgcggtggtcgtaatcgatgaaaacgatcaggtcgtctacagccagctggtgaacgaaatcaccgaagagccggactacgacgccgcgctggccgccctgaaagcctga

SEQ ID NO: 241210 - DNA, 966 bp, Klebsiella pneumoniae
atgcgtaacgtgcgagtgtatgaggaagcctggccgctccataccccttttgtgatcgcccgcggtagccgcagcgaggcaaaagtggtggtagtggaactggaagaggacggcgtgaaaggggtaggcgaatgcacaccctatccccgctatggcgagagcatcgcctcggtcatggcccaggtgatggcgatcggcgagcaactggaggcggggcttacccgcgaacagctgcagcggctgctgccggcaggcgccgcgcgcaatgccattgactgcgcgctatgggatctgcaggcccggcgcgaaggcaaaaccttggcccagctgttgggcgtggcgttgcctgaccgggtgattaccgcccagacggtggtcattggcacgccggatcagatggcggccagcgccgcggcgctgtggcaggcaggggcccagctgttgaaggtgaagctcgacgatcgactgatcagcgagcggctaatcgctatccgccaggcggcgccggaggctacgctgattgttgacgccaatgagtcctggcacagcgaggggctggcggcgcgctgtcagctgctggcggacctcggtgtggcgatgcttgagcagccgctccccgccgacgacgactcggcgctggaaaacttcgttcatccgctgccgatttgcgccgacgagagctgccacacccgggagagcctgccgcggctgcgcgggcgctatgagatggtcaatatcaaactggataaaacgggcggcctgaccgaagcgctggctctggccggggaggcggaacggcagggatttgaacggatgctgggctgtatgctctgcacctcgcgcgggatcgccgccgcgctccctctggcgccgctggcgcgcttcgctgacctcgacggcccgacatggctggcggtggacgttgagccggcgctgcggttcagcaccggcgtgcttcatctttaa

SEQ ID NO: 241211 - DNA, 708 bp, Klebsiella pneumoniae
atgtctatttcacgtcctcgcccgcagcgcggcgactttccgccgggaacccggcagtatggcagctcggaactgggcgcgccgctgctgtggtttcctgcgccgcaggccgacagccgtagcgggctgattattgccggtacccacggtgatgagaattcgtcgattgtgaccctctcctgcgccctgcgtactctgaaacccgagctacgccgccaccacgtggtgctgacggtcaatcctgacggctgtcagctcgggctgcgcgccaatgcccgcggcgttgacctcaaccgtaactttccggcagccaactggaagcaaggggaaacggtttaccgctggaatagcgcggcggcggagcgcgacgtggtgctgttgaccggcgagcagcccggttcggaacgggagaccgaggccctgtgtcagttgatccatcagattcatccggcgtgggtggtctcctttcacgatccgctggcctgtatcgaagatccgggccacagcccgctgggtcgctggctggccgacgccttctccctgccgctggtgggcagcgtgggctacgacacgccgggctcctttggcagctggtgcgccgatatcggactcccctgcatcaccgccgagttcccgccggtctccgccgacgaggcaacggagcgttacctgccggcgatgaccgatctgctgcgctggcaggcttaa

SEQ ID NO: 241212 - DNA, 1617 bp, Klebsiella pneumoniae
atgaagtatcctgtcgctttgacatgcggcgcgctgtggttagccagcgtatcttctctggcctgggcggctgacgtaccgccgggcacggtactggcggaaaaacagctgttagtgcgccatatcaaagatgaacccgcctcgttagatcccgccaaagcggtgggcctgccggaaatccaggtgatccgcgatctgtttgaaggtttagtcaatcaggatgcgaaaggcaacctggttccaggcgtagcgacccgctggcagagcaacgataaccgcgtctggacctttaccctgcgtgataatgcccgctggtccgacggcacgccggttaccgccgaagatttcgtctatagctggcagcgtctggtggatccgaaaaccacttcgccgttcgcctggttcgcggcgctggcggggatcgctaacgcgcagaacattattgacggcaaagccgcgccggagaccctgggagtcaccgccgtcgacgcccacaccctgcgggtgcagctggataaaccactgccgtggttcagcaacctgaccgccagctttgccttctatccggtgcaaaaggcgaatgtcgacagcggggcgaactggacgcggcccggcagcctggtgggcaacggcgcctatgttctgaaagaccgtgtggtcaatgagaagctggtggtggtgccgaacacgcactactgggataacgccaaaacggtgatccagcaggtcacctttgtgccgattaaccaggagtccgccgccaccaagcgctatcttgcaggggatatcgatatcaccgagtctttcccgaaaaatatgtaccagaaactgctgaaggatattccggggcaggtgtataccccgccgcagctgggtacctactattacgctttcaatacccaaaaggggccgacggcggatgagcgggtacgcctggcgctgagcatgaccatcgatcgccgggtgatggcggagaaagtactggggaccggggaaaaaccggcctggcgcttcacgccggacgtgacggcgggcttcaccccccagccgtcacagtttgagagcatgagtcaggctgagcttaatgcccaggcgaaagccctgctggctgccgcgggctatggcccgaatcgtccgctgaagctgacgctgctgtataacacctctgagaaccaccagaaaattgccatcgcggtggcgtcgatgtggaagaaaaacctcggcgtggaagtgaagctgcagaaccaggagtggaaaacctatatcgacagccgtaacaccggcaatttcgacgtgatccgcgcttcgtgggtgggagactacaacgagccgtccaccttcctgtcgctgctgacctccacccacagcggaaatatttcgcgctttaacgatccggcgtacgacaaaatcctcgcccaggcggcggtagagaattcggccaaagcgcgtaacgacgattacaacgcggcggaaaagatcattatggtcaaagcgccgatcgcgccgatctaccagtacactaacggccggttgattaagccgtggctgaaaggctacccgatcaccaacccggaagatgtggcctacagccgtaccatgtatattgtgaagcactaa

SEQ ID NO: 241213 - DNA, 387 bp, Klebsiella pneumoniae
atgaaagtcctcaatatcctgatccgtcgatgcgtgctgattgcccgctttgaagataccgtttcgttctacgaaaatctcatcgcgcagaaggcaaggttgcgtttcgactatcccaaatacgatctcaaactggcgcaggtgggttccgtgcttttaattggcggaaccgagcaaagcctggctccgtttcgcgccaccgaggccacttttctggtaaacgacattaccgcctgggagaaacatctgccttccaccggggcaacgattatcaacccggtgaaggccgtgcccaccggctggaacatgctggttcggcatccggatggcatggttgccgaatacgttgagcatcatgataaaaacccggcggatgagatcttctga

SEQ ID NO: 241214 - DNA, 834 bp, Klebsiella pneumoniae
atggaaagtttaatttcttcgatatggaattttgatggactgataaatagcgcgttaatttttgttacttttggtttattaggagtgtttatctggaaacgggcaggatccgcatattctttattgaaccggctatgggagttctgcctgggagggaaaacgtttcacgacggtaaaataaatgcatatttcaatgagagaaatgatgttgaacgttttaatgttttatttaatgtcggcgcaagaaataaagaagagatcaagtcactgattaactggacgaaaaagaaaaatatagatattcgtcatgtcacagccgcgaaaggatggtttgaaatatcaacgcttaaggcaataaaaccattatttatcgctaatgttggtgtatttgtctcttgtgtgttaactatgctgctattatcaaattttatgttgctggcattgaagccatccgcactagtacgattaggcgacgacaagtcatgggtttggattaatgatcatattgctgagagttcgatctggaccaataattaccttcccctgaactggactgagtggaagctcgataaaaaacagtgtgaaagtgaagatttcgataaaacggttttctcagaaaaagcggggataagtgtgcgctcggttgacaggatttgtgagaacttttcaagtggttcgttgagtgatactataaataatattattaaaaatcaaaaactggcatgggttttggctatttaccccttcatctttacgattatttgcttttttagcttgttacgcagaggtgctgcttctaaactttataatgaagtacataactcacaaaattaa

SEQ ID NO: 241215 - DNA, 885 bp, Klebsiella pneumoniae
atggcgaaacgggaaaactataatgacctctatctgtttatgcaggtggtgcgggaaggcagttttaccgccgcagcgcaacgacttggcctggcgcagtccggagtaagccgtgcggttcgtgaacttgaagagcggctgggcgttcagcttctggtgcgcaccacccgccgattgtcgctcactcaggcgggtgagcagctctatcacaatgtcgaatccggtttcgacgccttagatatgggactcgccacgctggcccactatcgtcaaacgccctccggtacggtacgcatcaatgccagccagcatgccattgataaagtcctgctgccgaagctggcagtatttaaacaacgctatcccgatatcagactggaactgatcagcgaaagccggtttgtcgatattattgcgcagcgatttgatgcgggcgtacgtctgggcccggaagtcggaagcggcatgattgcggtacgcatttcgcccgatatggagatggcggtggtgggtaccccggaacattttcgccgctacggctttccacaaacgcccgccgatttagtcgcccacccctgcatcgcttatcagttcggcgacggcagcctttacgcctgggaacttaatgtggatggcaaaaaaatcacccacccacctcagggacagtgggctttcgccgatagctatatggaggccaaagcggcgaggctcggtctggggctggcctatgtcccggaagagctgattaccgacgatctagcccagggcacacttatccgggtgctccagcgttatagccagcgtctggaaggttcatttctctattacccgcaccgcaatgtgtcacccgcgctgagagcggtcattgatacattgcgaatgtag

SEQ ID NO: 241216 - DNA, 1059 bp, Klebsiella pneumoniae
atgagctctgctgagacaactaacccgaatgcgcctgtttcaatgattgaaaaatgggacaaaacttttgctgagagttcgaaagtggatcaccgtaaggtgaccttcctgaaccgctacgggataaccttagttggcgatctctacctgccgaaggatcgcggtgaacgcaaactggcagctattgccgtgagcggtcccttcggcgcggtaaaagagcagtccagcggcctgtatgcccagacgctggccgaacaaggttttgtcaccctggcatttgacccatcgtatacgggcgaaagcggtggctacccacgcaacgtggcctcaccggatatcaataccgaggattttagtgccgcggtggactttctgggcctgcaaaaagaggtggatcgcaaccgtatcggtttgctcggcatttgtggctggggcggtatggccctgaacgacgcggcgatggacacccgcgtcaaagcggtggcgaccagcgtaatgtatgacatgagccgcgcgatggggcatggagtgggcgatggcaaagaccgctataccactgccgatcgtcgcgccgtactgcgctatctgaacgtgcagcgctggaaagatgcggcaaacggcaccttcgtccccggtgggcatgacatttatgttgatgataagggcaacgtcagcgctgccgatcgtattttgccggaaaccttgcccgccaaccccaacccggtcctgaaagagtttttcgattattaccgtatgccgcgtggtttccatccgcgttcggttaattcaaccggggcctggaatgcgacgatgccgctgtcgtttatgaatatgccgctgctgagttacgccagcgaagtgactattccgacgcttatcgtgaccggcgaaaaagcccattcacgctattttgccgaagatgcctttaaggccatcggcagtaaagagaaagcgctggtgattgtcccaggcgcaaaccacgtcgatctctatgacaacgtcgcgggcaaaattccctttgcgacgttcgcgcaattttttaaaaccaacctgaaatag

SEQ ID NO: 241217 - DNA, 870 bp, Klebsiella pneumoniae
gtggaatattcagtattaagtaacgctcgcaaaatgccgatgctgggtttcggcgttttcaaggtgaccgataaagcggagtgtaagcaggcggtgttgaacgccattcgcaccggttatcgcctcatcgataccgctgccgtctacgataatgaagatgcggtgggtgaggccgtgcgcgaagccatcgccgaaggtctgtgtacccgcgaggcgctgtttattacctccaaactgtgggtccaggacatggccaacaccgggatggcgaaagccgggattgccgcgtcattaaaaaaatcgggcctggaatactttgatctttatttgctacatcaggcgatgggcgattatttcagcgcctggcgtgcgctggaagaggcctatgaggccggtaccctgaaagcgatcggcgtctccaatttttacccccatgtgttagctaacttctgcgaaactgtcagaattaaaccaatggtgaaccaggttgaactgcatccttatttcgcgcagcccgcggcgctggaagccatgaagcattatcacgttcagcctgaagcgtgggcgccgttaggcggtggcagacataatccgtatcaagatgcattgctgcaggggatcgccgatgcgcaccagaaaaccattgcgcaggttgttctgcgctggaacgtgcagcgtggcgtcacggtgatccctaaatccacccgccaggagcgcattgaagaaaattttgctatctgggatttcgtattaacagataacgaaatggcgcaaatcagcgccctggatttaggctatgttggcgaagcggtaaaacacttcaaccctgagttcgttcgcggatgtctgggggtgaaaatccacgactga

SEQ ID NO: 241218 - DNA, 312 bp, Klebsiella pneumoniae; identical to SEQ ID NO: 241181

SEQ ID NO: 241219 - DNA, 963 bp, Klebsiella pneumoniae
atgcatcagacgaaaacaggtatcttgctggccaatttaggcactcccgatgcgcccacccccggggcggtgaagcgctatctgcgacaattcctcagcgacaaacgggtggtggatacgtctcgtctgctatggtggccgctgctgcgcggcgtcatactgccgattcgctccccgcgcgtggcgaagctctatcagtccgtgtggatggaagagggatcgccgctgatggtgtatagtcgtcgccagcagcaggcgctggctgccaggctgccggataccccggtggcgctgggcatgagttatggttcaccgtcactggccagcgcggtggatgacttactggcgcagggggtggagcacatcgtggtgctgccgctgtatccgcaatattcctgctcgacggtggccgccgtctgggacgaactggcgcggattctggcgaaaaagcgcgccattccgggtatctcgtttattcgcgactatgccgaacatccggactatatccatgcgctggcggccagcgtgcgcgcttccttcgctgtccatggggaaccggatctgctgctgctctcctatcatgggatcccgcagcgctatgccaaccagggcgatgattatcctcagcgctgtcgcgatacgacgcgggaactggtttccgcgctggggctgccgccggagcgggtgatgatgactttccagtcgcgctttggccgggaaccctggctgacgccgtacaccgatgaaacgctaaagatgctcggcgagaaagggacgaagcatattcaggtgctgtgcccggggtttgccgccgactgtctcgaaacgctggaagaaatcgccgtccagaaccgggaaatattcctcgaagcaggcggcaagcaatatgaatatattccggcgcttaatgcggacgcagcgcatattgagatgatggtcaatctgacggcgccttatcgctga

SEQ ID NO: 241220 - DNA, 645 bp, Klebsiella pneumoniae
atgcgtattattctgcttggcgctccgggcgcgggtaaaggaactcaggctcagttcatcatggagaaatacggtattccgcaaatctccaccggcgatatgctgcgcgcggcggtaaaatccggctctgagctcggtaagcaagcgaaagacattatggacgctggcaagctggtgaccgatgagctggtcatcgcgctggtgaaagagcgtatcgcccaggaagattgccgtaacggcttcctgctggacggcttcccgcggaccattccgcaggctgacgccatgaaagaggcgggcattaccgttgattacgtgctggaattcgatgtgccggacgaactgatcgtcgaccgcatcgttggccgtcgcgtccacgcggcatccggtcgcgtataccacatcaaattcaatccgccgaaggtggaaggcaaagacgacgtgaccggcgaagagctgaccactcgtaaagacgatcaggaagagaccgtgcgtaagcgtctggtagaataccatcagatgacagcgccgctgatcggctactacaccaaagaagcgcaggcgggcaacaccaaatacgccaaagtcgacggcaccaaagcggtagctgacgtgcgcgccgaactggaaaaaatcctcggctga

SEQ ID NO: 241221 - DNA, 1875 bp, Klebsiella pneumoniae
atgaaaggacaagaaactcgtggttttcagtcagaagtaaagcagcttctgcacctgatgatccattccctctattccaacaaagaaatctttctgcgtgagctgatttccaacgcctctgatgcggccgataagctgcgtttccgcgcgctgtcgcagccggatttgtatgagggagacggcgagctgcgcgtgcgggtttcgtttgataaagacaaccgcaccctgaccatcgccgataacggtatcggtatgaaccgggaagaggttatcgaccatctcggcaccatcgccaaatccggcaccaaagcgttcctcgaatcgatgggttccgaccaggcgaaggatagccagctgatcggtcagttcggcgtcggcttctattcggccttcatcgtggcggacaaagtgaccgtgcgtacccgtgcggcgggcgacaagccggaaaacggcgtgttctgggaatccgccggcgaaggcgaatataccgtagctgatatcaccaaagccgatcgcggcaccgaaatcaccctgcatctgcgcgaaggcgaagatgatttcctcaacgactggcgcgtgcgctctatcatcagcaagtattccgaccatatcgcgctgccggttgagattgaaaaacgggaagagaaagacggcgaaaccgtgatttcgtgggaaaaaatcaacaaggcgcaggccctgtggacccgcagcaaatccgaagttaacgacgacgaatacaaagagttttataagcatatcgctcacgactacagcgacccgctgacctggagccacaaccgcgtggaaggtaagcaggagtacaccagcctgctgtatatcccgtcgcaggcgccgtgggatatgtggaaccgcgatcataaacacggcctgaagctgtacgtccagcgtgtgttcatcatggacgacgccgagcagtttatgccgaactacctgcgcttcgtgcgcggcctgatcgattccaacgatctgccgctgaacgtctcccgtgaaatcctgcaggacagcagcgtgacccgcaacctgcgcactgcgctgaccaaacgcgcgctgcagatgctggataagctggcgaaagacgacgctgaaaaataccataccttctggaaacagttcggcctggtgctgaaagagggcccggcggaagatccgagcaaccaggaagcgatcgccaaactgctgcgtttcgcaaccacccataccgactcctccgcgcagaccgtatcgctggaagagtatgtctcacgcatgaaagaaggtcaggagaagatctactacatcacagccgacagctatgcggcggcgaagagcagcccgcacctcgagctgctgcgtaagaaagggatcgaagtgctgctgctctccgatcgcatcgacgagtggatgatgagctacctgaccgagttcgacggcaaagcgttccagtctgtcgctaaagccgacgagtcgctggacaagctggcggatgaagtagacgagtccaccaaagaagccgaaaaagcgctggagccgttcgttgagcgggtgaaaaacctgcttggcgaccgggtgaaagaggtacgtctgacccatcgtctgaccgacaccccggcgatcgtcaccaccgacgccgacgagatgagcactcagatggcgaagctgttcgcggcagcgggccaggcggcgccggaagtgaaatacatcttcgaactgaacccggcgcatcagctggtgaaacgcgcggccgatacccaggacgacgcgcagttcggcgaatgggtggaactgctgctggatcaggcgctgctggccgagcgcggcacgctggaagatccgaaccagtttatccgccgtatgaaccagctgctggcttcctga

SEQ ID NO: 241222 - DNA, 606 bp, Klebsiella pneumoniae
atgcaaaccagcccgctgttgactcagcttatggaagcgctgcgctgtctgccgggcgtcggcccgaagtcagcgcagcgcatggcgtttaccctgctgcagcgcgatcgcagcggcgggatgcgcctggcgcaggcgctgacgcgtgcgatgtcggagatcggccactgcgccgattgccgcaccttcaccgagcaggaggtgtgcaatatctgcagcaacccgcgtcgccaggaaaacggccagatctgcgtggtagagagtccggcggacatctatgccattgagcagaccgggcagtattccggccgctacttcgtgctgatggggcacctgtcgccgctcgacggcatcgggcctgatgacatcgggctcgatcgcctggagcaacggctggaggcggagtcgatcaccgaggtgatcctcgccaccaacccgaccgttgagggcgaggcgacggccaactacatcgcagagctgtgcgcgcagtatggcgtcgacgccagccgaatcgcccacggcgtgccggtgggcggcgagctggagatggtcgacggcaccacgctgtcccactccctggccggtcgccacaagattactttctga

SEQ ID NO: 241223 - DNA, 333 bp, Klebsiella pneumoniae; identical to SEQ ID NO: 134863

SEQ ID NO: 241224 - DNA, 1908 bp, Klebsiella pneumoniae
atgagttatcaggtcttagcccgtaaatggcgcccacaaacctttgctgacgtcgtcggccaggaacatgtgctgaccgcactggcgaacggcttgtcgttagggcgcattcatcacgcttatcttttttccggtacccgcggggtcgggaagacctccatcgcccgtctgctggcgaaagggttaaactgtgaaaccggcatcaccgccaccccctgcggcgtgtgcgataactgccgggaaattgaacaggggcgctttgtcgatctgattgagattgacgccgcctcgcgaaccaaagtcgaagatacccgcgatctgctggacaacgtccagtacgcgccggcccgcggccgctttaaggtctatctcatcgacgaagtccatatgctgtcgcgtcacagcttcaacgcgttgttaaaaacgctggaggagccgccggcgcacgtcaaattcctgctggcgacgacggatccgcagaagctgccggtaacgatcttatcccgctgcctgcagttccacctgaaggcgctggacgttgaacagatccgccatcagctggagcatattcttggcgaagagcagattgcctttgagccccgcgcgctgcagctgttgtcgcgggcggccgatggcagcctgcgcgatgccttaagcctgaccgatcaggcgattgccagtggggaagggcagctgacggccgcatcggtgagcaccatgctcggcacccttgatgacgatcaggcgctgtcgctgattgaagcgctggttgctgccgacggcgagcgggtcatggcgggcgtcaatgacgccgccgcacgcggcgtcgagtgggaggcgctgctggtcgagatgcagagcctgctgcaccgcatcgccatggttcagctgtcgccttcggcgctgggcgccgacatggccgcggtcgaagtgcggatgcgcgaactggcgcgaaccgtaccgcccggcgacgttcagctctactaccaaacgctgctgattggccgcaaagagctgccttacgccccggaccggcggatgggcgtcgaaatgacgctgctgcgtgccctggcgtttcatccgcgtaagccgctgccggagccggaggtgcagccggcacaggccgccgcgcccgcgccgcgtcagccggttgcccccgccgcgccgccgccacagtcgccgcagagtttgccgccgaccaccagccaggtgctggcggcccgcagccacctgcagcgcagtcagggagcaaccaccccaaaaaagagtgaaccggcagccgctacccgcgcgcggccggtgaataacgctgcgctggagcgactgagttcgattaccgagcgcgtccaggctcgtccggccgcggccgcgctggagcaggccccggcgaagaaagaggcctatcgctggaaggcgacgacggtggtggaagagagcaaagtcgaagtcgccacgcccaaagcgctgaaaaaggcgctggagcatgagaagacgccggagctggcggccaagctcgccgaagaagcggtcgagcgcgacagctgggcggcggaagtgagccagctggcggtaccgaagctggtcgagcaggtggcgctcaacgcgtggaaagagcaggagggcagccgcgtctgtctgcatctgcgtcccagccagcgccacctcaattccgccagcgcgcagcaaaagctggctgaagcgctgggggtgttgtacggtacgccggttgaattgaccatcgtggaagacgataatcccgcgatgcgtacgccgctggagtggcggcaggctatttatgaagagaagctcgcgcaggcgcgcgaagccattatcgcggataataacattcagaccctgcgtcgtttcttcgacgccgatctggatgaagagagtattcgccccatttga

SEQ ID NO: 241225 - DNA, 552 bp, Klebsiella pneumoniae
atgaccgcaactgcacagcagcttgaatatctgaagaacagcatccagagtatcgaggattatccaaaacctggcattcttttccgcgatgtcaccagcttactggaagacccgaaggcctacgcgcttagcattgaactgctgaccgagcgctacaaagacgcgggtattaccaaagtggtagggactgaggcgcgtggcttcctgttcggcgccccggtcgcgctggcgctgggcgtgggctttgttccggtacgcaagccgcgtaagttgccgcgtgaaaccattgccgagacctatgagctggagtatggcaccgatcagctggagatccacgttgacgccattaaaccgggcgataaagtgctggtggttgacgatctgctggcgaccggcggcactatcgacgccacggtcaaactgatccgccgcctcggtggcgaagtgcacgatgccgctttcattatcaatctcttcgatctgggcggcgaacagcgcctggagaagctggggatccactgctactgtctggtgccgttcccgggccactaa

SEQ ID NO: 241226 - DNA, 378 bp, Klebsiella pneumoniae; identical to SEQ ID NO: 138159

SEQ ID NO: 241227 - DNA, 528 bp, Klebsiella pneumoniae
gtgaaaactgctcaacttttacaaacgctgaacgaccagctgagtgagctgtccgcgctggtggcgccgctggcggagcacgcgaccctcagcccgcgctttgaccgccagctcttccacacccgcagcacgctgatgcaggcctatctggcggaagcccaacacaactttaaccagctccgccaggccatcgagcgccagcagctgccgcaggtggtctggattgccgagcgtctggcggcacaaatcgccgcgctgcgccgtgaaaccgccacctggtccttgcgcagttgggaccacgcgtcgccaacgttgagccgctggcagcgccgtcgcctgcagcatcaggagtatgagcgccgcctgctggcgatgcgcgaccaacgccagcgtcagcaggcgcaggcgaccagccttgacgagcagcagcggctggggaaagaagttgaagcctacagcggccggttggcgcgctgccgacaggcgctggacaagattgaaaacgtactggcgcggctgacgcgctaa

SEQ ID NO: 241228 - DNA, 174 bp, Klebsiella pneumoniae; identical to SEQ ID NO: 210466

SEQ ID NO: 241229 - DNA, 204 bp, Klebsiella pneumoniae
atgccctcaggcttccttgactcagacacctctggttcccaaagcacaccgccaagtcttgtgttgagtgaagaagaacttaagctcattactttttttcgtggattccctgactccgcaaagaaagaagcgctaattgaatttgaatctaagttcaataaatacaacgaacttttcaaagagttactggcttcacgcagttaa

SEQ ID NO: 241230 - DNA, 285 bp, Klebsiella pneumoniae
atgaaagcaattattgtaggattggtattgtctttttattgtacttattcttttgctcagattgaggaagtgcagcttttggatagcatgaaatctcaagcgtgcaatggaaataaggcatgtgaatctatgtttatatcagcaattagtatggcatcgaatattgctagatatcatggtgaatgccttagggacggcgacacatccaagcaatgtctcaatgccaagataacttacgagcatatagcatctgagtatgagcaagataaaaagtcccggcagtga

SEQ ID NO: 241231 - DNA, 252 bp, Klebsiella pneumoniae
gtgcagccgcctttcgctgagctggtgaaaagcaagctgaagctcggcggcgtcttccatatggcgaccgactgggaagcttatgccgtgcatatgctggaagtgatgtcctcgctggaaggctatcgtaaccagtcggcaagcaacgattacgtaccgcgcccggaatcgcgcccggtaaccaaatttgaacagcgtggccatcgtctcggccacggcgtatgggacttaatgttcgagagggtgaaataa

SEQ ID NO: 241232 - DNA, 1059 bp, Klebsiella pneumoniae
ttgacttttctcgccacgcaattttcagcccaggttctggactggtacgacaaatacgggcgtaaaaccctgccctggcaaatcgccaagacgccctacaaagtatggctctccgaagtgatgttgcaacaaacccaggtgaccacggtaatcccctattttgaacgctttatggcgcgtttccccacggtggttgatttagccaacgcgccgctggatgaggtgctgcatctgtggaccggtctgggctactacgcgcgggcgcgcaacttacataaagccgcgcagcaagtcgccacactgcatggcggggaattcccccggacctttgacgaagtggcggcgttgcccggcgtcgggcgctcaacggcgggggcgattttatccctttcgctcggtcagcattatccgattctcgacggcaacgtgaagcgcgtgctcgcccgctgctatgctgtcagcggctggccggggaaaaaagaggtggaaaaacggctatgggacatcagcgaagaggtcaccccggcagagggcgtcgagcgcttcaaccaggcgatgatggatctcggggcaatggtttgtacccgctcgaagccgaagtgcgagctgtgtccgctgagcaatggctgcgtggcctacgcgaaccattcatgggcggaatatccgggcaaaaaaccgaagcagaccctcccggaacgcaccggctacttcctgctgatgcagcacggcgacgaggtgtttctttcccagcgtccgccggtgggtctgtggggcgggttgttctgttttccgcagtttgcagacgaagcggagctacgcgagtggctggcgcagcgccagattaaggccgataatctgacgcaattaaccgcttttcgccacactttcagccatttccacctggatattgtgccgatgtggcttacagtgcactcatctggcgcatgcatggatgaaggcaacgcactctggtataacttagcgcagccgccgtcggtcggtctggcggcccccgtggagcgcttgttgcaacagctaaaagccggagcgccggtataa

SEQ ID NO: 241233 - DNA, 276 bp, Klebsiella pneumoniae; identical to SEQ ID NO: 137730

SEQ ID NO: 241234 - DNA, 1086 bp, Klebsiella pneumoniae
atgatgaaaaaatacttagcgctcgcgctgattgcgccgttgctcgtttcgtgttccagctccaataaaaaaggcgccgaatacaacgaggcctgggtcaaggacacgaacggattcgatattttgatgggccagttcgcccacaacatcgagaacatttgggggtacaacgaagtcctgctcgccgggccaaaggactacgtcaagtacaccgaccagtatcaaacccgcagccacatcaacttcgatgaagggacgatcaccgtcgagaccattgccggcaccgaccctcgcggacgtctgcgccaggcgatcgtcaaaaccctgttgatgggcgatgaccccaactccattgacctctattccgatgtcgatgacatccagatctccaaagagccgttcctctatggtcaggtggtggataataccggggcgtcgattcgctgggagtggcgcgccgcgcgctttgccgactatctgctgcaaacccgtctgaagagccgcaacaacggcctgcgcgtggtctacagcatcaccattaacctggtgccgaaccacctcgacaaacgtgcgcataaatacctcggcatggtgcgtcaggcctcgcgtaagtatggggttgatgagtcgctgatcctcgcgattatgcagaccgaatcctcctttaacccctatgcggtcagccatgccgacgccatggggctgatgcaggtggtccagcacagcgccggcagagacgtcttccgctcccagggtaaatccggcctgccaagccgcagctatctgtttgacccggcgaataacatcgacaccggtaccgcctacctggcgatgctgaacaatgtttacctcgccggcatcgataaccccacctcgcgtcgctacgcggtgatcactgcctataacggcggcgccggcagcgtactgcgggtcttctccagcgataaagtgcaggcggccaatattatcaacagcatggcgccaggggacgtctaccagacgctgaccacccgccatccgtcggcggaatcgcgccgctatctgtacaaagttaatacggcgcagaaaagctaccgccgtaaatag

SEQ ID NO: 241235 - DNA, 1254 bp, Klebsiella pneumoniae; identical to SEQ ID NO: 137728

SEQ ID NO: 241236 - DNA, 576 bp, Klebsiella pneumoniae
gtgccggagaagtgcgatctcaactcgattctgttcctgctgacgccggcggagagcgccgaaaaaatggcgcagctggtggcgatgctggggcagtttgaacagcatattgaagcggatacgccgctggccgatgtgttgccgaccatctataacaaatatccggtgcgttatcgcgactataccctgcgcgagctgtgccaggagatgcacgatctgtacgttagctttgacgtgaagagcctgcaaaaagagatgttccgtaaacggagcttcccaagggtggtgatgaatccccaggatgccaaccacgagtttattcgcggcaacgttgagctggtgcgtctgagcgaggcggaaggccgcgtcgcggcggagggggcgctgccgtatccgccgggcgtgctgtgcgtggtgcccggcgaggtctggggcggcgccgtgctgcgctatttcctcgcgctggaggagggggtcaatatgctgcctggcttctcgccggagctgcagggggtttacagcgagacggatccggacggcattaagcggctgtatggctacgtgctgaagggataa

SEQ ID NO: 241237 - DNA, 216 bp, Klebsiella pneumoniae
atgccgctgcgactgtcggccgcggagatgacgactgccgccacatcggtaaaatcggtactgtccagcgccacaacgcgacggtgggtggacaagcgggtgaccagctcgcagctggcggcaatgtgcatggatttcataagcgcaaatgcccgtatcgggagtgtaaaaacctcagacaagggagaccttgcccaacgatgtgtccgggtctga

SEQ ID NO: 241238 - DNA, 714 bp, Klebsiella pneumoniae
gtggttacaggaccttttattaacgccagcgcggtgctggtcggcggtgtgctgggcgccttactcagccaacggttgccggaacggatccgcaccgcaatgacctctatttttggcctggcgtcattgggcatcggcattttactggtcattaagtgcgccaatctgccggtgatggtgctgtcgaccctggtggggacgctgctcggcgaaatatgcaatatggaaaaaggcatcaatacgctggtcagtaaactccagcagttgatgtcagcgaaaggcaagaaaaaggcttcggctcatgagtcttatattcagagctatgtggcgattatcgtcctgttctgcgccagcggcaccggcgtcttcggcgccatgcgcgaagggatgaccggcgacgccagcattctgattgccaaagcgtttctcgactttttcaccgccaccatcttcgcctgcaccctgggcattgccgtcgccgccatcagcgtaccgatgctgcttatccagctgactcttgcagcctgcgcggcgatcattatgccgcttaccacgccgatgatgctggcggatttcagcgccgtcggcggcatgctgctggtggccaccgggctgcgcatctgcgggataaaaatgtttgccgtagtgaatatgctgcctgcgctggtgctggcgatgccgatttccgcggcctggacgctgttttttgcctga

SEQ ID NO: 241239 - DNA, 1185 bp, Klebsiella pneumoniae
atgattatttccgccgccagcgactatcgcgccgccgcacagcgtatcctgccgccgtttctgttccactatattgacggcggcgcctacgccgaacataccctgcgccgcaacgtcgaggacctttccgatgtagccttgcgccagcgtattttgcgcaatatgtcggacctgagtctggaaacgacattattcaacgagaagctggcgatgccgacggcgttggcgccggtcgggctgtgcgggatgtacgcccgccgcggcgaagtgcaggccgccggcgcggcggacgacaaaggcattccgttcaccctctctaccgtttccgtctgcccgatcgaagaggtcgccccgaccatcaagcgcccgatgtggttccagctgtatgtcctgcgcgaccgcggctttatgcgcaatgcgctggagcgcgccaaagccgccggctgctcgacgctggtctttaccgtcgatatgccgactcccggcgcccgctaccgcgacgcccattccggcatgagcggcccgaacgccgccctgcgccgctactggcaggccgtcacccatccgcagtgggcgtgggacgtcggccttaacggtcgcccgcacgatctgggcaatatctccgcctatctcggcaaaccgaccgggcttgaggattacattggctggctggcgaataacttcgatccgtcgatttcatggaaagacctggagtggatccgcgatttctgggacggtccgatggtgatcaaagggatcctcgatccggaggacgcccgcgacgcggtgcgcttcggcgctgacggcattgtcgtctccaaccacggcggccgccagctcgatggcgtgctctcctcggcccgcgccctgccggcaattgccgacgcggtgaaaggcgacatcactattctcgccgacagcggcatccgtaacgggctcgacgtggtgcggatgatcgccctgggcgccgacagcgtgctactgggccgcgcttacctgtacgccctggcgacccacggaaagcagggcgtggcgaatctgctgaacctcatcgagaaagagatgaaagtggcgatgaccctcaccggggcgaaaagtatccgtgaaatcagccatgattcgctggtgcagaacgccgaagcgctgcagaccttcgatgcgctgaagcagaataacgccgcgtaa

SEQ ID NO: 241240 - DNA, 774 bp, Klebsiella pneumoniae; identical to SEQ ID NO: 213467

SEQ ID NO: 241241 - DNA, 1656 bp, Klebsiella pneumoniae
atgaatctctggcaacaaaactacgatcccgccggtaatatctggctatccagtcttatcgcatcgctaccgattctgtttttcttttttgcgctgattaagctcaaactgaaaggctacatcgctgccacctggaccgtcgcaatcgcgctggtcgttgccttgctgttctataaaatgccggtggaccgcgccttagcctcggtggtctacggcttcttctacggcctgtggcctatagcgtggattattatcgccgcggtcttcgtctataaaatctcggtgaagaccggacagttcgacatcatccgctcatcgattctgtcgattacgccggaccagcgcctgcagatgctgatcgtcggcttctcgttcggcgcctttctcgaaggggcggcgggtttcggcgcaccggtggcgattaccgccgcgctgctggttggtctcgggtttaacccgctgtatgcggctggcctgtgcctgatcgtcaacaccgcgccggtggccttcggcgcgatgggcatccctattctggtcgccggccaggtgaccggtatcgatagcttcgccatcggccagatggtgggccgccagctgccgttcctgaccattatcgtgctgttctggatcatggcgattatggacggctggcgcggcattaaagagacctggccggcggtgatagtcgcaggcggttcgttcgctattgcccagtacctcagctctaacttccttggcccggagctgccggatatcatctcgtcgctggtctccctggtctgtctgaccctgttcctcaaacgctggcagccggtacgcatcttccgcttcggcgatctcggcgcctcgcaggtggatatgacgctggcccgcacacgctacacggcgggacaagtgatccgcgcctggtcgccgttcctgttcctgaccgccaccgtgaccctgtggagcgtgccgccattcaaagcgctgttcgctcctggcggcgcgatgtatgacttcgttatcaatatttcggtaccattcctcgacaaaatggttacccgtatgccgccggtggttagcgccgcaacgccctacgccgcggtatataaattcgactggctgtcggcaaccggcaccgccattctgttcgccgccctgctgtccatcgtctggctgcgcatgaagccgaaagatgcgctgaccaccttcgccgggacgctgaaggatctggcgctgccgatctactctatcggcatggtgctggcgttcgcctttatctctaactattccgggctgtcgtcgaccctggccctggcgctggcccataccggccacgcgtttaccttcttctcgccgttccttggctggctgggggtattcctgaccggttcggacacctcgtctaacgccctgttcgccgcgctgcaggcaacggcggcgcagcagattggcgtctccgatattctgctggtcgcggctaataccaccggcggcgttaccggcaagatgatttccccgcagtcgatcgccatcgcctgcgccgcggtaggcctggtgggtaaagagtcggatctgttccgctttaccgtcaaacacagcctgatcttcacctgcatggtggggctgatcaccacgctgcaggcctacgttttaacctggatgatcccgtga

SEQ ID NO: 241242 - DNA, 363 bp, Klebsiella pneumoniae
atgaaagaagtcgaaaagaatgaaatcaagcgtctgagcgatcgtctcgacgccatccgccaccagcaggccgagctgtcgctggtggaagccgccgataaatatgctgaactggaaaaagaaaaagccactctggaaacggagattgaacgtctgcgttccgtccagagccagaagctgagcaaagaggcgcagaagctgatgagcctgccgttccgccgcgcgattaccaaaaaagagcaggccgatatgggcaagctgaagaaaagcgttcgcggcctggtggttgtccatccgatgaccgccctgggccgggaaatgggtctgaaagagatgaccggtttcgcccgcagcgaattttga

SEQ ID NO: 241243 - DNA, 225 bp, Klebsiella pneumoniae; identical to SEQ ID NO: 138359

SEQ ID NO: 241244 - DNA, 597 bp, Klebsiella pneumoniae
atgcacaacctggcgcgaccaacgtcgcgcccattacgactcctgtcagatatgcaggcaatgatggaagaaacacaagcatttgaaaaccgtgtgcttgagcgtctgaatgctggcaaaaccgtacgaagcttcctgatcgccaccgtcgagctgttaacggaagcggtcaatattctggtgcttcaggtgttccgtaaagacgactacgcggtgaaatacgccgtcgagcccttgctggagggcagcgggccgctcggcgatctctctgtacgcctgaagctgatttatggccttggggtgataagtcgtgccgaatatgaagacgctgagctgctgatggccctgcgcgaagagcttaaccacgacggcaatgagtacagctttaccgacgacgaaattatcggtccgttcggcgagctgcactgcgtcgccgccctgccgccaacgccgcaatttgatgacagcgatgccgaactgctggcaatgcagaaactgcgttaccagcagatggtgcgctcaacgatggtgctgtccctgactgagctgatttcacgaatcagcttaaaaaaagcctttcagaaatcaacgctctga

SEQ ID NO: 241245 - DNA, 1149 bp, Klebsiella pneumoniae
atgaaagcattacattttggcgcaggtaatatcggacgtggctttatcggtaaattgctggccgacgcgggcatcgaactgacgtttgccgatgtcaatcagaccgtacttgatgccctgaatgcccgtcatagctatcaggttcacgtcgtcggtgagaatgagcaggtggacaccgtctccggcgtcaatgccgtcagcagcatcggcgatgaggttgtggacctgatcgctgaggtggatctggtcaccaccgccgtcggtcccgtcgtgctcgagcgcatcgcgccagcgatcgccaaagggctggcacagcgcaaagcgcagggcagcgaacgcccgctgaacatcatcgcctgcgaaaatatggtgcgcggcaccacgcagttaaaaggccacgtgtttaacgcactggcggaagaagataaagcgtgggtggaagcgcatatcggctttgtcgactctgccgttgaccgtattgtgccgccatcggcttccgccactcatgacccgctggaagtcaccgtggaaacctttagcgaatggattgtcgataagactcagttcaagggcgcgctgccgactatcccggggatggaattaactgataacctgatggcatttgtcgaacgcaagctcttcaccttgaacaccgggcatgctataaccgcctacctcggaaaactggcgggccatcagacgattcgcgacgcgatcctcgacaagaaaattcgtgccgtcgtgcagggcgcgatggaagagagcggcgcggtgctgatcaaacgttacgcctttgacccgcagaagcacgcggcttatatccagaaaatacttggccgtttcgagaacccgtacctgaaagacgatgttgagcgcgttggccgtcagccgctgcgcaaactgagcgctggcgaccgtttaattaagccgctgctgggtacactggaatacgggctgccgcaccgcaacctggtgaaagggattgcggcggcgatgcatttccgtagcgaagacgatccgcaggcgcaggagctggcggcactgatcgccgacaaggggccgcaggccgcgctggcgcagatttccggcctggatgccgcaagtgatgtcgtcgcggaggccgttaacgactacaacgcggaaaaatga

SEQ ID NO: 241246 - DNA, 1908 bp, Klebsiella pneumoniae
atgtcatccgatatcaagatcaaagtgcaaagctttggtcgtttcctcagcaatatggtgatgccgaatatcggcgcgtttatcgcgtggggtatcatcaccgcgcttttcattccgacagggtggttgccaaacgaaacgctggcgaagctggtcggtccgatgatcacctacctgctgccgctgctgatcggttacaccggcggtaaattagtcggcggcgaacgtggcggcgtggtcggggcgatcaccaccatgggcgttatcgtcggcgcggatatgccgatgttcctcggctccatgattgccggcccgctgggcggctactgcatcaagaaattcgataactgggtagacggtaagatcaaatccggttttgaaatgctggtgaataacttctccgccggcatcatcgggatgatcctcgccattctggccttcctcggcatcggcccggcggtcgaagttctgtcgaaaattctggcggctggcgttaactttatggtggcgcacgacatgctgccgctggcgtctatcttcgtcgaaccggcaaaaatcctgttccttaacaacgccatcaaccacggtatcttctcgccgctgggtattcagcagtcccacgagctgggtaaatccatcttcttcctgattgaagctaacccgggtccagggatgggcgttctgctggcgtacatgttctttggccgcggcagcgcaaaacagtctgcaggcggggcggctatcatccacttcctgggtggtatccatgaaatctacttcccgtacgtgctgatgaacccgcgcctgatcctggccgttatcctcggcgggatgaccggtgtcttcaccctgactatcctcaatggcggtctggtttccccggcttccccgggttccattctggcggtactggcgatgacgccgaaaggcgcctacttcgctaacatcgccgcgattatcgcagcgatggcggtctccttcgtggtctctgcggttctgctcaagaccagcaaagtcaaagaagaagacgatatcgaagccgcaacgcgtcgtatgcatgacatgaaagcggaatccaaaggcgccagcccgctggcggccggtaatgtcaccaacgacctgagccatgtgcgtaaaatcatcgtcgcctgcgacgccgggatgggttccagcgctatgggcgccggggtactgcgcaagaaagtgcaggatgccgggttgagcaacatctcggtcaccaacagcgcaatcaataacctgccgccggatgttgacctggtcatcacccaccgcgaccttaccgagcgcgccatgcgccaggtaccgcaggcgcagcatatttcgctgaccaacttcctcgacagcggtctgtacaccagcctgaccgagcgcctggtcgcggcccagcgccacatcgacaacgaagtcaaagtcaccgatagcctgaaagacagctttgacgatactaacaacaacctgttccagctgggcgcggataacatcttcctcggtcgcaaagcagccaccaaagaagaagccattcgcttcgccggtgagcagctggtgaaaggcggctacgtcgagccggaatatgtgcaggcgatgctggatcgcgaaaaactgacctcgacctatctcggcgagtccattgcggtaccgcacggcaccatcgaagcgaaggaccgcgtgctgaaaaccggcgtcgtcttctgccagtacccggaaggcgtgcgcttcggtgaagaagaagatgaagtcgcgcgtctggtcatcggcatcgccgctcgtaataacgagcacattcaggttatcaccagtctgactaacgcgctggatgacgaaaccgtgattgagcgcctggcgaaaaccaccagcgtcgacgaagttctggcactgttaaataaataa

SEQ ID NO: 241247 - DNA, 930 bp, Klebsiella pneumoniae
atgaatctgaacctcctgcccgacctcgctcttttcgttcagatagtcgaccagggcagcttctccgccgtcgcccgccagaacggcattaccccttcagccgttagccgcagcgtgtcacggctggagcgagagatgggctgcaaactgctgcagcgtaccacccgcaagctgcgtcttagcgatgccggggaaacgatatatcagcatgcccagcagatgctggaagcggcgcgacaggcaatggattccgcaggcagtcgccaaacggtcgcccagggaaagctgacgctaagcgtcccgaaagccgtcggccgctttgtgatccacccgctgatgatggcgtttttccaccgctacccgcaggtggacgtctgcctgcggctggaagatcgccctctcgattttatcgatgacggtattgatctggcgctacgcatcaccgataccccctcccccggcctgcatggcaaaccgctgatgccaatcaggcacgttatctgcgccactgaggcctatttacagcagcacggtacgccgtacacgccgcaggatctgcgcgcgcatagctgcattagccttggcgaaacgcccgccgatgcgcgctggaagttccgtcgggaaggcaaaacagaaacggtgcaaacctacgggcggtacgccgccaaccataccgccgtacgcctcgacgcggtcagacagcatttagggatcggcagcctgccgctgttcaccgcccgtgaggcgctggcgaacggcgacatcgtgcaggtgttgcccgagtgggaatttatcagcagctactcaggcgacctgtggctactgtgggcgggagataagcatatgcccgccaggatgcgggcgatgatcgattatctcagcgagacggtgccggcgctgaacgcaggcagcacagagccagcgaaataa

SEQ ID NO: 241248 - DNA, 366 bp, Klebsiella pneumoniae
atgacctatggacaggcgtatttgagcggctggaaagagacctttaactttagcggacgcgccagccggcagcagttttggacgttttttcttatcaatgtgctgatcgccgccgcgccagtggccgcctggagtctggccacccttgttgaccctcactacgggctcctcagttttgttgtcatatcctttgcagcgctgtggctgctgttgatggcgctccccttgctggctgttggctgccggcgaatgcatgatatcggccgctccgggatctggtttgtgttgggagttatcattccgtggtttgcaattatttcgctggctctgtgctgcctgcgttcagcgccggcaccgtctcgctga

SEQ ID NO: 241249 - DNA, 915 bp, Klebsiella pneumoniae
atgcgcttaccaatcattcttgataccgatccgggcatcgacgatgccgccgccattgccgcggcgctgttcgcgcctgagctggatctgcagttgatgaccaccgtagcgggcaatgtctcggtggagaagacgacccgtaacgcgctgcaattgctgcatttctggaatgccgatgtaccgctggcgcagggcgcgtcgatgccgctggtgcgtccgttgcgcgacgccgcctcggtgcatggcgaatccggcatggaggggtatgactttgttgagcatcaacgtcaaccgctggcgaagccggccttccaggcgatccgtgatgcgcttatgcatgctgccgagccgatcaccctggtggcgattggtccgctgaccaatatagcgctgctgctgacccagtacccggaatgcgtgtttaatattcgccggctggtgatcatgggcggctcggcgggccgcggcaacttcacgccgaatgcggaattcaatatcgctatcgacccggaagccgccgcgaaagtgttccatagcgggctggagattgtgatgtgcgggctggacgtcaccaaccgggcgctgctggcggcggattatctggcaacgctgccgacgctgaaccagaccggtaaaatgctccatgcgctgtttagccactatcgcagcggcagcatgagcagcggtctgcgcatgcacgacttgtgcgctattgcgtggctggcccgcccggaactgttcactctccagccgtgctttgtggcggtggagacgcaggggacctggaccgccggcaccacggtggtggatatcgaaggacgactgggccagccggcgaacgcccaggtggcgctggacatcgacgtcgaagggtttcagcgctgggcggcggaggtgattgccctggcgccgtga

SEQ ID NO: 241250 - DNA, 951 bp, Klebsiella pneumoniae
atgcagatcctgttggctaacccgcgcggtttttgcgctggcgttgaccgcgctatcagcattgtagaaaacgcgctgacgctgtatggcgcaccgatctatgttcgtcatgaagtggtgcacaaccgctatgtggtggatagcctgcgcaagcgtggcgccatttttatcgaacagatcagcgaagtgccggacggcgcgatcctgattttctccgcccacggcgtgtcgcaggcggtacgcaacgaagcgaagagccgcgacctgacggtattcgatgccacctgtccgctggtgaccaaagtccatatggaagtcgcccgcgccagccgccgcggcgaagagtcgattctgattggccatgccggccacccggaagtcgaaggcaccatgggacagtacaacaacccgcaaggggggatgtacctggtcgagtcgccggaagacgtgctgaagctggaagtgaaaaatgacgcccggctgtcgtttatgacccagaccacgctctccgtcgacgatacctcggatgtgattgacgccctgcgcgcgcgttttccgaaaatcgtcggcccgcgcaaagacgacatttgctatgccaccactaaccgtcaggaagccgtgcgcgcgctggcggagcaggctgacgtggtgctggtggtcgggtcgaaaaactcctccaactctaaccgcctcgccgagctggcgcagcggatgggtaaggcggcttacctgattgacgacgcctccgatatccaggaagcgtgggtcaaggatgcggcctgcgtcggcgtgacggcgggcgcgtcggcgccggatattctggtgcagaacgtcattacccgcctgcaggagctgggcggcggcgaagccgtgccgctggaaggccgggaagagaatatcgtctttgaagtgccgaaagagctgcgtgtggatgtccgtgaagtagagtaa

SEQ ID NO: 241251 - DNA, 450 bp, Klebsiella pneumoniae; identical to SEQ ID NO: 210166

SEQ ID NO: 241252 - DNA, 501 bp, Klebsiella pneumoniae
atgagtaaatcgatctgttcaacggggctacgctggctgtgggtggtcgtagccgtgctgattatcgatctgggcagcaaattcctgatcctccagaacttcgctctgggggagacggttccgctgttcccgtcgcttaatctgcattatgcccgcaactatggcgcggcctttagctttctcgccgacagcggcggctggcagcgctggttcttttccgggatcgcgatcggtatttgcgtagtgctgacggtgctgatgtaccgttcgaaggcgacgcaaaagctgaacaatattgcctacgcgctgattatcggcggcgcgctgggcaacttgttcgatcgcctgtggcatggctttgtggtcgatatgatcgacttctacgtcggcgactggcattttgccaccttcaacctcgccgatagcgcgatctgcatcggcgcagcgctgattgtgctggaaggcttcctgccgaaaccgactgtgaaagagcaggcgtaa

SEQ ID NO: 241253 - DNA, 2853 bp, Klebsiella pneumoniae
gtgtttatcaaaccgaaatacggaaccgagaatctgatgagtgactataaatcgaccctgaatttgccggaaacagggttccctatgcgtggcgacctcgccaaacgcgaaccgggaatgctggcgcgttggaccgatgatgacctgtacggcatcattcgtgcagccaaaaaaggcaaaaaaaccttcattctgcatgatggccctccttatgcgaatggcagcattcatattggtcactcggtaaacaagattctgaaagacattatcgttaagtccaaaggactgacgggctatgactcgccttacgttccgggctgggactgccacggtctgccgatcgagctgaaagtggagcaggaatacggcaagccgggtgagaaatttaccgctgccgaattccgcgctaagtgccgcgaatatgccgccgagcagatcgatggccagcgtaaagactttatccgtctcggcgtgctgggcgactggtcgcatccgtacctgaccatggacttcaaaaccgaagccaacatcatccgcgcgctgggcaaaatcatcggtaatggccacctgcataaaggcgccaaaccggtgcactggtgcgtagactgccgttccgcgctggcggaagcggaagtggagtattacgacaaaacctctccgtctatcgatgtcgcgttccacgcagtagacaaagccacggtactggcgaaattcggcgtagccgacgtcaacggtccggtgtcgctggttatctggaccaccacgccgtggaccctgccggccaaccgcgctatctctctgtctcctgagttcgactatgcgctggtgcaggttgacggccaggcgctgatcctggcgaaagacctggttgagagcgtaatgaagcgcgttggcgcgacggactacactattctggcggcggtacaaggttctgagcttgagctgatgcgctttaagcatccgttcctcgatttcgacgtgccggcgatccttggcgaccacgtgacgctggatgccggtaccggtgcggtgcataccgctggcggccacggtccggacgactacaccatcagccagaaatacggtctggaaatcgccaacccggttggcccggacggcgcttacctgcctggcacctggccgtctctggacggcattaatgttttcaaagccaatgacatcatcgttgagatgctgcgtgagcgtggcgcgctgttacacgttgagaaactgcagcacagctatccatgctgctggcgccataagtcgccgatcatcttccgcgccactccgcagtggttcgtgagcatggatcagaaaggcctgcgcgcgcagtcgctgaaagagatcaaaggcgtgcagtggatcccggactggggccaggcgcgtatcgaatcgatggtcgctaaccgccctgactggtgtatctcccgtcagcgcacctggggcgtgccgatgtcgctgttcgtgcataaagaaacccacgaactgcacccgcgtacccttgaactgatggaagaagtggcaaaacgcgttgaagttgacggcatccaggcgtggtgggatctcgattcccgcgacattcttggcgatgacgccgacagctacgagaaagtgccggataccctcgacgtctggtttgactccgggtcgacccactcttccgtggttgacgtgcgtccggaattcgccggtcatgccgccgatatgtatctggaaggttctgaccagcatcgcggctggttcatgtcctcgctgatgatttccacggcgatgaaaggcaaagcgccatatcgtcaggtactgactcacggcttcaccgtcgacggtcagggccgcaaaatgtccaagtctatcggcaacaccgttagcccgcaggacgtgatgaacaagctcggcgccgatatcctgcgcctgtgggtggcttccaccgactacaccggcgaaatggcggtctctgacgagatcctcaaacgcgctgcggacagctatcgtcgtatccgtaataccgcgcgcttcctgctggcgaaccttaacggtttcgatccggcgaaagacatggttaaaccggaagagatggtggtgctggaccgctgggcggtcggctgcgcgcaggcggcacaggaagatatcctgaaagcctacgaatcctacgacttccatgaagtggtgcagcgcctgatgcgcttctgctccatcgagatgggctcgttctacctcgacatcatcaaagaccgccagtacaccgccaaggcggacagcgtggcgcgtcgcagctgtcagaccgcgctgttccatatcgtggaagcgctggtgcgctggatggcgccgatcatgtccttcaccgcagatgaaatctggggctatctgccgggcgagcgtgagaaatatgtcttcaccggcgagtggtatgaaggtctgttcggcctggccgacgacgaagcgatgaacgacgatttctgggatgagctgctgaaggtgcgtggcgaagtcaacaaggtgatcgagcaggcgcgtgcggataagaaagtcggcggctcgctggaagcggcagtcacgctgtatgctgatgccgatctggcggctaagctcaatgcgctgggcgatgaattgcgatttgtcctgttgacctccggggcgaacgtcgcagactatgcgagcgcgtccgctgatgcgcagcaaagcgaactgctcaaagggttgaaagtcgcattgagtaaagctgaaggtgagaaatgcccgcgctgctggcattacaccaccgatatcggcaaggtggcggaacacgcggaaatctgcggacgctgtgtgagcaacgtcgccggtgacggcgagcaacgtaaattcgcctga

SEQ ID NO: 241254 - DNA, 939 bp, Klebsiella pneumoniae
atgaagctgatacgcggcatacataatctcagtcaggccccgcacgggtgcgtgctgaccattggcaattttgacggcgtgcatcgtgggcatcaggcgctgctgcagcggttgcgcgaagagggccgccagcgcggtttaccggtcgtggtgatgatttttgaaccccagccgctggagctctttgccgctgataaagccccggcgcgattgacccgcctgcgtgaaaagctgggctatctggctgaaagcggggttgactatgtattgtgcgttcgctttgaccgccggttcgccgcgctaaccgcgcaggattttatcagtgaactgctggtgcgtcgcctgggcgtgcagttcctcgccgttggtgacgatttccgctttggcgctggtcgccagggggatttcttgttattacaaaaggcgggggcggaatatggcttcgacgtcaccagtacccaaaccttctgcgaaggcggggtgcgaatcagcagcacggcggtacgccaggcgctggccgatgacgatctcctgctggcggagacgctgctcggccatccgtttagcatctccggacgcgtcgtgcatggtgatgaactaggccgaaccataggttttccgacggcgaacttaccgctgcgtcgtcaggtttccccggttaaaggggtctatgcggtagaagtgacagggctgggcgacaaaccgatagcgggcgtcgccaatattggcacccgtccaacggttgcgggcgtgcgtcagcagctcgaagtacatctgttggacgttgtaatggacctctacggtcgccatatcaatgtaatactgcgtaaaaagatacgtaacgagcagcggtttgcgtcgctggacgagctgaaggcgcaaatcgcacgtgatgagttaacggcccgcgaattatttgggctgaccagccaggcctga

SEQ ID NO: 241255 - DNA, 972 bp, Klebsiella pneumoniae
atgaataaagtagccaatgaacattatgaatggattgatgctacaaaaggacttggaatcttattggtaattgcaggtcatactttttcagggtatttatacaatgtaatctatttattccatatgccgatgttttttcttatttccggttatcttcataaaatagaaaacatcccaatcttttttaaaagaaagatcagtcgactcattaagccatatgtgttttatttgtctgtatttacgcttcttatatttctcaaagagtatttgaatggcacgcttacattaaataatagtgtccatctaatagccaaggctttattcggtggcgtgacccttaccgggtgggaaggggttttttggtttgttactgtatttatgattagccaacaattattaaatataatgttgagtctattctctctaaaatcttgtttcttcattaatctagcttttttgattctcgcatatattgattcattctatttgacattaaagacccctttaggagtgtccttagctttgtttacaacccctataatgtttattggatacgtttttcgaaagggagaaataataattccattttgggttttattatcattgtctttattatctcttgtttcagcatttttctttccagataaaatggtgttggatattaagcataccaaatacggactctttattttagggttttgcgttgcgctagttttatcattatcaattattgatttgtgtaaaaatatattttctcgattcagatattttatatttcttggtaagtattctttatttatcatgtttattcatcaattccttaaggatgttatttgggagaggctttttagtaatgagttgtttgtatatgttggtacggttatgttatgttcatttctctcattttttgtacatttaattaagaacaaaaatgttgtgtcaaagggagtacttcagtgggtaattgggtga

SEQ ID NO: 241256 - DNA, 213 bp, Klebsiella pneumoniae
atgctgttgaacctccagcgcgtcgtgatagcgctggttaacaacatggcaatagctgagaatattgcatatcagaccatcaacccaggtgtcgccgcagggcacttcggccagcaacggctgaactatagccagactctccgggatgttttccgcaaaggcttcgcaaattgcccgcacaacgcgcaatttacaccaggtgctgcgggttaa

SEQ ID NO: 241257 - DNA, 795 bp, Klebsiella pneumoniae
gtggatgctgaaaagcagccgcgcggcgaaggcattgagctgagaaccgacagttggggcgctatccgggcacagaagggtatttttatcagcgcggacggacaggcgcaggcccgggggcaggtgctggcgatggagccggcggtcagtttgctgaaaggtgcgctgaatcagataaccgaatggggcaggattgcccagattcatcataatttttcaccagacgctgattcactgagagagtttgttaacggtgccagtaacctgaaagaagcggctttattgatggttgctcccaaaggggttgcttctgttacccctgatactgcgctaatgcacagtggtaaaggcctctacctgcaaagtctgggagaggttaatattgcaaccgcgcagcgccactcagtaaacgccagtaaagcgatttcgctactttcacaacaggaagggatccggctggtctcggcgaaaggaccactggaagtagaatcacacgcagacacactctctcttacgtcactgaaagacgtcacggttcagtcaacacaaggtcacctgcagctaacggcaaaaaacgggatcactattgcatgtggcggcgcttacatccagttgacacctgagggagaaattaaggttcatggccctggactgttaagcctaaaagggcagcacaacatggaaggacctgcgagccaggatttcccgttgcctgaactaccatcatcggtctgcaaagattgtctgaaacgggcacaggaaatcgctcagggctttgttccaagggaggtgtaa

SEQ ID NO: 241258 - DNA, 531 bp, Klebsiella pneumoniae
atgaaatctccctttctctttttagttgcagcggtattgctgttaacgggctgtaaccagcctgctgaaactgactcgatcagcggtgggggtggaaccatcgaagccatcaaccatacccactgggctatcaaccactttagtgtcaacgggcagtcgggcgtcgatattatcggcccgtggcaaggcggcggcggtgcgggttactttggtgtgcctccaaaatgggaaccgggaatgacggtaaaaatcgagtgggaaacaggtcttggtgatacagatggatttcctggctttggtgacgatgagagatacttggcgtggaggaaaaaaattaaatcgcaaaataaggaacacagtgcagtagtacctgttcctgattataacggccaaaaaacctgtggcatcaaaatacactttctcccgtgcgataaaataaaagtgacaaccagttgttacgattacggcaatccgaattacccaattaaagatccgatcaaaatggaggagcctgaagtatgtccagaataa

SEQ ID NO: 241259 - DNA, 531 bp, Klebsiella pneumoniae
atgaaatctccctttctctttttagttacagcggtattgctgttggcgggctgtaaccagcctgatgaagctgaatcagtcagcggcggtggcggaaccatcgaagctatcaaccatacccactgggccatcaaccattttagtgtcaacgggcagtcgggcgtcgatattatcggcccgtggcaaggcggcggtggcgcggggtattttggtgtgcctccaaaatgggaaccgggaatgacggtaaaaatcgagtgggaaacaggtgttggtgatacagatggatttcctggctttggtgacgatgagagatacttggcgtggaggaaaaaaattaaatcgcaaaataaggaacacagcgcaatagtacctgttcctgattataacggccaaaaaacctgtggcatcaaaatacacttccttccgtgcgataaggtaaaagtgacaaccagttgttacgattacggtaatccgaattacccgattaaggatccgattaagatggaggagcctgaagtatgtccaaaataa

SEQ ID NO: 241260 - DNA, 2400 bp, Klebsiella pneumoniae
atgtccaaaataaatccagacttaacatggtatccacctcactttccaaaacaagggcgtttaccaacagatacagcggcaacgaagcgaaactgtaaacagcaggatagccatgagctggcataccggaatgagctttgtcacgctgcgggtaaagccgtagagccgccttgctgtaaaactctgcatatcagtttattttttgacggcacaggaaataaccttaataacgatctgtatatttccagccctaaacatccaacaaatattgctcgtttgtttcgtgcaacgatcggtcagggttatgccggtggtgttcaggggcatactgaagagctggttgatttagcgggaacgtcaggcaacaaatattataaatattatatccctggggttggcacaccttttccagaagttaatgaccttgattacagtacgccaggtctggcttttgcgacctatggtgaagagcgcgtcaactgggggctgctacggattattgacgcactcagaagaacatcgggtttaaccgagatttctgatgccgagtgttatgccgccgtcaacaggatgacatcaaatctgggatcggacgggccagacaggcgttataccgtttttaatgaatttttaaaggccgcggatcttgcacctaaactgacacaggcagttacacaaccagaaccagggaaacctaagctattaggcattaagttatatgtctatggtttctcccgcggtgcagcaagtgcgcgagcatttgtgaactggctatctgagttgctgcccgggggcaggagaaagggaagtaaacctgagctttgtctgaagtcgggtgacgtaaaaatccgcttaattattgaatttcttggcctactcgacactgtggcatccgttggcattgcaaatattgcgccattcgcagaagggcatatgggctgggctgatgacaccatggaattaccggataatgggctgatcaaaaaatgcactcacctcgtttcatcccacgaacaaagactttgtttcccgctggattcaatttgccgcagcgacggaacttacccaagttatgctacggaagtggtttatcctggaatgcactccgatattggtgggggatatcccccgggagatcaaggaaaagcagtaggtcataatgatagtaatttactttcgcaaatagctttacatgatatgtatgcatcagcttttgaagctggtgcaccattaaaagtatcgccccaatcgttacctaaagagcttttatctcaattatggcgagcaatgccgccagagttgcaattagaatttactatttctgaatcgttagtggaaagattcaatgcctggcgtgagtttactcttaatttatcttcagatagtgctgaagcttctactgatgcattccaatataaccccattcgtgcaagttcaaatgtcattacagctctagaaaatcaactcggctggattacggcatggcgtatcgggcgatatgtaaacggcgcttataaatctcaaggattttacaaatcttcaggtgtcgcgtggcaaaataaagactcagacccggccactctggctgcatctaaggctgagcaagaacagaaacaaaaagatgtggatgatgagcgcctgaccgctattgtggataacaggtttaaaaagttcacgccattacctcctggcccaaaagattttgacccggctatcgctcaggttcagctaagacaggcggcagaagaattcaatgctgattacctgtctaagccacgccccgttacggggaactggaaatatacgatgtctcagcaattatctaatgtgatatactccttcagtgagaatgatttctctgttgagtatgaacgcatcaaaagttcaggtgacagtaaatttaacaaactgtttccgaagcaatctgctggagaaaccgctcaatcgccagacagtctggtcagatcattatttgacgatcaggttcatgactcacgcgcctggtttatgcacgcaacctttggtgacagagaaccctggggaagttacttcctttatcggatgattttctttggggagttgatgagtaaaaatgtttcattgatcgctaaatatggccggtttgttgaaggccaacttaaatcagcgataaaaggagccagtctcatttttgataacacgactatcaacagtaatatttcagatgaaatcacatctggtattaaacaagtgatctctatcatccctgcttcggcaagtgggcctgaagttattaatgcagaatctactattcaacctgcaatgacaaatggaattgcgccattgagtagccagacacgtaaaaccctggatgctgcgaaactggccgaaaccaaagctgatattcttaaaatatggtga

SEQ ID NO: 241261 - DNA, 1182 bp, Klebsiella pneumoniae
atgtggttgcacgctggtgagttccaaccccgattgcagggttgcgcagtgagagctattcctacatttcctcgctatcgtcttgcgaaaccgccagttgcaaagcgctggttaggaggaggtgccgctctggttttgctctctggtatcatcgcggcaatggcagggaaatccggtgccaataccagtatcattcttttctgcatggttggaatggtattacttggcggtgttgtctggtttgtacgcacaattttttttcgcctttcagttcatcattcacatacctgggagcgcgaagcagaaaatgagcgcaggcattggtgggaaatccatcggcgtcagtttgccctgaaagatattgtcctgattggcccggcaggcgctgaattttctgactggctgcgtgtgattaagcgagagcatcaggctccattagtcaggcaggaatccctggggaaatcgttgcgtattgccagaagtttctcttctgctcttattgaacgtgaaaaacaactggctcaaatgctggtattgcaatggaaaaggcagcgaggtaaggaattattcgtttctccggagaaatatttctggcaggggagtcctgaagcctggcaagcctttgtggcacagctcattgagagttttccgggaattacagctcctgaattacctgagatatggcaaggggagaaaacattatccttactggctaatgttcttgcggacaagaaacagctggttaattttttgattgccgggtgccagtctttatctcctgcttctgactctactcgtcctgctggtgaatgcgcagtactgtggctggctggaaaccagggggacgtcacattatcccgtggtgaattttttgagccttatgatagtgagtccctgcggcacgtcgccttgcgagccgaaaaacagagcgaacttaatgagtcgcccgaacggtgcattctcttctcacacccggagcaacctgaactcgccgattgtggctggaatgtgacccacaatatccaggatgactactggggcgatcctggaaagcttgatgcgctggttgtgatatcgctcgctgcaattaccgctaagactgaagcaaaaccctgcggctggatagcgtcagacccccttcatactttagctcttgggatcgtaaaaccacatggaaactga

SEQ ID NO: 241262 - DNA, 480 bp, Klebsiella pneumoniae; identical to SEQ ID NO: 211705

SEQ ID NO: 241263 - DNA, 1380 bp, Klebsiella pneumoniae
atgacaacgcagcaagagcatcagttaaaacgcgggttaaaaaaccgccacatccagttgatcgccctcgggggggcggtcggcaccggactgtttttaggtatcgcgcaaacgatccgtatggcaggcccgtcggtcctgctggggtacgccatcgccggggttatcgctttctttatcatgcgtcagcttggcgaaatggtggtagaggagccggtggcggggtcgttcagccatttcgccaaccgctactgggggcccttcgccgggtttatgtccggctggaattactgggtgttgtacgtgctggtaagcatggcggagctaacggcggtagggatctatattcagtactggtggccggaggtacccacctggctgtcggcggcgatcttcttcgtggcgatcaacgccatcaacctgacgcacgtcaaagtgtatggcgagctggagttctggttctcgattgtcaaagtggccgccatcatcagcatgatcgcctttggctgctatctgttatttagcggtcacggcggcccggcggcgacggtggccaacctgtggcaggacgggggatttttccctaacggcatcacgggcttggtgatggccatggcggtgatcatgttctccttcggcgggcttgagctggtggggatcaccgcggcggaagccgacgaaccgcataaaaccattcccaaagccaccaaccaggtgatctaccgtattctgctgttttacgtggggtcgctggcggtcctgctgtcactctacccgtggcggaacgtcgtggaaggggggagcccctttgtgctgatctttcacgccattaacagcaatattgtggccaacgccctcaatctggtggtactcaccgccgcgctgtcggtctacaacagctgcgtctactgcaacagccggatgctgttcggcctggctcagcagggcaacgccccgcgtgcgctgctgcgggtgaaccaccgcgggatcccattgaccgccctggcggtatccgccgtcgccacggcgctttgcgtggtgattaactatgtgatgcccgggaaagcctttgccctgctgatggccctggtggtggccgccctggtcatcaactgggcgatgatctgcatcactcatcttaagttccgccgcgccatgcagcgggcggggaaggtaacggctttccagagtttcgcctatcccctgacaaactggctgtgtctgctgtttctcgccgcgatcctcggggtgatgtatctgaccccggacatccgcatctccgtctgcctgatcccggtatggctgctgatccttgctgcaggctatctgctgcgcaggaaaagcgcgccggcgccggtggcggcgcttgaggagcgttaa

SEQ ID NO: 241264 - DNA, 195 bp, Klebsiella pneumoniae; identical to SEQ ID NO: 135956

SEQ ID NO: 241265 - DNA, 744 bp, Klebsiella pneumoniae
atgcataagctcgccaggcaaaaacatattctcgacaggcttagcgaaaccggtcagctgagcatcagcgaactggttgcagagctgcaggtgtcggccgataccattcgccgcgatctgagcgacctggaacaacagggcgtgctgcagaaaagccacggcggggccatcgcccttaacgtcccggccatgacgcgccagggcagaaacgctcttctcacccagaccaagcagcgcctggatcagcaggtggccgcgcgcattccctctggctcgacgctgtttctcgacgccggaagcacgctgttggcggtggcagcccagctgaaagggccgttgaccgtgatcacggcttctctggatatcgctcagctgttcagcgaccgtgccgatatccagctgatcctgcttggcggccagtgggatagtaaacaacggctgttcgccggcagcgccaccctgtcgctggtcacccgctaccgggccgatatcgccattctcggcacctgcgcgctccatgccgggctggggctgagcgccagccaggaagctgatgccgacgttaaacgcgccatgctggccgccagcgccgagcactggctggtggcggaccataccaaactcaaccgctgcgaaccgtggcgggtggccggactcagcgacattcaccatctttttcttgatcgtccctgggctgagctgggggatgaccccgccctctctgtacatattgctgacgcttaa

SEQ ID NO: 241266 - DNA, 624 bp, Klebsiella pneumoniae
atgctgcatgcagagcgactgacctgcatcgttgacgatcgaccgctgtttgcggcgctgacgctgtccctcgctgccggcgagctgctgcagatcgccggtgataacggcgcggggaaaacctcgctgctgcggatcctctgcggcctggcgcgcccggaaagcggggtggtgagctggcagggccagctgctggcgaaggtccgggagtcatttcaccgtcagctgctgtggctgggccataaacccggcgttaacgcggcgctgaccgccgatgaaaacctgcgtttcttctttccggccagccgccttcagcagcgggaaagcgccctcgccgccgtcggcctggtgggctatgaagacctccccttgagccagctctccgccgggcagcagcgtcgggtggcgctcacccgcctgtggttaaccgacgcgccgctgtggatcctcgatgagccgttcaccgccctcgacgccacggcgatggaaaccctgacccgtcgcctggagcagcacgcccggcaggggggatgcgccatcctcaccacccaccagccgctgcggccgctgggctgtccgttgcgcaccctgcgcctcggcggcgaggctggaggcgggcaatga

SEQ ID NO: 241267 - DNA, 660 bp, Klebsiella pneumoniae
atgatgcgtgcgctgttggcccgggaactgcgcctggcgtggcgcagcggggcggagatcctcaatccgctctggttctttctgatcgtcatcaccctgtttccgttcggcgtaggcgccgcgccgcagctgctggcgcagattgcgccgggcgtggtgtgggtcgccgcgctgctggcggcgctgctggtgatggatcggttgtttcgcgacgactggcaggacggttccctggagcaactgatgctcctgccgacgccgctggtggcggtggtgctggtgaaggtggttgcccactggatgatgagcggcctgccgctgctgatcgtctcgccgctggcggcgctgctgctggggatgagtctgcatgacgccggtgtgctggcgctgaccttgctgctcggcaccccgacgctcagttttctcggcgcggtgggggttggcctgacggtcggcctgaagcgcggcggcgtcctgctgagcctgctggtgctgccgctggcggtgccgctgctgattttcgccaccgcggcctgccaggcggcggccgccgggctcccggtcagcggctatctggcgatgctggcggcgttcttaaccgccagcgccaccctgtgtccgttcgccaccgccgctgcgctgcggctgaccgtgcgataa

SEQ ID NO: 241268 - DNA, 738 bp, Klebsiella pneumoniae
atgtggaaagcgttacatcaactggcgatccccgagcggctgtaccgcctgtgcggatgctggatcccctggctggcggcgttgagcgcgctgttgctggtcatcggcctggggtggggctttggcttcgcccccgcggactatcagcagggggaaagctaccggatcatgtaccttcacgtcccggcggcgatgtggtcgatggggctgtacctggcgatggccgtcgcggccttcgtcggggtggtctggcagatcaaaatggccgatctggcgatcgccgccctggcgccggtgggggcggtctgcaccctggtggcgctggtcagcggcgcggcatggggcaagccgatgtgggggacctggtggatctgggacgcccgtctgacctcggagctggtgctgctgtttctgtatgccggggtcatcgccctgtggcacgcctttgacgaccgccggctggccgggcgcgcggcggggatcctcgtgctggtcggggtggtcaatctgcccatcattcattactcggtctactggtggaacaccctgcaccagggctcgaccaacctgcagcaaaccatcgacccaagcatgcgtctgccgctgcggatctgcatctttgccttcctcacgctgtcggtcaccctgaccctgatgcgcctgcgtaacctgatcctgcaactggagcgccgtcgaccgtgggtggtggcgctggtgaataaaggagccgcccgatga

SEQ ID NO: 241269 - DNA, 231 bp, Klebsiella pneumoniae; identical to SEQ ID NO: 237094

SEQ ID NO: 241270 - DNA, 459 bp, Klebsiella pneumoniae
atgcaagcgcgtcgtaaaacccggctgtatatcgtgctggcggtgctcgccggacttgggctcaccgtcagcctgacgctgtacgccctgagcagcaatatcgatctgttctacaccccgggggaaattatctacggcaaaacggaaacccgggcgctaccccataccgggcagcgcctgcgggtggggggctacgttcagccgggctccctgcagcgcgacccgcaaactctcgacgtgcgctttaagctgtatgacgcccgcggggtggtggacgtcagctataagggcattttgccggacctgtttcgtgaagggcagggcgtggtggcccagggcgtgctggacggcgagcggcatattaccgcccagcaggtgctggccaaacatgatgaaaattacacgccgccggaggtgaaaaacgccatgacgccggagaaaacggggacgcagccatga

SEQ ID NO: 241271 - DNA, 1953 bp, Klebsiella pneumoniae
atgatgccggagctgggcaactttttattgtgtctggcggcggggctggcgctgctcctgagcgtctatcccctgtggggcgcggcgcggcaggatcggcggctgatggccctggcgcggccgctggcctgtgggctattcgcctgtatcggcggcgccttcctgctgctggtgcacgcctttgtggtcaatgactttaccgtccgctacgtggcggaaaactccaacagcgcgctgccggtgtggtatcgggtagcggcgacctggggggcgcacgagggctcgctgctgctgtgggttctgctgctcagcgtctggaccttcgccgtcgccatcttcagccgccggatgccgctcgacgccgtcgcccgggtgctggcggtgatggggatgatcgcctttgggttcctgctgtttatcctcttgacctccaacccgttcagccgcggcctgccgcagtaccccattgatggccgcgacctcaatccgctgctgcaggatatcggcatgattttccatccgccgatcctctatatgggttacgtcggcttctcggtggctttcgccttcgccatcgcctcgctgctggcgggccggctggatactgcctgggcgcgctggtcgcgtccctggacccaggcggcatggatgttcctcactctcggcatcgtgctgggctcggcgtgggcatactacgaactgggctggggcggctggtggttctgggacccggtggaaaacgcctcgtttatgccgtggctggtgggaaccgcgctgctgcactccctggcggtgaccgaaaagcggggcagcttccgcgcctggacggtgctgctggccatcgccgccttctccctgtgcctgctgggcaccttcctggtgcgctccggggtgctggtttcggtgcatgccttcgcctcggatccgtcgcgcgggctgaatattctggtactgctgattgtcgccatcggcggatcgctgctgctgtacgccctgaagggtggccgggtgcgggcgcgggtggaacatacgctgtggtcgcgcgagtcgttcctgcttggcaacaatatcttgctgatggccgcgatgctggtggtgctcctcgggacgctgctgccgctggtgcataaggagctgggcctcggcagcatctccatcggcgagccgttcttcaataccatgttcaccgccctgatggcgccgttttcgctgctgctggggctgggaccgctgatccgctggcggcgcgatgacgtcgccaggcagattaagcgcctgattatcgctctgctggtgacgttgtcactttctctggcgctgccgtggctgctgcaggaccgtatcaccgccatggcggtcataggcctgatgatggccctgtgggtgctgatcttcgccctgatggaggttcacgaacgggccacccatcgccacggcttctggcgcggcctgcgcactctgacccgcagccagtgggggatggtgctcggccacgttggcgtggcggtgaccgttatcggcatcaccttcagccagaactacagcgtggagcgcgatgtacggatgcgccccggcgacagcatcgatatccaccgctatcactttgtgtttaacggcgtgcgcaatatcgtcggccccaactggaccggcggcgaaggcattatcgccgtgacccgcaacggccgcccggaagcgacgctgtatgccgagaaacgcttttacaccgccagccggatgatgatgaccgaggcggcgatcagcggcgggctgacccgcgatctgtacgccgcgctaggggaagagctgagcgacggcagctgggcggtgcgtctgtactataaaccgttcgttcgctggatctggtacggcggggtgctgatggccctcggcggtctgtgctgcatgctcgacccgcgctaccggatgcgtaagaagctgcaggaggcctcatga

SEQ ID NO: 241272 - DNA, 555 bp, Klebsiella pneumoniae
atgaaccggaagctactgtttatcccgctggtgctgtttctggcgctggccgccgcgctgttctggcaactgatgcgcaacgccgatggcgatgacccgacgaccctcgagtcggcgctgattggcaaaccgctgccggaatttcgccttgaagcgctgaatacccccggtcagacgctggaccgacggacgctgattgacggcaagccgctgctgctcaatgtctgggccacctggtgtccaacctgtcgcgccgagcatcagtttctcaacggcctggcgcagcagggcgtgcgggtggtggggatgaactacaaagacgatcgccagaaggcgatgagctggctgcagcgcctgggtaatccctacaggctgagcctttacgacggcaacggcatgcttggcctggatctcggggtctatggcgcgccggagacgtttctcatcgacggtcagggcattatccgctggcggcacgccggcgacctgaacgaacgggtgtggcgcgaggagctccagccgctgtgggatcaatacaaccggagggcgggctga

SEQ ID NO: 241273 - DNA, 459 bp, Klebsiella pneumoniae
atgagaggggtaatggtcatcctgctggcgctgatgctgaccggccaggcgtgggccgccatcgatacctggcagtttaaggatgaggcccaggagcaggccttccgcgagatcacctcccaactgcgctgccctaaatgccagaacaacagcatcgccgactcaaacgcgatgattgccgctgatatgcggcagaaggtgtacgagctgatgcagcaggggaaaacgaaagggcagatcgttgactatatggtggcccgctacggtcattttgtcagctacgagccgccgctgaccgcgggcacggtgctgctgtggctggggccggggctgttcgtgctggcgggcgcgggggtgattatcgcccgcacgcgccgtcgcgacattcctgacgcggcgctcagcgtcgaagagcgccagcggctggcggcattattgcaagaaggaaaagaacgatga

SEQ ID NO: 241274 - DNA, 843 bp, Klebsiella pneumoniae
atgagcctgttggtagttatcgccgggctgttgctggctggcgcgctggggctgctgtacttcccgtggtcgggcaaaggggcggtagaccgcaatgccctcaaccgcgccctgtaccagtcgcgcctgcaggagctggcgcaggagcgcggcgaggacaacccggcgctggtcgtcgaactgcagcgcaccctgctgacggatattccgccccaggcacagtctggcgaacggccgctacgccgctgggcgctgcttccgggcgcgctgctgctggtggtcctgagtctgggcctgtatctgaaaaccagcgatattggtcaggtgctgctctggcagcaggctgaacgacattatcctgcactgttgcagcaggttaaggacccgacggcggcgccgctgcgaatggatgagctggcggagctgcggcttggcctgcgcagccacctgcaggataccccgaacgacctcgccggctggcagctgcttgggcggctgggcctgttgttaaacgatggcgagacggcgatcggcgcctttggccgggcgcatgctctggcggcggacgacccggcggcggctttcgattacgccagcgcgctggtgcgggcgggagatagcggtcaggttcggatgggcgagctgctgctgcgcgacctgcatcagcggcagccgaacagcctgccggtgctggagatgctggccctgagcgcggtgcgcaatgaagattaccccgaggccgtggcggccctgcaggcgttactggcccggctgccggaaggggatgcgcggcgcgcggcgattgtccgccagctggcgcaggcgcagcagcaggcgcaataa

SEQ ID NO: 241275 - DNA, 279 bp, Klebsiella pneumoniae
atgctgtcgcgcacttcgctgcgcaggcgggcgtcgaggttggagagcggctcgtccatcaggaacagccgcggattgcgcacgatcgcccgggccatcgccacccgctggcgctggccgccggagagcttcgccggtttgcggtcgagcagcgcctccagctgcagcatctgcgccactttatccacccgcggctgccagctgcttttctcttccttgcgcaccttcatgccgaaggtgatgttgtcgcgcaccgacagatgcggaaacagggcatag

SEQ ID NO: 241276 - DNA, 273 bp, Klebsiella pneumoniae
atgagttttcagaaagtaattacagttaagtcgatcaaaaattacgatgcactcggtgggatgaagatgcctggcgctgacgaggaaatgactgtgacattttctgctgaggcgctggttagtcttgtaggctcactctgcacagtgcgctacagcatgactacagagggggcactgtctcccggatacgctgagattgagtttcagtattcaggtacgggttcgccgctggaagaagcggaggcggtgctaagggttgcgttgattccgtga

SEQ ID NO: 241277 - DNA, 1251 bp, Klebsiella pneumoniae; identical to SEQ ID NO: 241133

SEQ ID NO: 241278 - DNA, 651 bp, Klebsiella pneumoniae
atgcggcaattgataaagcctgaaaataccatgcagaaaacttcatttagaaaacatcgcgttgagcgattcagcacacaacaagtcaccagacaacgtaaagaacgccagccaaaaactgtgatcttgttcaataaaccctatgatgtgttgccgcaatttaccgatgaagccgggcgcagcacgctgaaagattttattccggtggcgggcgtctacgccgcaggtcggctcgatcgcgacagcgaaggcctgctggtgctgaccaacgacggcgcgctgcaggcgaagctgacccagccgggtaagcgcaccggcaagatctactatgttcaggtggaaggcgaacccacgcccgaggcgctgaccgccttgcgcgacggcgtcacccttaacgacggccccaccctgcctgccggcgtagaacttgtcgaggaacccgtctggctgtggccgcgcaacccgccgattcgtgagcgcaaatcgattcccacccgctggttgaaaatcacgctctacgagggacgcaaccgccaggtgcgccggatgaccgcccacgtcggcttccccaccctgcggctgatccgctacgccatgggcggctataccctcgacggactggccaacggcgactggcgcaaagccgaataa

SEQ ID NO: 241279 - DNA, 459 bp, Klebsiella pneumoniae
atgtttaaacctcatgtcaccgttgcctgcgtggttcacgcccaggataaatttctcatcgtcgaagaaaccattaacggcaaagcgctgtggaaccagccggccggccatctcgaggccaatgaaacgctgctgcaggccgccgaacgtgaactgtgggaagagaccggcattcgcgccacgccgcagcacttcatccgcatgcatcagtggctggctcccgataacacgccgtttctgcgcttcttgttcgccatcgaacttagcgatctgtgcgccactgaaccacacgacagcgatatcgatcgctgcctgtggctcagtgctgaggaaattcttaacgcgccgaacctgcgctcgccgctggttgccgaaagcattcgctgctacctgcaggacccgcggcagccgctgtcgctgattggcgcatttaactggccgttcacagggggtgaatga

SEQ ID NO: 241280 - DNA, 1167 bp, Klebsiella pneumoniae
atgaacggtgagcgcgtgctagaatacgccgcctcgaagttcaatgtagcgagtatttccatgtcagaaagccagaaaaaagtgatcgtcggcatgtccggcggcgtcgactcctcggtctccgcgtacctgctgctgcagcaagggtataaggtggaaggcctgttcatgaagaactgggaggaagacgacggcgaggaatactgcaccgccgccgccgaccttgccgatgcgcaagcggtctgcgataagctgggcattgaactgcacaccgttaactttgccgccgaatattgggataacgtctttgagctcttcctggaagagtacaaagccggccgcacgccgaacccggatattctgtgcaataaagagatcaagtttaaagccttcctcgagtttgctgccgaagacctcggcgccgactacatcgccaccgggcactatgtgcgccgcgccgatgtcgacggtaaaagccagctgctgcgcggcctcgacggcaacaaagatcagagctacttcctctacacccttagccacgagcagattgcccagagcctgttcccggtgggtgagctggaaaaaccgcaggtgcgtaagatcgccgaagagctggatctgatcaccgcgaagaaaaaagattccaccggcatctgctttatcggcgagcgtaaattccgcgatttccttggccgctatctgccggcgcagccgggcaaaatcctcaccgtcgacggcgaggagatcggtactcatcaggggctgatgtaccacaccctgggccagcgtaaagggctgggtatcggcggcaccaaagagggtagcgaagatccatggtacgtggtcgataaagacgttgagaataatattcttatcgtcgcccagggccatgaccacccgcgcctgatgtccgtcggtctgattgcccaacagctgcactgggtaaaccgtgaaccgctgcagggcaccctgcgctgcacggtgaaaacccgctatcgccagaccgatatcccctgcaccgttaccgcgctggatgaagaccgtatcgaagtccgcttcgatgagccggtcgcggcggtgaccccgggccagtccgcagtgttctatttaggggaagtgtgcctcggcggcggaattattgaacaacgactgcctctgcagtcctga

SEQ ID NO: 241281 - DNA, 642 bp, Klebsiella pneumoniae; identical to SEQ ID NO: 241091

SEQ ID NO: 241282 - DNA, 1371 bp, Klebsiella pneumoniae; identical to SEQ ID NO: 241092

SEQ ID NO: 241283 - DNA, 363 bp, Klebsiella pneumoniae; identical to SEQ ID NO: 241093

SEQ ID NO: 241284 - DNA, 294 bp, Klebsiella pneumoniae
atggaactcatcattaacgccggtgagtcccgcagtctggcgatgcaggcgctgcaagccgccagaaaaggagtgtggcaggacgttgataggctgatgcaggacgccgcagatgccgcaaaacgcgcgcatgatgtacaaaccatgcttatcggtatggatgagggctgtggcaaagtaccggttaatcttattctggtacatgcccaggatcatataatgacctctatgcttgcgcgggagttgatcgcggagcttattgaggttcagcgccagctgcaacatcgcaactga

SEQ ID NO: 241285 - DNA, 1407 bp, Klebsiella pneumoniae
atgtctaccacccaggttctcggcgaaacgccctatgcttcgccaggacaaccgcacgccagcttaaccggacgcattgatgcgctgcccgcctcatttgggttatggtcgtttattaccctgctctcacttggcggcttctttgagctctacgatctcttccagaccgggtatatcagcgcgggcctgctggcggagggcattttccacaccggacaggcgggcatcttcggcatcgccgaccaggcggccttcgcctccgccacctttatggggctgtttatcggcgccagtctgctggcgccgctggcggacaaactgggccgccgcctgacctttatggtggcgctcgcctggtacggtcttttttcgctgctgatggcgacgcagagtagcgcggaaggggtgatcttcttccgctttctggtggggatcggcctcggcattgagctggtgaccattgatacctatctcagcgaatgggtgccaacccatctgcgcaataaagcctttgcctttgccttcttcatccagttcctctcggttccggcggtggcgctgatgtcctggatgctggtgccgaccaccctgttcggcctcagcggctggcgctgggtgatcatctttggcgcactgttctcgctggcgatctggtttatccgtaaaaagctaccggagtcagcccgctggctggaaagcaaagggcggcatgatgacgcgcatacggtgatgtgtgagatggaagcccgctgcggcctgacgccgtcgccgaagcatgcgcatgcggcacagagcgtcgtcaaacgcggcaccttccgcgaaatctgggcgccgcagtatcggcagcgcaccctgatgctaatggtgatgaacttcttccaggcgatcggtttcttcggctttggcaactggctgccggcgctgctctccggtcagggcgccagcatcacccatagcctgctgtacgccttctttatcaccctcgcctatccgctgggctgcctgttctgcacccgcttcgtgcatcgctttgaaaacaagtggcagattgtcctctccgcgctgatgaccgttatcttcggcaccctgttcgccctgcaaaacaacccgattctgctggtgatttgcgggtttatgatcacctggtccaacgcctggctgaccatcagctaccacgcctaccaggccgaggtctttccgacccatattcgcgcccgcgccgtcggcttctgctactcgttcagccggctctcgaccgcggtgaccagcattctgatcggcattattctgcaatacgccggcacgccgggagtaattagctttatcgtcgtcagtatgctgatggtgatgctgtcggtggggatcttcggcccgagaacgcggggcattcgtctggagaatatctga

SEQ ID NO: 241286 - DNA, 681 bp, Klebsiella pneumoniae
atggtatttccttatatgacacatttactcgcggcaatgttgttgggggcgctgatcggcgcggaaagacagtggcgacaacgtatggccggtttacgcaccaatgccctggtggccaccggcgcggcggtgtttattctcagcgcgatgtcggcctcgccggacagcccggggcgtattgcagcgcagatcgtctccggtatcggcttccttggggcaggggtgattatgcgtgatggcatgaacgtccgcggcctcaataccgccgccacgctgtggtgttcggccgggatcggcgtactctgcggcctgggacagttctggaacgcgacggcggctacgctgattattctgtgcgccaatatcctgctgcgcgaggcggcgcagcgcattcatgccttgccgggggccggtgacgaagagaaacgctatgtcttacgcgtcacctgtctgcgcgaacatgaaaatgccgtgcgtcagctgttgctgaatattgcgcagcagcagcggtttaccctgcagggattgcagtcggcggcggcggacaccggggaccatctggagatttgcgcgcagctgattagccataagcagcaccaaaaaacgctggcgcaaattatggcgcagatgggcgttcagcagaacgtcacatcggtgcactggcgtgtcggagaggcgtag

SEQ ID NO: 241287 - DNA, 1440 bp, Klebsiella pneumoniae
atgattaaaattacgctacctgacgggcattattatgacgagatgctgaccgcgcagggtgaacagcggccgcactataatgcctggtggcaatggtttcgcaacaccgatcaattctctatccggcagaaaaaagcgcaagcggaactgctttttcaccgtatcggcatcacctttaacgtttacggcgaggatgaggggaccgagcggctgatcccgtttgatagcgtgccgcggatcatacctgccggggagtggcagcgcattgaccgcggcatacgccagcgggtgaaagcgctgaacgccttcctctatgacatctatcatgagcagaatatcctgcgcgcggggctgatcccggccgagcaggtgctggccaacgagcagtatcagccgtgcatgcagggcatcaacctgccaaacaacacctatgcccatatcaccggcgtcgatatggtgcgcaataacgacggtcagtactacgtgctggaggataatctgcgcacgccgtccggcgtctcctacatgctcgaaaaccgtaagatgatgatgcgcctctatccggagatgttcgagcagcatcacattgcgcaggtggagcgctacccaagctacctcctgcagaccctgcgcgaaagctcgctggtggatgatccctgcgtcgtggtgatgaccccgggtcgcttcaacagcgcctacttcgagcacagcttcctagcgcagcagatgggggtcgagctggtggagagcgccgatctgtttattaaaaacggcgcggtgtatatgcgcaccaccgaggggccgcggcgggtggatgtgatttatcgccgcatcgacgacgcctggctcgacccgctggccttccgcgccgattcgatgctcggcgtcccggggctgctgtccgtctatcgcgccggcggcgtagtgctggccaacgccatcggcaccggggtggctgacgacaaatcaatctatccgtacgtcccggagatgatccgcttttacctcggcgaacagccgatcctcagcaatatccccacctggcagtgccggaaagcggaggacctgcgctacgtgctgagcaatctcgagctgatggtggtcaaggaggtccatggcgccgggggctacggcatgctggtcggcccgcgttcgactaaagaggagcgggaggccttccgccagcgcctgctggccaatccggccaactatatcgcccaggacacccttgcgctgtcgacctgccccaccttcgttgatgaagggctgtcgccgcggcatatcgatttacgcccctacgtgctgtccgggcaggagatgcggctggtgcccggcggcctgacccgcgtggccctcaccgaagggtcgctggtggtcaactcgtcgcagggcggcggaaccaaggatacctgggtgatggaggatgacgcatcatgctaa

SEQ ID NO: 241288 - DNA, 1746 bp, Klebsiella pneumoniae
atgacgagtactgatgcacgtcgtcccgctgctttgccctgttccctgcgcctggcgatcggcggcgctctgatcgccctgatgagcctgaacgctcaggcggaagacggcaaaaccgcgccgcccccctcgccggatattctgctgggcccgctgttcaatgatgtccagagcgcgaagctgtttgccgatcagaaaaccttcgccgacgctatccctaacagcgatccgctgatgatccttgccgattaccggatgcaaaaaaaccaggccagcttcgacctgcgccacttcgtcgaactgaacttcacgctgccgaaagagaacgacacctatgtgccgcccaaagggcaaactctgcgtcaacatatcgatggcctgtggccggtcctgacccgcagcaccgtcgaggtggaaaaatgggactcgctgctgccgctgcctaagccctacgtggtgcccggaggacgtttccgcgaagtctattactgggacagctatttcaccatgctgggtcttgccgaaagcggtcactgggataaagtcgaggatatggtcgccaacttcgccgcagaaattgacgcctggggccatatccccaacggcaaccgcacctattatctcagccgttcgcagccccccttcttctcctttatggtgagcctgctggcgacgcacgatggcgaccaggtgctgaaaacctaccagccgcagctggagaaagagtatcgctactggatggccggagcggacgcgctggctcccggcaacgccgacaaacgggcggtgcggatgccggacggcgcgctgctcaaccgctactgggacgataacgacaccccgcgtcccgagtcctggcttgacgacgtcaaaaccgccaaaagcaacccgaatcgtccggcaaccgagatctatcgcgacctgcgctccgccgccgcctccggctgggatttcagctcccgctggatggacaatccgcagcagctcgccaccattcgcaccacctcgattgtcccggtcgatctcaatgccctgatgttccatctggagaaaaccctcgcccgcgccagcaaggcatccggggacagcgctggcgctacgcagtacgatgcgctggctaacgcccgccagcaggccatcgagaaatacctgtggaatgataaagagggatggtacgccgactacgatctgaaaagccacaaggtgcgcaatcagttgaccgcggcggcgctgttcccgctgtacgtcaatgccgcgtcacgcgagcgggcgacgaaagtggccgccgccgccgagtcgcgcctgcttaaacccggcgggctgaccaccaccaccgtcaacagcggccagcagtgggacgctcccaacggctgggcgccgctgcagtgggtggcggtcgaggggctgcaaaactatggtcagcagaagatcgccatggaggtcacctggcgcttcctgaccaacgtgcagcatacctatgacagtaagcaaaagctggtggagaagtatgacgtgagctcgaccggcaccggcggcggcggcggggaatatccgctgcaggacggctttggctggaccaacggcgtcaccctgaagatgttggatctgatctgcccgcaggagaaaccctgcgatgcgctgcccgctacccgtccggcgacaaccccttcaccgcaggacaaacctgttgcggcgcccgcggctaacgaccccgcccctgcggaaccgcaaaagaccggctcctga

SEQ ID NO: 241289 - DNA, 2121 bp, Klebsiella pneumoniae
atgaacgtggctatttctcgaaaacgcccggggctgctgtatgcccttgcggtcgcactccccttcaccgcgcaagccgaagagacggtggtggtcattgccaccccgccggcgtccgccagcgcgccgacggagggctacagcgccagcacctcgctcggggcgacgaaaaccgaccagccgttaatcactaccgcccagtcggtgtcggtggtcacccgccagcagatggcggatcagggggcgaataccatcagccaggcgctggaatataccccgggggtctactccagcttcggcggcggcgccacccggttcgacgccatctccctgcgcggctaccacggcggcgacgtcgataacctgttcctcgacggcatgcgcctgatgagcgacggcggcagccataacgtattgcaaatcgacccgtggtttatcgaacgcgtggatgtgatccgcggcccctcctccgcgctctacgggcagagcgtgccgggcggcgtggtcaacctgacttccaaacgtccgcagttcagtcagcagggccacatccgcctgaccggcggcacgcaaaataccaaaggcgcggccttcgattacaccgacgccatcaatgaccagtgggcatggcggctgatcgggatgacccgcagcagcgacacgcagtatgaccatacccgcgaagagcgctacgcgatttcgccttccctgctgtggcagccggacagcgacacctcgctgctgttgcgcgcctatctgcaaaaagatccttccggcggctaccacggctctttgccgctggacggcacccgctacgcgcacaatggccgtaagctctcccccagcaccaacgaaggcgatccgggagatggctatcaacgccgccagcagatctacagctatgagtttgaccaccagttcaccgacgtctggtcggtctattccgccgggagctacacccataccaacgtctccctcgatcaggtctaccaggtcggctggatagatgacagcgacatgctggcccgcggctacagcggttcgcgcggttcgctggacggctggtcaaccgataaccgcctgcgcgccgatttcaatacaggcgacctggcacacaccctgatcctcggcgccgaatatcatcgcttccgtaacgacctgtggaccggcgccggcggcgcggcgccccttaacccgtttagcggctataccgcgcagaccggacataccgttacctacagcgacgacaataatcgccgctattaccagaccgggctgtatctgcaggatgagatggtctggaaccgctggcatgtggatgtttccgcccgctacgaccgcatcgtttcccagcaggtcagcgatacccaggggacctcaaaccgccgttcagacgaccatatcagcggccgcgcctcgctgttgtacgccctggacaacggtctgtcgccctacctgagctacagccaggcgatcactccggcgatgctgccgggcgcggacggcaaaccgttgaaaccgaccaccgccgaacaggttgaagccggcctgaagttccagccgccgggcagcagcgatctctatagcatcgcgatttacgacctgacgcaaaaggatgtcgccactcgcgacccgaacatcgccaccgccacctatattccggcgggtaaggtccattcccagggcgttgagctggaagcgcaccaccagatcaccccgcagctgagtactatcgcctcgtatacctggaatcgtctgcgtttccaggacaccaaagacgggaccgacaataacacgccgcagctgaccccggatcagatggcctccttctgggcgcgctatcagttcccggcggggatctccgttggcgccggcgtccgctacatcggtaaacagtgggcggatgatgccaacaccgcgcggctgccgtcggtcacgctgatggacgccatgatgcgggccgacctcggcgtctggtcgccaacgctgaaaggcgcttatgtgcaggttaacgccaacaatatcggcgaccgcgagtatatttccggctgctatggcaccggcaactgttactggggagcagagcgcagcgttatagccaccgtgggctacgatttctga

SEQ ID NO: 241290 - DNA, 1761 bp, Klebsiella pneumoniae
gtgcgggcgatagctgacggtaccgtcgtttcactccgcaaaagctcagacaagcgcgatctagcaccattcaacatcaacgccgataaacccaatacaaaggggagtaatgatggttatgtgctcataaagcatgaaaccgagatcggtagcggtgatgaaggaaaagtggctttctattccttatacatgcatctgaagtcgctggctgaaactgttaaagccggtgataaagtttaccgtaaggatcctataggccttccaggcatggttgatggagtgaatgctttccatttccagattttctgcgatgatgacaacatcagcaagctaacgggcaggaaaacaggagagctggatatttcgaagaatggccgcaccgatgcggtttatggtgatattcacttttatctgccaccgcagacaaagttttatgacaaggctccagcagataacagcatttctaccaccggactttctgaactatataccagcaatgtgcctctgtatgccagcatgactctggcccaaggcaagtgcacgatggttactcgtcagaaaaatacgcagactgacggaaaatatgatctgctgggtgaaccactggttaatgcagatggtgatgactacgaatacaatctctataaaaccgcgatgcggaattataaggagagcccaagtgccgggtttgaattacttcgctttgggcgagtgatcaacacggaccatgaaacactggtaccggcagacgcaccattatggatgacagtcaattacccgggtggtaaaggggtgatcaaccttgctgattccagtattaaaaagtttagtgacgctgatttccctcactggacgggctggcagatggtagatgacgatagtgatagcaacagccagtgtaattcagctattatcaagaaacttcacgaagttggtgacttcgataaccagtgcgggaagctaatctgtcatttcccatttgaatgggaaaaaagtacgatcgacatccgtttttcgtggctgaaaacgggaaatgaagagcatgaaccgatgacggaagccgattatgcaaagtttaaatcccatgcggaagcactatgctttgattctggagcgttgagttctgaccggttgtggcattttgagccaaaatcatttattcgacatttcaggaaatgtagttggctcgactctgaagtaattgaaaaagtaatgacggcgaatgctagtaaaaaaaataaaaatgcacttgaaggtattaaaaatattacattagagtactatgcggacataaatacaatcatgcgaaagtataacttttctgatgcaaatagaatttgtcattttttagggcagggtgcagttgaatcaggttatttattgtccatgcaagaaactagccagcaacaaattattgttgatggtgttcagcaaggtggtgtgattgttgaagcatcaacatttaatgaaactactaagctaggtcattggtacggagctcttaaagccgagaaggataactatttctccgggaaaaaatacaattcccgtggagggtatatcacaggatcctatagctggattaacggtaactgtggagatgtagatgcacaaaaattcagaggtagagggtttaaaatgctaactggacttaacacatattcaagctactgggtatatcgaggttggttgtcaaaaaatgactttgataaatattggtgggatgacccggagtacaagaaaaaaattcagccggtatga

SEQ ID NO: 241291 - DNA, 366 bp, Klebsiella pneumoniae; identical to SEQ ID NO: 210379

SEQ ID NO: 241292 - DNA, 972 bp, Klebsiella pneumoniae; identical to SEQ ID NO: 240952

SEQ ID NO: 241293 - DNA, 1815 bp, Klebsiella pneumoniae; identical to SEQ ID NO: 240951

SEQ ID NO: 241294 - DNA, 333 bp, Klebsiella pneumoniae; identical to SEQ ID NO: 134691

SEQ ID NO: 241295 - DNA, 1128 bp, Klebsiella pneumoniae; identical to SEQ ID NO: 240946

SEQ ID NO: 241296 - DNA, 681 bp, Klebsiella pneumoniae
gtggagtttaacgacgagcgcccggtgctggagatccttaacgggatcggccatatgccgctgccgccctatattgaccgcccggacgaagacgccgaccgcgagctctatcaaaccgtctatggcaccaggccgggcgcggtagccgccccgaccgccggtttgcatttcgacgaaccgctgctggataaactgcgcgccaaaggcgttgagatggcgtttgtcaccctgcatgtgggcgcgggcaccttccagccggtgcgcgtcgacagcattgaagagcacaccatgcactccgaatatgccgaagtgccgcaggaggtggtcgatgcggtgctggcggcgaaagcgcgcggcaaccgcgtgatcgcggtgggcactacctcggtacgttcgctggagagcgcggcgcaggcggcgaaagacgcgctgatcgcgccgttcttcgacgatacgcagattttcatctacccgggttatcagtaccaggtgatcgatgcgctggtgactaacttccatctccctgaatccacactgattatgctggtgtcggcgtttgcgggttatcagcacaccatgaacgcctataaggtggcggttgagcagaaatatcgcttttttagctacggggatgcgatgtttatcacgtacaatccgcaggctatttctgagcgtccctga

SEQ ID NO: 241297 - DNA, 399 bp, Klebsiella pneumoniae; identical to SEQ ID NO: 241095

SEQ ID NO: 241298 - DNA, 1197 bp, Klebsiella pneumoniae
atgatcaccactctccggcgctccaccatcgcgctgctggcatcgtcgttactgttgactatcggccgcggggccacactgccgtttatgaccatctatctcacccgacgctttcagctggaagtggatgtgattggctatgccctgtcgctggcgctggtggttggggtgttgttcagcatgggttttggcatcctcgctgacaggttcgataaaaagcgctatatggtgtggtcagtgctggtgtttattctcggcttcagcgcaataccgctggtcaataacgcccccctggtggtgatcttctttgcgctgatcaactgcgcctactcggtcttttccaccgtcctgaaagcctggttcgccgaccggctgacggcagagaaaaaagcgcgcatcttctcgctgaactacaccatcctcaacatcggctggaccgttgggccgcccatcggcaccctgctggtaatgcacagtatcaatttgccgttctggctggcggccgcctgcgccgcctttccgctggtgtttattcagctgtttcttcagcgggatggcgccgccgcggcccagccgggcgcagcgccctggtcgccttcggtgttgctgcgcgaccgggcgctgctgtggtttacctgctccgggctgctggcctccttcgtcggtggcgccttcgcctcctgtctctcgcagtatgtgctggtggtcgccagcagcgatttcgccgagaaagtggtggccgtggtgctgccggtcaacgccgcggtggtggttgctctgcagtacgcggttggccggcggctgagcgcgagaaatatccgcccgctaatgaccttcggcaccgtctgctttgtgatcggccttgtgggctttatgttctctggcgccagcctgtgggcgtgggggatctcggcggcgatcttcaccctcggggaagtgatttatgcccccggggagtatatgctgattgaccatattgccccgccggggatgaaggccagctacttctccgcccagtcgctggggtggctgggggcggcattcaacccgatgctgacgggattgatcctcacccatctgccgcactggtcgctttttgtcattcttatcgtggcgattgtcgccgcctggctgatgattttccgcgggatcaatgcccgcccctggcaaccggattctccgctggccaacgcctga

SEQ ID NO: 241299 - DNA, 483 bp, Klebsiella pneumoniae; identical to SEQ ID NO: 241094

SEQ ID NO: 241300 - DNA, 699 bp, Klebsiella pneumoniae
atgttacaggtgagtcagctacatcaatactacggcggcagccatattttacgcggggtggatttttccgcccgccagggcgaagtcacctgcctgctggggcgcaatggcgtcggtaagaccacactgctgaaatgcctgatggggctgatcccggcgcgcagcggtgaggtacgctggcaggatcagaacatcacccatcgcaaaccgcaccagcgggtgcaggccggggtcgcctacgtcccccaggggcgcgagatatttccgcgcctgacggtggaagaaaacctgctgatggggctgtcgcgctttcccgcccgcgaagcgcagcaggtgccggaggagatctaccagcttttcccggtgctcaggaccatgaagcagcggcgaggcggtgacttatccggcggccagcagcagcagctggcgattggccgcgcgctggccagccgcccacagctgctgatccttgatgaacccaccgaggggatccagccctcggtcatcaaagagattggcgaagtgatccgccagctggcgagccgcggagacatggcgatcctgctggtggagcagttctatgactttgccgccgggctggcggaccactacctggtgatgtcgcgcggcgccatcgtccagcaaggcaagggtggtgatatggagagcgacggcgtgcgcgccatggtgaccatctga

SEQ ID NO: 241301 - DNA, 798 bp, Klebsiella pneumoniae
atgcaaccggatgaaggactatttacccgccagctgcccggcgatcgctttcgcgaacaaaccgatccggtgctgcagctggagaacatcaacgtcagctttgacggtttccgggcgctgacggatctgtcgctggcgataggcgtcggcgaactgcgctgtgtgatcggccccaacggggcgggcaagaccaccctgatggacgtgatcaccggcaagacccggccgcaaagcggcaaagcgctctatgaccagtcggtggatctgaccactcttgacccggtggccatcgcccgccagggcatcgggcgcaagtttcagaagccgacggtcttcgaagcgctgacggtggcggaaaatctcgccctggcgatgaagggggataaatcggtgtgggccagcctgcgcgcccggatgagcagcgaacaggacgatcggctgaatgaggtgctgcgcttgctgcgtcttgacggcgagcgctaccgacaggccggtctgctgtcccatggtcagaaacagtttcttgagatcggcatgctgctggtgcaggagccgcatctgctgctgcttgatgagccggcggccggcatgaccgatgcggaaacggagtatacggcggagctgtttcgtaccctggctggacagcactccctgatggtggtggagcacgacatgggatttgtcgagaccatcgccgaccgggtgacggtcctgcatcagggccaggtgctggcggagggatcgctgcgggaggtgcaggccaatgagcaggtcattgaagtttatctgggacgttaa

SEQ ID NO: 241302 - DNA, 1074 bp, Klebsiella pneumoniae
atgagtcaaccaatcaccttaacgctggcgcagcgcgcgccgcggcctctgcgctggctggggatcctgctggtgctggggctgctgagtatgccattcctggcgctgctgccggcctcccatccgctggcggtgccgagctggctgctgacgctgagcggcaaaatcctctgctacgccattgtggcggtggcgctggatctggtctggggctacgcgggtatgctgtcgctggggcacgggattttctttgccctcggcgggtacgctatgggcatgtacctgatgcgccaggcggcgggcgacggtctgccggcgtttatgtcttttctctcctggagcgagctgccctggttctggtggggcacgcagcatttcgcctgggcgatggcgctggtggtgctggttcccggtctgctggccctggttttcggctggtttgcctttcgctcgaagatcaaaggggtctatttctcgatcatgacccaggccctgacctatgccggtatgctgctgttctttcgcaacgagaccggatttggcggcaacaacggcttcaccggttttaccacgctgctgggttttccggtcaccgccaccggcacccgcgccagcctgtttatggccacggttttgctgctgttgctgaccctgtggctgggcgcggcgctggcgcagagcaagtttggccggatcctcaccgcggtgcgtgacgccgaaaaccggctgatgttctgcgggtacgacccgcgcggcttcaagctgctggtgtggacgctgtcggcggtgctctgcggtctggcgggggcgttatatgtcccgcaggtggggatcatcaaccccagcgaaatgtcgccgaccaactccatcgaggccgccatctgggtagcgctcggcgggcgcggtaccctgattggcccggtgcttggcgccggattggtcaacggtgcgaaaagcattttcaccgtggcgatgccagagtactggcagctgtttctcggcctcatcttcatcattgtgaccctgtttttaccccgcggggtgatgggcctgctgcgtcgaggagaccgctaa

SEQ ID NO: 241303 - DNA, 876 bp, Klebsiella pneumoniae
atggggctgtcgctgggatcggtgctgttgctggccgcgctggggctggcgatcacctacggcctgctgggggtgattaacatggcccacggcgagatgttaatgatcggcgcctacagctgctggctggtacagcaggcgctggcgcagctcgcgccgcaatggctggccttttatccgctggtcgcgctgccggtggcgtttctggtgaccgccgggatcggcatggcgctggagcgcaccattattcgtcatctgtatggtcggccgctggaaacgctgctcgccacctgggggatcagcctgatgcttatccagctggtgaggatgctgtttggcgcgcagaacgtggaggtggcaaacccggcctggctctccggcggcgtgcaggtcctgccgaacctgatcctgccgtggaaccggctggcggtgctggcgttcgtcctgctggtgctgtgttttacctggctcatcctgaaccgtacccgtctgggtatgaacgtccgcgccgtgacgcagaaccgggcgatggccgcctgctgcggcgtgcctaccgggcgggtggatatgctggcctttggcctcggctccggtattgccgggctgggcggcgtggcgctgtcgcagcttggcaacgtcgggcctgaactaggtcagggatacatcatcgactcgtttctggtggtggtgctgggcggcgtcggccagctggccggcagcgtggcggcggcctttgggctgggcattttcaacaaaattctcgaaccgcaaatgggcgctgtgctgggcaaaatcctgatcctggtgatgattattctgtttattcagaaacgcccgcagggtctgttcgcgctgaaagggagggttatcgactaa

SEQ ID NO: 241304 - DNA, 393 bp, Klebsiella pneumoniae
atgacccttacagaaatcagaaacgctgtcatttcccgaatggcggcacagaccgctattgcctctgatgcggtggattatcccaatggcccggtatttgaccccagtaactgcgatatctgggcccgtctcaccaacattgcagggcaggctggcgcaacagagatcggggacgggccggtagtacacaggacgggcttactcatcattcagctgtttgttccggtcggttccgggacgttgcttatctcccgaacggccgaccagctaacggagctattcgagtttaaggacgacggaaagctgagttatttcgctgtttctgctgtgccggcgggtgagaccgatggctggttacagctcaatcttcaaattccttatcgcgctctgtag

SEQ ID NO: 241305 - DNA, 1173 bp, Klebsiella pneumoniae
gtgagctcaggtgcaaaagtagtagccgcgtttattcgcgagacaacaccaggaatcacgcctacagcaggggcgtggaacctgctgcgtcgttcttcatttggtctgaaaccaacgcagaacaccaacgacaatgacgaaatcgctggtgaccgcatggcgcagggtgtttcacgcggcacagtggatgtcggcggcgatgtcggcacgcggtttcgctggaaccagcatgatgattttcttgccagctgcttcggcgccgaatgggtaaataacgtgctgacgatgggtaatggtcgcattacgttctccgtggcgacttttgccagtgatgtggggatcgcccagattgcccgcggttgccaggttggcaccttccagatggaaatcccggccgatggtgatatcaccgcaaccgttacgtttgcagggctggactgggagacgaagggggacgataccagctatttcaccacgccggttgatttagcgggggccctgcgctactccttcaaggaggtcacgaacatccggctaaatggtgttgatggcgggacaggtttctgcgtcgacaccttcaacatccagttcaacaacaatatgcagactcagcgctgcatcggtaccggttcggcattcgccggcgcaaacattccgacaacctttaccccgtcaggtcaaatcacgctgtcatggtcaaaggctgcatgggaggtttacaaaaaaacgttcaccggcgaaacggtgccgtttagcttctccctggagaatgctgaaggctcctataccttcgatttcccggaagtgcagatctccggcgactggccggatgcggggagcactgacattgttcaggttcagctggatatcaccgcggccaatactccgccgacgattacgcgcgtgcctaaagtgccggcgacggcaatcagtgttgcgccagccacttcaactggggccgtgggttctactgtgacgttaaccgccacgcttacgccagctgattcaactgataccgtccagtggacgtcatcggatccgactatcgccagtgtggtttctacagggcagaaaacagcgaaggtcacgcgtaacgcagccggtactgcaatcatcactggtaaggctcgcacctttaccgcaacgtctgaaatcaccgttaccgcgccttaa

SEQ ID NO: 241306 - DNA, 483 bp, Klebsiella pneumoniae
atgctgattatttcttctcaaattgatttgaacggagaacgctggtttttcccttacaaaaagccagcaggaagtaaaaagaaattcacgccggaagacgaggcgctatttaaactccgtctgctggtggccagtagcgagaatccacaataccgctcacgcaatgcgctggtgcggcgccatatcgacaaaatggacgcgagctaccaggtcggtacgaatgctttcgatctcgccagtgtgggcgagattgactcggttgatgatcttctcatcgacaattgcgcgcgctttcttctgaaagactgggaaggcgtgggggagctggtggatggtgcggagacggcggtagcgtatacaccggagcgtggtgttgcgttactgaagcaaaacccctctctgtactggcttattctggctgaggcggcgaatattgctcagggtaaggagcagcagactcaggaaaccgtaaaaaagccatag

SEQ ID NO: 241307 - DNA, 357 bp, Klebsiella pneumoniae
atgaaaaaagtcatcgccttggcgcttggagcgctgttactttctggttgtacagtgcgtgttgcagatttgactgtggcgagcactaaaaattacaacctcaatgggggtaagttctataaagggaaacgtgtaacagcagaagatagctatccggttatcatcttccctcttggcatcccgaacgttaaaacagccgctgatcgagcgattgaaaaagatcgctgtgcagttggtctgtctgacgtagttgtcactcaacttaaccattccttcctgttcggtaagattggtctgcgtgttgaggggaatcttgtgattgaccgcagcctgccgggttgcgagaacgcaagctga

SEQ ID NO: 241308 - DNA, 285 bp, Klebsiella pneumoniae; identical to SEQ ID NO: 241230

SEQ ID NO: 241309 - DNA, 234 bp, Klebsiella pneumoniae
atgcggaacaatattctggtggcatccgcactggcagcgacggcaatcatgttcgtggccggctgctcatcgaatcagtcgatcaaaaccaccgacggcaagaccattgtcaccagcggtaaaccgcaggtggatgatgacaccggcctcgtctcatacaaaaatgccgaaaccggccgcgtggagcagattaaccgcgaccaggtgaagtccatggacgagctggataactaa

SEQ ID NO: 241310 - DNA, 3225 bp, Klebsiella pneumoniae
atgccaaaacgtacagacataaaaagtatcctgattctgggcgcgggcccgattgttatcggtcaggcgtgtgagtttgactactccggcgcccaggcctgtaaagcgctgcgcgaagagggctaccgcgttatcctggtgaactctaacccggcgaccatcatgaccgacccggaaatggccgatgccacctacatcgagccgattcactgggaagtggtgcgtaaaatcatcgaaaaagagcgcccggatgcggtgctgccgaccatgggcggccagacggcgctgaactgcgcgctcgagctggagcgtcagggggtcctggctgaattcggcgtgaccatgattggtgccaccgccgatgcgattgataaagccgaagaccgtcgccgtttcgatatcgcaatgaaaaaaatcggcctcgacaccgcgcgctctggtatcgcccacacgatggaagaggcgctggcggttgccgccgacgttggtttcccgtgcatcatccgtccgtccttcaccatgggcggcaccggcggcggtatcgcctataaccgcgaagagttcgaagaaatttgcgaacgcggcctggatctctctccgaccaacgaactgctgatcgatgaatcgctgatcggctggaaagagtacgagatggaagtggtgcgcgataagaacgataactgcatcatcgtctgctccatcgaaaacttcgacgccatggggatccacaccggtgactccatcaccgttgccccggcgcagaccctgaccgacaaagagtaccagatcatgcgtaacgcctcgatggcggtgctgcgtgaaatcggcgtcgaaaccggcggctctaacgtgcagttcgcggtcaacccgaaaaacggtcgcctgatcgttatcgaaatgaacccgcgcgtctcccgctcctcggcgctggcctctaaggccaccggcttcccgattgctaaagtggcagccaagctggcggtaggttatacccttgacgagctgatgaacgacatcaccggcggccgcaccccggcttcctttgaaccgtccatcgactacgtggtcactaaaatcccacgctttaacttcgaaaaattcgccggcgccaacgaccgtctgaccacccagatgaagtctgtcggcgaagtgatggcgattggtcgtacccagcaggaatccttgcagaaagcgctgcgcggtctggaagtgggcgctaccggctttgacccgaaagtgagcctcgacgacccggaagcgctgaccaaaatccgccgcgagctgaaagatgccggcgctgagcgtatctggtatatcgctgacgcgttccgcgcgggcctctcggttgacggcgtcttcaacctgaccaacatcgaccgctggttcctggtacagattgaagagctggtccgtctggaagagaaagtggcggaagtgggcatcaacggcctcgacgctgacttcctgcgcaccctgaagcgtaaaggctttgccgatgcgcgtctggcgaagctggcgggcgtgcgggaagcggaaatccgcaagctgcgcgaccagtatgacctgcacccggtctacaagcgcgtggacacctgcgctgcggaatttgctaccgataccgcctacatgtactccacttatgaagaagagtgtgagtccaacccgtccgttgaccgcgataaaatcatggtcctcggcggcggcccgaaccgtatcggtcagggtatcgaattcgactactgctgcgtacacgcctcgctggcgctgcgcgaggacggttacgagaccatcatggtcaactgtaacccggaaaccgtctctaccgactacgacacctccgaccgtctgtattttgagccggtgaccctggaagacgtgctggaaatcgtgcgcatcgagaagccaaaaggcgttatcgtccagtacggcggccagaccccgctgaagctggctcgtgccctggaagctgccggcgtgccggttatcggtaccagtccggacgctatcgaccgggcggaagaccgtgagcgcttccagcacgcggttgaccgtctgaagctgaagcagccggcgaacgccaccgtcaccgccattgagcaggcggtagagaaagcgaaagagattggctacccgctggtggtacgtccgtcttatgtgctcggcggccgggcgatggagatcgtctatgacgagcaggatctgcgccgctacttccagaccgcggtcagcgtctccaacgacgcgccggtgctgctggatcgcttcctcgacgatgcgattgaagtggatgtcgatgccatctgcgatggcgaaatggtgctgattggcggcatcatggagcatatcgagcaggcaggcgtccactccggcgactccgcctgttccctgccagcctacaccctgagcaaagagattcaggatgtgatgcgcgagcaggtgcagaagctggccttcgagctgcaggttcgcggcctgatgaacgtccagttcgcggtgaaagataacgaagtttatctgattgaggtcaacccgcgtgcggcgcgtaccgtaccgttcgtctccaaagccaccggcgtcccgctggcgaaagtggcggcgcgcgtgatggccggtaagacgctggcgcagcagggcgtgaccaaagagatcatcccgccgtactactcggtgaaagaggtggtcctgccgttcaataaattcccgggcgttgacccgctgttagggccagaaatgcgctccaccggggaagtgatgggcgtcggccgcacctttgccgaagcgttcgccaaagcgcagctgggcagcaactcgaccatgaagaaacagggtcgcgcgctgctctccgtccgcgaaggcgataaagagcgcgtggttgacctggcggcgaagctgctgaagtttggcttcgagctggatgcgactcacggtacggcgattgtgctgggtgaagcgggcattaacccgcgtctggtgaacaaggtgcatgaaggtcgtccgcacattcaggaccgcatcaagaatggcgaatatacctacatcatcaacaccaccgcaggtcgccaggcgattgaagactccaagctgattcgccgcagcgcgctgcagtacaaagtgcattacgacaccaccctgaacggcggctttgccaccgcgatggcgctgaacgctgacgccaccgagaaggtgatttcggttcaggaaatgcacgcgcaaatcactaaataa

SEQ ID NO: 241311 - DNA, 1149 bp, Klebsiella pneumoniae
ttgattaagtcagcgctattggttctggaagacggaacccagtttcacggtcgggccatcggggcaaccggcacggcggttggggaagtcgttttcaatacttcaatgaccggttatcaagaaatcctcactgatccttcctattcccgccaaatcgtcactcttacttatcctcatattggtaatgtcggcaccaacgccgccgatgaagaatcttctcaggtacatgcgcagggtctggttattcgcgacctgccgctgattgccagcaacttccgcagtactgaagacctctcttcttatctgaagcgccataacatcgtggcgattgccgatatcgatacccgcaagctgacgcgtctgctgcgtgagaaaggggcgcaaaacggctgcatcatcgcgggcgacagcccggatgcccagctggcgctggaaaaagcgaaagcgttcccgggcctgaacggcatggacttggcgaaggaagtgaccaccgcagaaacctatagctggacgcaaggcagctggaccctggcgggcgacctgccggaagcgaaagcggaaagcgagctgccgttccacgttgtggcatatgacttcggcgcgaaacgcaacatcctgcgcatgctggttgaccgcggctgccgcctgacggtggtgccggcgaagacctccgccgcggacgtgctggcgctcaatccggacggtatcttcctctccaacggccctggcgacccggcgccgtgcgattacgctatcgaggcgattgaaaaattccttgagaccgatattccggtattcggcatctgccttggccatcagctactggcgctggcgagcggtgccaagaccattaagatgaagttcggccaccacggcggcaaccacccggtgaaagatattgataacaacgtggtgatgatcactgcccagaaccatggtttcgccgtagatgaggcgacgctgccggccaacctgcgcgtgacccataagtcgctgttcgacggcaccctgcaggggatccatcgtaccgacaaaccggcgttcagcttccaggggcaccctgaagcgagcccggggccgcacgatgccgcgccgctgttcgaccactttatcgagttaattgagcaataccgtcagtccgcgaaataa

SEQ ID NO: 241312 - DNA, 1269 bp, Klebsiella pneumoniae
atgatgcctgcaagacatcaggggctgttacgcctgtttatcgcctgcgcgctgccgctgctggcgctgcaatctgccgccgccgcggactggcagctggagaaagtggtcgagctcagccgccacggtattcgtccgccgacggccggcaaccgggaagccatcgaggccgccaccggccgaccgtggaccgagtggaccacccatgacggggagctcaccggccatggctatgccgccgtggtcaacaaagggcgtgcggaaggccagcattaccgccagctcggcctgctgcaggccggatgcccgacggcggagtcgatatacgtgcgcgccagcccgctgcagcggacgcgagcgaccgcccaggcgctggtggatggcgccttccccggctgcggcgtcgctatccattatgtcagcggggatgccgatcccctgtttcagaccgacaagttcgccgccacgcaaaccgaccccgcccgccagctggcggcggtgaaagagaaggccggggatctggcgcagcgtcggcaggcgctggcgccgaccatccagctattgaaacaggcggtttgtcaggccgataagccctgcccgatcttcgataccccgtggcaggtcgagcagagcaaaagtgggaagaccaccattagcggactgagcgtgatggccaatatggtggagacgctgcgtctcggctggagtgaaaacctgcctctcagccagctggcgtggggcaagatcacccaggccaggcagatcaccgccctgctgccgctgttaacggaaaactacgatctgagtaacgatgtgttgtataccgcgcaaaaacgcgggtcggtgctgctcaacgctatgctcgatggcgtcaaaccggaggcgaatccgaacgtacgctggctgctgctggtggcccatgacaccaatatcgccatggtgcgcacgctgatgaactttagctggcagctgccgggctacagccggggaaatatcccgccgggcagcagcctggtgctggagcgctggcgcaacgcgaagagcggagaacgctatctgcgggtctatttccaggcccagggcctcgacgacctgcgtcgtctgcagacgccggacgcgcagcacccgatgctgcgtcaggagtggcatcagccgggctgccgtcagaccgacgtcggtacgctgtgtcccttccaggcggctattaccgccctcggtcagcgtatcgaccgatcatccgccccggcggtagccatggtcctgccgtag

SEQ ID NO: 241313 - DNA, 1029 bp, Klebsiella pneumoniae
atgcagacattacagaccaccagcctgcgggtgagtgaaaatcagctttttattctcgaccagcaggccttgccgcaggaaacacgctggctggcggcggataacgttgcgctgctggtggaccatattcataccctgcgggtgcgcggcgcgccgctgattggcctgtccgccagcctgctgctggccctgctggcccagcgcggcctgaaccgggatgcactccagcaggcgctggagacgctgcgcgcggcgcggccgacggcggtcaacctgatgaataatctggatcgcatgaagcaggcgctggcccgggaggattacccgcaggcgctggaagcggaagccttgcgtctggtcgaagaagataaacagctgtgcgaccgcatcgctgaggcgggcagtgcgctggtgaagcccggcagtcgactgctgacccactgcaacaccggtggcctggcgaccgccggggtagggaccgccctcggcgttatcgcgctggcgcaccggcagggaaaagtgaccaacgtatgggttgatgaaacccggccgctgctgcagggcggtcgtttaaccgcctgggagctgggcgagctgggcgtgccctatcagctgatcgccgattcaatggccgccagcctgatggcgcaggggcaggtggatgcggtgtgggtcggcgccgaccgtatcgccgccaacggcgacgtggcgaataaaatcggcacctattctctggcggttttggcccattatcaccagatcccgttttacgtcgctgccccgcagaccaccctcgaccgctattgcccgaacggggcggccattcccattgagcagcgcgcggcggcggaagtgaccggagtggcgggcagctttggcgcggtacagtgggcgccgacgggggctgccgtttacaatccggcgttcgacgtcacgcctgctgggctgataagcggctgggtgctggacagcggggtggtcaccccggcgcaggtcgccgccggggcgtttgcgccggacaacggataa

SEQ ID NO: 241314 - DNA, 1200 bp, Klebsiella pneumoniae
atgtcgcaataccataccttcaccgcccacgatgccgtggcttacgcgcagcagttcgccggcatcgacaacccatctgagctggtcagcgcgcaggaagtgggcgatggcaacctcaatctggtgtttaaagtgttcgatcgccagggcgtcagccgggcgatcgtcaaacaggctctgccctacgtgcgctgcgtcggcgaatcctggccgctgaccctcgaccgcgcccgtctggaggcgcaaactcttatcgcccactatcagcacagcccgcagcacacggtaaaaatccatcactttgatcccgagctggcggtgatggtgatggaagatctttccgaccaccgcatctggcgcggagagcttatcgctaacgtctactatccccaggcggcccgccagcttggcgactatctggcgcaggtgctgtttcacaccagcgatttctacctccatccccacgagaaaaaggcgcaggtggcgcagtttattaacccggcgatgtgcgagatcaccgaggatctgttctttaacgacccgtatcagatccacgagcgcaataactacccggcggagctggaggccgatgtcgccgccctgcgcgacgacgctcagcttaagctggcggtggcggcgctgaagcaccgtttctttgcccatgcggaagcgctgctgcacggcgatatccacagcgggtcgatcttcgttgccgaaggcagcctgaaggccatcgacgccgagttcggctacttcggccccattggcttcgatatcggcaccgccatcggcaacctgctgcttaactactgcggcctgccgggccagctcggcattcgcgatgccgccgccgcgcgcgagcagcggctgaacgacatccaccagctgtggaccacctttgccgagcgcttccaggcgctggcggcggagaaaacccgcgacgcggcgctggcttaccccggctacgcctccgcctttctgaaaaaggtgtgggcggacgcggtcggcttctgcggcagcgaactgatccgccgcagcgtcggactgtcgcacgtcgcggatatcgacactatccaggacgacgccatgcgtcatgagtgcctgcgccacgccattaccctgggcagagcgctgatcgtgctggccgagcgtatcgacagcgtcgacgagctgctggcgcgggtacgccagtacagctga

SEQ ID NO: 241315 - DNA, 1152 bp, Klebsiella pneumoniae
atggtgcaccgcggattcgcctatatcggccatatggtgtcgcagggtttttccgtggtcgatgttcgcgatccgacccggcccaccaccgtcaactatattgccgcgccgccgggcacctggaacgtgcacctccaggcgcatgacgatctgctgctggtgatcaacgcccgggatctgtttgctgacgcccgttttgctgatgagaaggtgtactacacccgctcggtgggtgacacggtcagcgatgtgcaggacaggggctggagcgccgggctgcgcatctttgatatttccactcccgcgcagccgcgggaaatcagtttcctgtcgcttaacggcatcggtattcaccgcatctggtacgtcggcgggcgctgggcgtatgtgtctgcgctgatcgacggttttaccgactacatcttcctgaccatcgatctggccgatccgcgtaagcccaaagtggccgggcgctggtggctgccggggatgcaccaggcgggcggtgaaacaccggactggccgcagggcaaacgctatgcgctgcatcacgccattattgccggggataccgcctacggcagctggcgcgacggcggcctgacgctgctggatgtcaaagaccgtacccagccgaggctgattagccatcgcaactggagcccgccgttcggcggcggaacgcataccgcgctgccgctgccggatcgcgatctgctggtggtgctggatgaagcggtgctcgataaccaggaggacggcgagaagctgatctggctgtttgatatccgcgagccaaccaacccggtgagcatcgccaccttcccgccgccggatgaagcggattacgtggcgaaaggggcgcatttcggtccgcacaacctgcatgagaaccggccggggagctttgtcagctcaacgctgatttttgccacgtatcagaatgccggcgtgcgggcttacgatatttccaacccgtatcgcccgctggagaccggggcgctggtgccggctgcgcctgagagaatgatggatacccgtcccggccgcccgcgggtgatccagtcctgtgacgtgtttgtcgatgcgcaaggcattatctacagcaccgattacaacggcgggctatcggtgattgagtatctggggtga

SEQ ID NO: 241316 - DNA, 1233 bp, Klebsiella pneumoniae; identical to SEQ ID NO: 241208

SEQ ID NO: 241317 - DNA, 1137 bp, Klebsiella pneumoniae
atgggacagagtcaaaaattgaatatacaaccgcgttcgcgttcgccgctggtgcatctggcgggaattcgcaagagctttgatggtaaaacggtcatcgacaaccttaacctgaccatcaacaatggtgagtttctcactctgcttggcccctctggctgcggtaaaaccaccgttctgcgccttattgccggcctggaaaacgtcgacagcggacggatccatctcgaagatcacgatatcactcatgttccggcggaaaaccgccacgtcaataccgtattccaaagctacgccctgtttccgcatatgacggtgttcgagaacgtcgcctttggcctgcggatgcagaaaacaccggcggcggaaatcaccccacgggtgatggatgccttaaagatggtgcagttggaggcgtttgcccagcgcaaaccgcaccagctctccggcggccagcagcagcgcgtggccatcgcccgcgcggtggtcaacaaaccgcgtctgctgctgctcgatgagtctctttcggcactggattacaagctgcgcaagcagatgcagaacgaactgaaagcgctgcagcgtaagctcgggatcaccttcgtcttcgtcacccacgatcaggaagaggctctgaccatgtccgatcgcatcgtggtgatgcgtgatggcaaaatcgaacaggacggcaccccgcgagagatctacgaagagccgaagaacctgtttgtcgccagctttatcggcgagatcaatatctttgacgccacggtaattgaacgtctcgacgaacagcgcgtgcgcgcccgcgttgaaggacgagaatgcaacatcaccgtcaattttgccgtggaggccggccagcgtctgcatgtcctgctgcgcccggaagatctgcgcgtcgacgagatccaccataacagcgacgccgatggcctgatcggctatgtccgcgagcgcaactataaaggcatgactctggagtcggtggtggaactggagaacggcaaaatggtgatggtcagcgagttctttaacgaagacgacccggatttcgaccactctcttgaccagaaaatgtctatcaattgggtggaaagctgggaggtggtgctggccgatgaagaacaccagtaa

SEQ ID NO: 241318 - DNA, 858 bp, Klebsiella pneumoniae
atgaagaacaccagtaaattccagaatgtggtgatcgccactatcgtcggttggctggtgctgtttgtcttcctgcccaacctgatgatcatcgccaccagctttttgacccgcgacgatgccaacttcgtcaaactggtcttcacgctggataactattcgcggctactggatccgctctattatgacgttctgctgcattcgctaaacatggcgctgctggcgaccctcgcctgcctggcgcttggctatccgtttgcgtggttcctcgcccggctgccgcagaaggtacggcccctgctgctgttcctgctgatcgtccctttttggaccaactcgttgatccgcatctacgggctgaagattttcctcagcactaaaggttacctgaacgagtttctgctgtggctgggggtgatcgacaccccgatacgcattatgttcaccccctcggcggtgatcatcggcctggtgtacatcctgctgccgtttatggtgatgccgctctactccagcattgagaaactggatcgcccgctgctggaagcggcgaaagatctcggcgccagcaagctgcagacctttatccgcattatcatcccgctgaccatgccggggatcatcgccggctgtctgctggtgatgctgccggcgatggggttgttctacgtttccgacctgatgggcggcgccaagaacctgctgatcggcaacgtgatcaaaagccagttcctcaatatccgtgactggccgttcggcgcggcaaccagcattaccttaaccctggtgatgggcctgatgctgttgatttactggcgcgcggcgcgcctgctgaataaaaaggtggagctggaatga

SEQ ID NO: 241319 - DNA, 786 bp, Klebsiella pneumoniae
atgatcggtcgactgctgcgcggcggctttatgaccgccatctacgcgtatctctacatccctattattattctgatcgttaactcgtttaaccggtcgcgcttcggcatcaactggcaggggttcaccaccgactggtatagcctgctgatgaacaacgatagcctgctgcaggccgcccagcactcgctgaccatggcggtgctgtcggcgaccttcgccacccttatcggctcgctgaccgccgtggcgctgtaccgttaccgctttcgcggcaaaccgtttgtcagcggcatgctgtttgtggtgatgatgtcgccagatattgtgatggccatctctctgctggtgctgtttatgctgatcggcgtccagcttggtttctggtcgctgctgttttcgcatatcaccttctgcctgccgtttgtggtggtcaccgtttactcccgcctgaaaggctttgacgtgcggatgctggaggcggcgaaagatctgggtgccagcgagatgaccatcctgcgcaaaattatcctgccgctggccctgccggcggtagccgctgggtggttgctgagcttcaccctgtcgatggatgacgtggtagtctcctcgttcgtgaccggtccggggtatgaaatcctgccactgaagatctattcgatggtcaaggttggcgtttcgccagaggtgaacgccctggccacgattttgttggttctgtcgctggtgatggtcatcgccagtcagttaattgcacgtgataaaactcaggggacgttaaaatga

SEQ ID NO: 241320 - DNA, 1047 bp, Klebsiella pneumoniae
atgaaaaaatggtcacgccacctgctcgcggcgagcgctctggcaatcggcatgggcgctgcgcacgcggacgatagcaaaacgctctatttctataactggaccgagtatgtgccgccgggcctgctggagcagttcaccaaagagaccggcatcaaggttatctattcgacctacgagtcgaacgaaaccatgtacgccaagctcaaaacctataaagacggcgcgtacgacctggtcgtcccgtcgacctactttgtcgacaagatgcgcaaagaaggcatgctgcagaagatcgataagagcaagctgactaacttcagcaacctcgatccgcagatgctgaataaaccgttcgatccgaataacgactactccatcccctatatctggggggcgacggccatcggcgtcaacagcgaggcgattgacccgaaaactatcaccagctgggccgacctgtggaagccggaatacaaaagcagcctgctgctgaccgacgacgcgcgcgaagtgttccagatggcgctgcgtaagctgggctattccggcaacaccaccgacccgaaagagattgaagccgcctataacgagctgaaaaagctgatgcccaacgtcgcagcgtttaactctgataacccggcgaacccgtatatggaaggcgaagtgaacctcgggatggtatggaacggctcggcttacgtcgcccgccaggcaggtactccgctggaagtgatctggccgaaagagggcggcatcttctggatggacagcctgtcgatcccggcgaacgccaaaaacgtcgacggcgcgctgaagctgattaacttcctgctgcgcccggatgtcgccaaacaggtcgctgaaaccatcggttatccgacgccgaaccttgcggcgcgcaagatgctcagcccggcagtggccaacgataaatcgctctatccggatgctgcgaccattgagaaaggcgaatggcagaatgacgtcggcagcgccagcgccatttatgaagagtattaccagaagctgaaagcgggccgttaa

SEQ ID NO: 241321 - DNA, 1020 bp, Klebsiella pneumoniae
atgagcatcattaaaagctacgccgccaaagaagcgggcgccgatctgttgctgtgggagtacgatgccggcgagctgcagccggaagatgtcgaagttgaagtggaatactgcgggatctgccattcggacctgtcgatgatcgacaacgaatgggggatgtcgagctacccgctggtggccggtcacgaggtgattggccgggtggcggcgctgggcagcgcggcgcaggataaagggctgaagattggccagaaggtcggcatcggctggacggcgcgcagctgcggccattgcgacgcctgcatcagcggcaaccagatcaactgtctggaaggctcggtgccgaccattctcaaccgcggcggcttcgccaataagctgcgcgccgactggcagtgggtgatccccctgccggagagcatcgatctggcgtccgccggcccgatgctgtgcggcggcatcaccgtctttaaaccgctgctgacccaccacgtcaccgccaccagccgcgtcggggtgatcggcatcggcggcctcggccatatcgccattaagctgctgcgggcgatgggcgcggaagtgaccgccttcagctccaacccggccaaagagcaggaagtgctggcgatgggcgccgatcgcgtggtcaacagccgcgatcctgaagccttaaaagcgctggccggtcagttcgacctgatcatcaacaccgtggcggtggacctcgactggcagccgtacttcgaagccctggcttacggcggcaacttccataccgtcggcgcggtgatgaagccgttcccggtgccggcctttaccctgatcggcggcgaccgcagcatctccggctcggcgaccggtaacccgtccgaactgcgcacgctgatgaagtttgccgggcgcagcaaagtggctccgaccaccgagctgttcccgatgtcgcagattaacgaagcgctgaagcacgttcgtgaaggcaaagcccgctaccgcgcggtgctgaaagccgacttctga

SEQ ID NO: 241322 - DNA, 873 bp, Klebsiella pneumoniae
atgagaaagacctggcttccctggctgatcctgtcgccttccctgctgtttttactgctgtttacctggttcccgctggggcgttcggtgtatgacagcctgtttgatacccgcatggccagcgacggcgcgcagtacgtcgggctggataacttcacccgcctgtttgccgataacgtcttctggcagtcgctgggcaataacctgctctatatcctgctgacggtggtgcccggggtgaccctcgccctgctgctggcggtcgccctgagcgagaaccatcgcgtcaaccgctggctgcgcaccgcctttttcttcccgatgattatcccgatggtcagcgccgccgcgctgtggctgtttatctttatgcccggcctcggcctgctcgaccactatctggcaaagctgttcgggccgatgaacaacaactggctggggcgcagcaacagcgcgctgctggccctggcgctgatcggcgtgtggaagttcgccggctactacatgctgtttttcctcgccgggctgcagagcattccggcctcgacgcgggaagcggcgctgatggagggggctacccgcacgcaggtcttttttaaggtcacgctaccgctgctgcgcccgaccctgagctttgtgatcaccaccgcgctgatctactccatcacccagatcgaccacgtggcggtgatgacccgcggcgggccggacaacgccaccaccgtgctgctctattacatccagaatctcgcctgggatacccacgacctcggcaaagcctccgccgccaccttcctgaccctggccgggctgttcgccttctcgctgattaacctgaaactgctggagaaaggagcccactatgagcgctga

SEQ ID NO: 241323 - DNA, 888 bp, Klebsiella pneumoniae
atgagcgctgaaatctcgccgctgctggtccgcacgcccgccgccgcccgtccgctgtggctacgcctgcgccgctcgtcgccctttacgctcacagtattaatgtgctgcctggcgctgctgtgggtcagcccgtttatctggatgctggcgacctcgttcagcgctaccaccttcggcgacgatatggcgtcgcttctgccccgcctgccgctgaccctcgataacttccgcgacgcctggaacagcgccgactggctgagcctgtacgccaacacccttatcttcaccttcggcaccttcttcgtgcagctgttgaccatcaccaccgccggctacgtcttcgcctgccacgagtttcgcggcaagcagacgctgtttctcctgttcctggtgcagctgatgatcatgccggtggtgatgatggtgccgaacatgctgaccctgaaaaccttcggcctgctcaacaccctcaccggggtgatgatgccctacttcacctcggcgttcggcgtgttcctgatgcgtcaggcgttcctcgccatcccgaaagagctggaggaggcggcgctgatggagggctgccgctggtggcaggtgctgttccgcgtactgctgccgatgtcctggccgtcggtgctggccttcgccaccgtcagcattacctaccactggaacgagtacctgtggccgctgatgatgctcaacgatcccgataagcaggtgctgaccgtcgggctggtctccttcgccatgggcgccgaatccggcggccagtggggcaccatcggcgccgggacgctgatggtctgcctgccgctgatgctggcgttcatcctttttcagaaacagttcctgcggagcttcggcttctccgggatcaaataa

SEQ ID NO: 241324 - DNA, 825 bp, Klebsiella pneumoniae
atgctgttagcgcacatttccgatacccatttccgcagccgcggcgagaagctgtacggctttatcgacgtcaatgccgccaacgccgacgtggtctcccagcttaacgcgctgcgcgagcgcccggatgcggtggtggtgagcggggatatcgtcaactgcggccgcccggaggagtatcaggtggcccgccagatcctcggcagcctgaactatccgctgtatctgatccccggcaaccacgacgacaaaacccattttctcgagcatcttcacccgctgtgcccgcagctgggcaacgatccgcaaaatatgcgctatgcggtggatgacttcgccacccgcctgctgtttatcgactccagtcatgccggcacgtcaaaaggctggctgaccgacgagaccatcggctggctggaagcccagctgtttgagggcggcgacaaaccggcaacgatctttatgcaccacccgccgctgccgctgggcaatgcgcagatggacccgatcgcctgcgaaaacggccaccgtctgctggcgctggtggagcgtttcccgtcgctgacgcgcatcttctgcggccataaccacagcctgaccatgacccagtatcgccaggcgctgatctccactatccccggtaccgtccatcaggtgccgtactgccacgaagatacccggccctattacgacctctccccggcctcgtgcctgatgcaccgtcaggtcggcgagcagtgggtgagctaccagcactcgctggcccactacgccgggccgtggctgtacgacgaaaacatcagttgcccaacggaagagcgctaa

SEQ ID NO: 241325 - DNA, 279 bp, Klebsiella pneumoniae; identical to SEQ ID NO: 241275

SEQ ID NO: 241326 - DNA, 2319 bp, Klebsiella pneumoniae
atgaaaatcagtgatggaaactggctcattcaaccagggctcaacctgatccaacccgtacaggtttacgaggtggagcagcaggggaatgaaatggtggtctatgccgcgccgcgcgatgtccgcgaacgcgcctggcagctggatacgccattgttcaccctgcgctttttctcgccgcaggaagggataatcggcgtgcgtatggagcacttccagggcgcgctggataacggcccgcactatccgctgaacgtgcagaaagacgtccatgtcgaaatagaaaatacggccgggttcgccgagctgaaaagcggcagcctcagcgtgcgggtgactaaaggcgaattctgggcgctggattttctgcgcgacggcgtgcgtatcaccggtagccagctaaaaaacaacggctacgtgcaggatagtaagacccagcgcaactacatgtttgagcgcctcgacctcggcgtcggcgaaaccgtctacggcctcggcgagcgctttaccgccctggtgcgcaacggccagacggtagaaacctggaacgaggacggcggcaccagcaccgagcaatcctacaaaaatatcccgttctatctgaccaaccgcagctacggcgtgctggtcaaccatccgcagcgcgtctccttcgaggtgggctcggagaaagtctctaaagtccagttcagcgttgaaggcgaatacctcgagtacttcgtcatcgacggcccgacgccgaaagcggtgcttaaccgctatacgcagttcaccggccgcccggcgctgccgccggcatggtcgtttggtctgtggctgacgacctcgttcaccaccaactatgacgaagcgacggtgaatagctttatcgacggcatggctgagcgccatctgccgctgcacgtcttccacttcgactgtttctggatgaaggccttccagtggtgcgattttgaatgggatccgcagaccttcccggacccggaagggatgatcaagcgcctgaaggcgaaagggctgaaggtctgcgtgtggatcaacccgtacatcggtcagcgctcgccggtgttcaaggagctgaaagagaagggttatctgctgaagcgcccggacggttcgctgtggcagtgggataagtggcagccggggctggcgatttatgacttcaccaatccggaagcccgccagtggtatgccgacaaactaaaaggcctcgtggcgatgggggtcgattgcttcaagaccgactttggcgagcgtatcccgaccgacgtccagtggtttgatggttccgatccgcagaaaatgcacaaccactacgccttcatctataacgagctggtgtggaaggtgctgaaagagaccgtcggcgagcaggaggcggtgctgttcgcccgctccgcctcggtgggcgcgcagcagttcccggtgcactggggcggcgactgctacgccaactacgaatcgatggcggaaagcctgcgcggcgggctgtcgatcggcatgtccggcttcggtttctggagtcacgatatcggcggtttcgaaaacaccgcgccggcccacgtctacaagcgctggtgcgccttcggcctgctctccagccacagccgcctgcacggcagcaaatcctatcgggtgccatgggcctacgatgacgagtcctgcgacgtggtgcgccacttcacgcagctgaaatgcctcatgatgccgtatctctatcgtcaggcggcgctggccaacgagtgcggcacgccaatgctgcgcgcgatgatgctcgagtttccggacgatccggcctgcgactatctcgaccgccagtatatgctgggcgattcggtcctggtggcgccggtgttctccgaggccggcgaagtgcagttttatctgccggaagggcactggacgcatctgtggcataacgatgaattgccgggtagccgctggcataagcagcatcacgatgcgctgagcctgccggtctacgttcgcgacaacagcctgctggcgctgggcaacaatgaccagaagccggattacgcctggcatgagggcaccgccttccagctgttccaccttgaggatggacgcgaggcacgctgtgacgttccggcggcagacggctcgacgatcttcaccctgaaggccaggcgccagggtaacgccatcgccgtgagcggcgaaggcgaggcccgcggctggacgttatgtctgcgcaatatcccgcaggtcgcgggcgtgcagggcggtacgcagaccggtagcgaatggggagtggtagtgagcgccgagggcaatacgctgacgattacgttgtaa

SEQ ID NO: 241327 - DNA, 1395 bp, Klebsiella pneumoniae
atgaaagatcacattttgtccgtcaaagagaaaattggttacggcatgggtgatgccgccagccacattatttttgataacgtcatgttgtacatgatgtttttttacaccgatatttttggtatccccgccggctttgtcggcaccatgttcctgctggcgcgcgcgctggacgcgatttccgacccgtgtatgggtctgcttgccgaccgtacccgcagccgctggggtaagttccgcccatggatcatcttcggcgctatcccgttcggcctcgtctgcgtgctggcctacagctcgccggatttaagccacaacggcaagctgatctacgccgccgtgacctacacgctgctgaccctgctctacaccgtggtgaatatcccttactgcgcgctgggcggcgtgatcaccgacaacccgacgcagcgcatttcgctgcagtcctggcgcttcgtgctggcgacggcggggggcatgctctccaccgtgctgatgatgccgctggtcaactttatcggcggcgaagacaaagcgctcggcttccaggggggcatcgcggtgctgtcggtgattgccttcctgatgctggccttctgcttctttaccaccaaagagcgtgtcgaagcgccgccgagcagtacctcgatgcgtgaagacctgcgcgatatctggcgcaatgaccagtggtgggtggtcggcgtgctcaccatcctcaatatcctcgcggtctgcgttcgcggcggcgcgatgatgtactacaccacctggatcatgggctcggcggcgctgttcaccgccttcctcacgacctactgcgtcggcaacctgattggctcggcgctggcgaaaccgctgaccgactggaaatgcaaagtcagcgtcttctggtggaccaacgccctcctggcggtgctcagcgtggcgatgttcttcgtaccgatggacgccgaaatcaccatgtttgtctttatcttcgtcattggcgtactgcaccagctggtgacgccaatccagtgggtaatgatgtccgacaccgtcgactacggcgaatggtgtaacggcaaacgcctgaccggcatcagcttcgccggcaccctgtttgtgctcaagctggggctggcgctgggcggcgcgctgatcggctggatgctggccggcggcggctatgacgccgccgctaaaacccagaacagcgccaccctcaccatcattatcgccttgttcaccctcgttccggcggtgtgctacctgctgagcgcggtgatcgccaaacgctactacacgctgaaaacgccgttcctgaaaaaaatgatggccgagctggccgagggcgcgcgtcgcaacgaacaagatttcaccgccgccccgatcgacaaagaatggcaaaactaa

SEQ ID NO: 241328 - DNA, 294 bp, Klebsiella pneumoniae
atgtggagaggaaccgatcgcaccagaagccagatgatactgaccgagtatcgctacgaccctaaagccaaagactccaaatccgtttacctggtgcggcataacagccgcacacagcaaactgttctggagcagcatttgacgatagagcgcgatagcttcggtcgtttcataccgactatcgaactgaaagactttccggaaggacttagcgaccgcgagtcgatgctcaaactttccgactggctgcaccgtttaggtgtggcgatcgaggataactggagtcaaccatga

SEQ ID NO: 241329 - DNA, 126 bp, Klebsiella pneumoniae
atgaatatgaagatcgggcacccatccgtgatacatagaagcagttccctgtgggtcattgccttcaacaagcagaacacggagtcctttcagagcaagatcctgagccaggtgaacggatactga

SEQ ID NO: 241330 - DNA, 2010 bp, Klebsiella pneumoniae
atgtctcatttattttatggcgtggcgtattacgatgaatatatgccggaagatcggctggctaaggatatcgccttaatgcgcgaaaccggcattaacgtggtgcgtattgccgagtccacctggagtacgctggagcctgaagagggccagtataatttctaccatatcgaccgggtgctggaggcgatgcatgaggccggcattgcggtcatcgtcgggacgcccacctacgcggtcccggcctggctggcggcgaaacatcccgatattctggtcaccaccgtcgcggggcagcaaaaatatggtccgcggcagatcatggatatcgtcaacccgacctttcgccgctatgccgaaaaaattatccgcacgctgatggcccatgtgcaacaccatccggcgattatcggctggcaactggataacgaaaccaagcattacgacaatattggccgctatatgcaggagggcttcgtgcgcagcctgcaggagaaatatcctgacctccggcagctgaatcacgatttcggcctggattactggagcaaccgcattgaccgctggcaggattttccgccggtggaaaacaccatcaacgccagcctcgcctgcgccttctcccgctatcagcgtcagcaggtcaccgagtatctggcctggcaggcggccatcgttcgggaatacgcccagccgcaccagttcgtcacccacaacttcgatttcgaatggcgcggttactcttacggcgtgcagccgcgggtcgaccattttgcggcggcgcaggcgctggatatcgccggcgtcgatatctatcacccgagtcaggcacacctgaccggacgggaaatcgcctttggcggcgccatctcccgctcgcttaagccgggccagaactacttcgtgctggaaacccaggctcagggcttcgcccagtggacccccttcccgggccagctacgcctgcaggcattcagccatatcgcctccggcgccgccatggtctcctactggcactggcattcgattcataacgcctttgaaacctactggaaggggctgctcagccacgacttctcgcgcaacccaacctggcaggaagctaccaccatcggcgccgatttcgcccgcctgtccccgcagctggcggagctgaaggccgaaaatgacgtcgcgttgctaataagtaatgaggcgatggacgctctcaatcacttccttcccggcgacgccaggggcaacatttataacgatatcttccgccgcttccacgatgcgctgtatgaccacaatatcagcctcgacatcatccacgatgtgaacgaggaaacctcgcgctaccgggtgctgatcgttcctggtctgtacgccgccgatgagggcctgctaacgcggattaacgactatatcgcccggggcggcagagcgctgatcggctttaaatcaggctttagcgatgaaaacgtcaaggtgcgcagcagcgcgcagccgggggttttgcgccagagctgcggcgtcagctacagccagttcaccctgccggaagagacgacggtaagctcttgctgcgcagagattgattgccgcaatgacaatcaggctgagctgtggatggaattgctgacgcccgatgacgggacccgcaccctgctgcgctatcagcacccggcatggggcgaatacgccgccgcaacggaggcggattacggtcagggtcgcgccctgtacgttggctttctgccgcagaagggcctgattagccagctgtttgatgtcctgacggcggatctcacgctgaactcgcgaacttccgcctatcgctatccgttagtggttaaaaagatgcgtaaccgcgccggaaataatatccacttcctgttcaattactccggcgaggcgatggatgttgtcagcgagaccctgggtaccgcgctgctgagcggggagacagtatacgtcggccagccgttgcgcctcagggcctgggaatttactatcatcgaaagctaa

SEQ ID NO: 241331 - DNA, 420 bp, Klebsiella pneumoniae
gtggtggcgtatcacttcgtagaacagatcgcgcagttgctggagctggtcgggatcgttaatggttgttttgccgataccgtgggtggtttggtcccacttcagccagtctatccagtaggggcgggggataaagtagatccacagatggtcccagtactcgctgtgttcgtccctgccgtaatgatggggcacgccgggaggaaacagcaacagatcgttttcccggcacagcaggaagccatcgcccgctttcgcccgcgcctggccgcgcagggtcagattaatgatgtaacctttcatcccctgcgggcgattaatgtagtagtccagcgtggagccgcgggtaatcggcgtgaagcctgcgacgacccaggcattgaaggtaaaggtcttcatcaatggcgagaaattgagtag

SEQ ID NO: 241332 - DNA, 1668 bp, Klebsiella pneumoniae
gtggctcaattcgtttataccatgcatcgtgtcggcaaagtggttccgccgaaacgtcatattttgaaaaatatctccctcagctttttccctggcgcgaaaatcggtgtgctcggtctgaacggcgccggtaaatctaccctgctgcgcatcatggccggtatcgacaccgagatcgaaggtgaagcgcgtccgcagcccggcatcaaaatcggctacctgccgcaggagccgcagctcaacccggagcacaccgtgcgcgagtccgtggaagaagcggtcgccgaagtggttaacgcgctgaaggggctggacgaagtctatgccaaatacgccgagccggatgcggacttcgataagcttgccgcacagcaaggcaagttcgaagagattatccaggcgcacgacggccacaacctgaacgtgcagctggagcgcgcggccgacgccctgcgcctgccggactgggatgcgaaaatcgctaatctttccggtggtgaacgccgccgcgtcgcactgtgccgcctgctgctggaaaaaccggatatgctgctgctcgacgaaccgaccaaccacctcgacgccgagtccgtcgcctggctggaacgcttcctgcacgacttcgaaggcaccgtggtggcgattacccacgaccgttacttccttgataacgtcgccggctggatcctcgagcttgaccgcggcgaaggtattccgtgggaaggcaactactcctcctggctggagcagaaagaccagcgtctggcgcaggaagcttctcaggaagccgcacgccgcaaatccatcgagaaagagctcgagtgggtacgccagggcgcgaaaggccgtcagtctaagggcaaagcccgtctggcgcgctttgaagagcttaacaacgttgaataccagaaacgtaacgagaccaacgaactgttcattccgccaggcccgcgtctgggcgataaagttctggaagtcagccatctgcgcaaatcctacggcgaccgcgtgctgatcgacgatctgagcttctcggtaccgaaaggcgctatcgtcggcatcatcggtccgaacggcgcgggtaaatccaccctcttccgcatgatgtctggccaggaacagccagattccggcaccatcaccctgggtgaaaccgttaagctggcttccgtcgatcagttccgcgacgcgatggacaacagcaaaaccgtgtgggaagaagtgtccggcggcctggatatcatgaagatcggcaacaccgaaatgccgagccgcgcctacgtgggccgctttaacttcaaaggcgtcgaccagggtaaacgcgttggcgagctgtccggcggtgaacgtggtcgtctgcacctggcgaaactgctgcaggtcggcggtaacgtcctgctgctcgatgaaccgaccaacgacctggatatcgaaaccctgcgcgcgctggaaaacgccctgctggagttcccgggctgcgcgatggttatctcgcacgaccgctggttccttgaccgtattgccacccacattctggattaccaggatgaaggtaaggttgagttcttcgaaggtaactttaccgagtacgaagagtacaagaaacgcactctcggcgccgacgcgctggagccgaagcgaatcaagtacaaacgtatcgcgaaataa

SEQ ID NO: 241333 - DNA, 483 bp, Klebsiella pneumoniae
atggtggtctgggaagggacccgcccgctgctggtggagatccaggcgctggtcgatcactcgatgatgtccaacccgcgccgcgttgcggtggggctggaacagaaccgtctggcgatcctgctggcggtgctgcaccgtcacggcggcctacagatggccgatcaggacgtcttcgtcaatgtggtcggcggggtgaaggtcacggaaaccagcgccgatctggcgctactgctggcgatggtctccagcctgcgcgatcgcccgctgccgcaggacctggtggtctttggcgaagtggggctggccggcgaaattcgcccggtgccgagcggtcaggagcgtatctccgaagcagcgaagcatggcttccgccgcgccatcgtcccggcggccaatgtgccgaaaaaagtgccggaaggcatgcaaatctttggcgtgaaaaagctttcagacgcgctaagcgtttttgacgacttataa

SEQ ID NO: 241334 - DNA, 426 bp, Klebsiella pneumoniae; identical to SEQ ID NO: 182229

SEQ ID NO: 241335 - DNA, 123 bp, Klebsiella pneumoniae
atgttgcagatgcgtaatccagtggccaccatcagcaatccaccggcgcaggagaaatccgccatcattgacggcgtgatcatcggcagaataaacaccgctagcatcgccagcgccacctga

SEQ ID NO: 241336 - DNA, 1005 bp, Klebsiella pneumoniae
atggcaaaaccggactggggcgagcttcagcaacggttcctgtccgatcatgccgcaaccggcgtatcaccgaaggattggtgtgaagcgcagggactgaattacgctactgcccgccgatacatcaagaaacccactgcgcaaactgcgcaaaaacctgcgcagaagaaattgcgcactgcgcaaaaggaaaagtgcgcagaagagctggtggatgatgatggcctcaccaatcaacagcgtttatttgtcgcggaatacctgaaggacaacaacgccacgcaggccgctatccgtgccgggtacagcaagaagacagcgaatgagcagggagcaaggctgttagcaaaagttagtattgcgcaggccattgcgcagcagcaaaaagcatccattgtgcgcacgcttggaagcgccgatgaagtgcttgagcagatgtggcgcctggccaccttcgacgccaaccagctatcacagtatcgccgcgggagttgccgctattgctggggcttcggtcatcaatatcaatggcgcgatgcggttgagtacgaagagaagcgactcgaagcgcttgagcgaaaacgtcgcgagcccgttgatgttggtggctacggttacgaccacaccagcgcacctaacccggaatgccctcgctgtaatggagatggcatcggccagcctttcttcgccgatacgcgaaaactggcgcctgatgctgcgcttgcctattccggtgtgaagcttgggaagaatggcgtggagattaccgctattagccgtgagcgaatgtacgaggcggtgatgaaacgtctcggcctggctgatagcgagttcgcccagcgtctgcagctgattgaaattgagcgccggcagctggaggttgaaaaattacgcaaagagctggccactgatccggaggatgacgaaccaacgccagttgcaatcaatatcaacgtagtcgatgcacgagtgagggaagaggatggcgatagcaccgacgcttaa

SEQ ID NO: 241337 - DNA, 1173 bp, Klebsiella pneumoniae
atggcactgacagacatacaaatcaaacgagcaaagccccaagacaagccatatacattgaacgatgggcaaggcctgtcattgcttattaatcccgatggttcgaagggctggcggttccgtttccgccttgctgggaaagcgcggttaatgtcatttggcagctacgacttgataagcctcgctgaagctcgtgaaaagcgcgaggtcgcccgcaagcaagttgctactggcattgatccggttgaggaacggaaagcgcaaaaactggcacagcagctttcaacagaaaactcattcgaagccataagccgcgaatggcatgcaaacaaagccgaccgctggacagtggcataccgtgacgaaatcattaagactttcgaacaagatgttttcccgttcatcggcaaacgtcctatcggtgagatcaaacctttagaattgcttgaagtgctgcgacgaatagagaaacgtggagcactggagaaaacacgcaagatacgccagcggtgtggagaggtttttcgctacgcgatcataactggccgagctgaatacaaccctgcccctgatttagctatcgcattagccgtgccgaagcaaaagcatcatccttttttatccgccgaagaattgcctcattttatcagagatcttgaagcctataccggcagcatcatcactaaaaatgcgactaagatagtcatgttaactggtgtgaggacgcaggaaatgcgctttgctacgtgggatgaaatcgatttagaaaaggcaatttgggaaatcccagcagaaaggatgaaaatgcgtaggcctcacattgtccctttatctactcaagtgattgaactctttaagcagctcaagcccattaccggtcattattcttacatttttatcggcaggaataaccgcagtaagccaatttgcaaagaaagtgtgactcaagtgattgagttacttggttacaaagggcgtgcaacaggccatggtttcaggcataccatgtcgactatattgcatgaaaagggttttaatagtgcatggattgaaatgcaattagctcatatggataaaaatactattcgcggaacatataaccacgctctttacctagagaaaagaaaaaacatgatgcagtggtattgtgatgaattatacccaagaaaataa

SEQ ID NO: 241338 - DNA, 213 bp, Klebsiella pneumoniae; identical to SEQ ID NO: 135963

SEQ ID NO: 241339 - DNA, 435 bp, Klebsiella pneumoniae
atgagcagaatgattcttgtccctatcgatatctctgataaagaatttactgaacgcattatcagtcacgttgaatcggaagcgcggattgacgacgccgaggtgcatttcctcaccgtgatcccttctctgccctattatgcctcactgggaatggcctataccgctgagcttcccggcatggatgagctgcgtgagggttctgaaacgcaattgaaagagatcgcgaagcagttctccatcccggaagaccggatgcattttcacgtcgcggaaggatcgccaaaagataaaatccttgcgctggccaagtcgctgccagccgacctggtgatcatcgcttcgcaccgaccggatatcacaacttatctgctgggctccaacgccgccgcggtggttcgtcacgccgagtgctcggtactggtggtccgctaa

SEQ ID NO: 241340 - DNA, 936 bp, Klebsiella pneumoniae
atgctgcaaaaccaagaaatcagtaaaaaagaaaagtacaacatcgataagctgcagaaacgtctgcgccgcaacgtcggtgaggcgattgccgacttcaatatgattgaagagggcgaccgcattatggtttgtctttcaggcggcaaggacagctataccatgctggagatcctgcgcaatctgcagaaaagcgcgcccatctccttctcgctggtggcggtgaaccttgatcagaagcagccagggttcccggagcatattctgccggcgtatctggagcagctgggggttgaatacaagattgtcgaagagaacacctacggcatcgtcaaagagaagatcccggaaggaaaaaccacctgctcgctgtgctctcgcctgcgtcgcggcatcctctatcgtaccgctaccgagctcggggcgaccaagatcgccctcggccatcatcgcgacgatatcctgcagacgctgtttttgaatatgttctacggcggcaaaatgaaagggatgccgccgaagctgatgagcgacgacggcaaacacatcgtcatccgcccgctggcctactgccgcgaaaaggacatcgagcgcttctcccaggccaaaggcttcccgattattccgtgcaacctgtgcggttcgcagccaaacctgcagcgccaggtgatcgccgatatgctccgcgactgggacaagcgttatcctgggcgcattgaaaccatgttcagcgcgatgcagaacgtggtgccttcgcacctgagcgacgtcaatctgtttgattttaaaggtatcacccacggctcagaggtggtggatggtggcgatctggcgtttgaccgggaagatattcccctgcagcccgccggctggcagccggaagaagaagacgcccgtctcgatgagctgcgtctgaacgtagtggaagtgaaataa

SEQ ID NO: 241341 - DNA, 1374 bp, Klebsiella pneumoniae
gtgaccgctttttctaccctgactgttttacctgccgcccaattagccaaccttaacgagctgggttatctgtcgatgaccccggttcaggccgccgccctgccggcgatcctcgcggggaaagatgtgcgcgtgcaggcaaaaaccggcagcggaaaaacggccgcatttgggctgggtctgctgcagcatatcgatccggcgcgcttcgagacccagtcgctggtgttatgcccgacccgcgagctggccgatcaggtcgccggcgagctgcgccgcctggcgcgctgcctgccgaacatcaagattctgatgctctgcggcgggcaaccctttggcgcccagcgagattccctgcagcatgccccgcatattatcgtcgccaccccgggccgtctgctcgatcatctgcagaagggaacggtctcccttgacgcgctgcagaccctggtgatggacgaagcggaccgcatgctcgatatgggcttcagcgatgccattgatgaggtgatccgcttcgcaccggctgaccggcagacgctgctgttttctgctacctggccggcggcaatcgcggcgatcagcggccgggtgcagcgcaatccgcagacaattgagatcgacactgtcgatgcgctcccggcgattgagcagcagttctttgaagtttcccgccacggtaagattgccctgctgcagcgcctgctcagccagcatcagcccgcatcctgcgtggtgttctgcaataccaaacgcgattgccaggcggtctgcgatgcgctcaacgccgccgggcagagcgccttgtcgctgcatggtgaccttgagcagcgcgatcgcgatcagacgctggtgcgcttcgctaacggcagcgtccgggttctggtggcgaccgacgtcgctgcccgcggtctggacatcaaatccctggcgctggtggtgaatttcgagctggcctgggatccggaggtgcatgttcaccgcatcggccgtaccgcccgcgccggtgaacaagggctggccatcagcttctgtgcgccggaagaggcgcagcgcgccactattctggccgacatgctgcagctttccctgaactggctgccggcgccgacgggcaacaccatcgcgccgctgacggcggagatggcgacgctgtgtatcgacggcgggaaaaaggcgaaaatgcgcccgggagatgtgctgggagccctgaccggggatatgggctttgatggtgccgatatcggcaaaattaccgtccaccctgcccacgtctatgtggcgatccgccagaatatggcgcagaaggcgtataagcagttacaaaatggcaagatcaaaggtaaatcctgccgcgtacgactgctgaagtaa

SEQ ID NO: 241342 - DNA, 750 bp, Klebsiella pneumoniae
atgcgtattaattatctggatgatgacgatctcgcctttctgcctgagtgcagcgaggcgcatctggaagcgtttacccgtattctgacccacggggaaaatggcaaaccccgtctctccagtacgctgctgcgcaacgaaacctttctgtctatggagggccacccggagcgctatcgccgcaactggcagttgatcgccggcgagctacagcatttcggcggcgacagcatcgccaatacgctgcgccgccatggcaaattttatcgcgccatcctgctggatgtgtgtaagaggctgaaggcaaaggtcgataaacagatgacgacgccgcagattgagcaacagttgttgacgcattttctgcagcacagctggaataagctggatgcggcacaaaaaacgcagtttctcgccgcggtggagtgccggagtcttgagctggaaagcctgctgccccatctgttgagacgccgcaagctgagtgaaggcgttgccctgctactggatgagcggttaaccgccatcctgcgcacgcacgccgccgtgagcgtcatcggtcatggcctggtacgcggcgccgggctgggggggccgcttggcgccgcgctgaacagcgtgaaagcggtgagcggcagcgcttatcgggtcaccatccccgcggtcctgcaaattgcctgtttacgacaaatgctccactcgtcgtcgggcgcaactgaaattggtgaaaaataccccgccagatcatag

SEQ ID NO: 241343 - DNA, 405 bp, Klebsiella pneumoniae
atgaaatcactattccggctttcagcggggcttatccttagcgtgtcagttatcacctcggcggccgccaacgaccataagatcctcggcgtgatcgccatgccgcgcaatgagaccaacgatctgacgctgaagctccccgtctgccgggtggtcaaacgtattcagctcagcgccgagcgcggcgatatacagctctccggagcaaccgtctactttaaggccagccacggcgccagccacacgctgaacgtgcccgccgggatcaaagagggcaacaccaccggctggatcaccctcaacagcgataacgacaacaagcgctgtgtgaaaaaaatcgccttctccggccagacggtcaactcctcagatatggcctcactgaaaattatcggcgacgactaa

SEQ ID NO: 241344 - DNA, 1233 bp, Klebsiella pneumoniae
atgaataacaaactctttgaaacgattattgcaaagttaaatttttcgctaattaagaaaacaccggtaattttacaatcagaatcagcggaatgtggtatcgccagcctggcaatgatctgcggacactatggattagatatagacttattcaatttccgccaacacttcggcagcccatcgcaaggcgcttcactgctgcatttgagcaaaaccgccgagcgtgctggccttaaaaatcgcgcgctttcattagatttagatgaaataaaacagcttaagctcccttgtattctccactggggaatgaatcattatgtcgttctaacgaaagtacgaaaatctagctatgttgtgcatgatcctgctttgggtaaacgtataattggtttgcaggagatgtctaataatttcaccggcgtggctctggaactttggcccgatcagaactttcagcaagaaaaggcaaaagcacgcttacgtttattagacctgatgcgaaacattgtcggattaaagtctgcattaattaaaatcttcgcattctctgtcgtaatcgaagccattggccttttactccccattggtacccaactggtcacagaccatgtcatcatggcccatgaccagagtctgttatccgtcatttgtataggactggtctttttcactctcttccgtacctttgtcagtatgctaagggcatggacctcactgactctcaatactctgactaatattcaatggaaaacgacattgtttgatcacttgacaagtttgccgttatccttttttgaaaaacggcatcttggtgatatccagtcacgttttacttcattggatactatccgctcaacgttcactaacagtattgtcagtggcatcattgactcgatcatgacaattggtctgttaattatgttaaccctttacggcggctggctagtatgggtggtcgtaggatttacactttgctacgccattatgcgcttggcgacataccgtttttaccgtcgggtagcagaagaacaagtcattaaaggagcccgctcgagctctcatttcatggagtcactttatggaatatcaacgattaaagctcttaatttaaaagagcgccgttcgcagcattggcttaatattaacattgatgcatgtaatgcaggaattaaacaaactcgctttgatatgatgttcagtggggctttgttgaataaatcgaacttttgctga

SEQ ID NO: 241345 - DNA, 576 bp, Klebsiella pneumoniae; identical to SEQ ID NO: 211020

SEQ ID NO: 241346 - DNA, 651 bp, Klebsiella pneumoniae
atgcagaaagaaaaactttcggctttaatggatggtgaaacgctggataacgaactgctcaacgagctgagtcgttcttctgagatgcaaaaaacctgggagagttatcaccttatccgcgatacgctgcgtggcgataccgctgaggtgctgcaatttgatatctccgcccgggtgatggccgccattgaaaatgagcccgttcgtcagacggctccgcttattcctgaatctcagcccgcgccgcatcagtggcggcagatgccgttctggaacaaggtgcgtccgtgggccagctccctgactcaaatgggcgttgccgcctgtgtatcgcttgcggttatcgtcggcgtccagcactataatggtcagtctgattccgctcagcagccagaagcgccggtgttcaatacgctgcccatgatgggtaaagcaagcccggtaagtcttggcgtgccggctgacgcgtcagcgggaagcggccagcaggcgcaggtccaggaacagcgccgccgaattaacgccatgctgcaggactacgaactgcagcgccgcctgcacgctgagcagcttcagtttggccaggcccagactcagcaggccgcagtccaggtaccgggctatcaaactttaggaacgcaatcgcagtaa

SEQ ID NO: 241347 - DNA, 957 bp, Klebsiella pneumoniae
atgaagcaactttggtgtgccatgtcgctcatggcaggcagcctgttgttctctgtcaacgcctcggctgatacatcgtccggggcgttgttgcagcagatgaacctggccagccagtctctcaattatgagctgtcttttgttagcatcagcaaacaaggcgttgagtcgctgcgctatcgtcacgcgcgactgaacaaccaaccgctggcgcagttgctgcagctggacggtccgcgccgggaagtggtcctgcgcggcacggaaatcagctattttgaacccggtctcgatccgttcaccctgaacggcgactatatcgtcgattcgctgccatcgctggtatatagcgatttcaaacgcctctccgcggcgtatgattttatctccgtgggccgtacccgtatcgctgaccgcctctgcgacgtgatccgcgtcgtggctcgcgacggcacgcgctacagctttatcgcctggctggatgctgaaaccaagctgccgctgcgcgtcgatttgctcgaccgcgacggggaaacgctggagcagttccgggtcgtctccttcaacgttggcgataacgtcagcgccagcatggagacgctggcaaaagcgaatttgccgccgcagctgtcggtgcctgaaggaggcgacaaagccaacttcaactgggcgccgacgtggctcccgcagggcgtgactgaggtttccagcagccagcgccgtcttcccacctttgacggtccggtagaatcacgtctctattccgacggcttgttcagcttctcgatcaatatcaaccgcgccacggcggccagcagcgaccagctgttgcgcaccggccgacgcaccgtcagcacgacggtgcgcgataacgcggagataaccgtagtgggcgagctgccgccgcagacggcgaagcgtatctctgacagtattaaattcaaggcagtacaatga

SEQ ID NO: 241348 - DNA, 480 bp, Klebsiella pneumoniae
atgattaaagagtgggctaccgtggtttcctggcataacggcgtggcgcaggtgcactgcgacgttaaagcctcctgcagcagctgcgcctcccgtgccggctgtggtagccgggtgctaaacaagctggggccgcagaccagccataccattagcgtgccctgcgagcagccgttggccgcggggcaaaaagtggagctggggatcgcggaaagcagcctgctgggctcagcgatgctggtgtatatggcgccgctggcggggctgtttgtaatggcgtctatttttcaggtgctgtttgccagcgatattgcgtcactttgcggcgcgctgctgggcggcgtcggcggcttcctggtggcgcgcggtctgtcgccgcgactggcggcacgtcagtcctggcagccggtgattttgaacgtcgcactgccgccggatctgctgcgtgttgatacgccttcctccgacatgggccagtga

SEQ ID NO: 241349 - DNA, 153 bp, Klebsiella pneumoniae; identical to SEQ ID NO: 211024

SEQ ID NO: 241350 - DNA, 1353 bp, Klebsiella pneumoniae
atgttgaaatcaccgttattctggaaaatcaccacgctaataggctgtattgtgctgttatctctacctttaatgatggtcagggagctcatcaatgagcgggctgattatcgcagcgaggtagtggacgccattgagcagagcaccagcggttcgcaaaaactcgccgggccgctgatcgctattccggtaaccgagacgctgacccgcagggaaaaccaaaaagaggtcgcctatcagcgtagctgggtgtactactggctgccggagtcgctggcggtcaccggcaaacagaccgtggagtcgagaagggtgggcatctacagcgggcaggtatggcataacgccctgcagattaaggccaccttcgatccgctgcgtctggcgtcgctgcgaaaaacgcatatcaccctgggcctgccgcggctggtggtgagcgtcggcgatgcccgcggcattggcgccatccacgccccgaaggttaacggcagcgtattaagcgtggaaccagggctggggatcagcggcgatggggcgggcatccatatgcggatgcctgcgctggcggaggacaacaagccgcttgagattgctttttcgctcgatctgaacgggacgggcgcattttcactggcgccgctcgggcgcaacagcgagctgcagctgaccagtaactggccgcatcccggctttctcggcagcttcctgccaacgaaacgcgaagtgaatgctgccggctatcgcgcccactggcaaagcagctggttcgccaatgatatgggcagctatttcaaggatgatatggagatcccgtggtcgcgcttaccggcgttcagtgccgatgtcatgtcgcttgccgaccagtaccagctaaccgatcgggcgacaaaatatgccatcctgttaatcgggctgacgtttatggcctttttcgctttcgagagcctgacccatcgacccctgcatccgatgcaatatttgctggtgggcttatcgctggtgctgttttacctggtgctgctggcgctttcggagcacattggctttaccgccgcctggctggccgccagtctgtgcggcgcggtgatgaatgggatctacctccaggcggtgctcaggggatggcgcaacagcctgctgtttgtcgccgcgctgctgctgctggatggggtgatgtggtttctgctgcactccgaggacagcgcgctgctgttggggaccggtgtgctggcgctggcgctgagcattctgatgtttttgacccggcgagtggactggtatgcgttatcgttaccgaaaggcagtgcgccgccgtctgccgatgacgacaaactgcgcctgtggaaagagtga

SEQ ID NO: 241351 - DNA, 1425 bp, Klebsiella pneumoniae
atgcgcatcggcatgcgcctgctgctgggctatttccttatcgtcgcgatcgccgcgtggtttgtactgtcgatctttgtccaggaagtgaagccgggcgtgcgccgggcgacggaggggaccctcaacgataccgccaccctgctggcggcgctggcgcgtgaggacctgctggtggcaaacccgcagcagggcaggctggcgcaggcctttcaacagctcaaccagcagcggctaaacgccaacattggcggaattaaaaaggtgcgtaatgagtaccgcgtctatctgaccgatgcccggggcaaggtcgtgtttgactccagtggagaggcgacagggcaggactattcacgctggaacgacgtctggctcaccctgcgcgggcagtatggcgcgcgcagttcgcgcagcgatccgcatgatgaagccagctcggtgatgtatatcgccgcgccggtgatggataaggggcggattatcggcgtgctgagcgtcggtaaacccaacctggcgatgacgccggtcattaagcgcagcgagcggcggatcctctgggccggcggcgccctgctgggcattgcgctgttgatcggctgcggcgtcgtctggtggatcaatttctctatcggtaagctggtgcgctatgcggactccgtgaccgctgaccgcccgctgccgttgccggaggtcggcagcagcgaactgcgtaagctggcccaggcgctggagagcatgcgggtgaagctcgaaggcaaaaacgccatcgaaaactatgtctatgacctgacgcacgagctgaaaagtccgctggcggctattcgcggtgcggcggagattctgcgcgaagggccgccgcctgcggtggcggcgcggtttactgagaatatccttgcgcagaacacccgcatgcagctgctggtggagcggttactccagcaggcgcgactggaaagccggctggagataaagctacagccggtgtcgatagatgcgctataccaacgcctggcggaggagcgcgacatcgccctggcggcgaaagccattactctgcgctggcaggcgagtgggatgctggtcaatggcgatggcgaactgctggcccaggcgctgggtaatctgctcgacaacgcgattgattttaccccccagggcggcgagatcgccctgggggtagagaaacgaaatgcagaggtgcaactgagcgtaacggataacggatgcggtattccggactatgccctgacgcggatctttgagcggttctactcgctaccgcgtgaagacggccacaagagcagcggccttgggctggccttcgttcgtgaagtggcgcgcctgcatcatggcgatatccgtctgcgcaatcggcccgaaggcggcgtggtcgctacgctgagacttcaccgtcccttcacatag

SEQ ID NO: 241352 - DNA, 195 bp, Klebsiella pneumoniae
ttgcttcacgcgcccggtcgcgttttctcccgtcagcagctgatggagcgggtatggagcgatgcctgggaaagcctcgaccgcaccgtcgacacccacatcaaaaccctgcgcgctaaactgcgggccgtgaatcctgatttgtcgccaatcaatacccatcgcgggatgggctacagcctggggcgcagctga

SEQ ID NO: 241353 - DNA, 369 bp, Klebsiella pneumoniae
gtgaccagcgtggaagggcgagtggaaatcacggcggcgaaggaactggtggtgaactgtgcgggagcgtatatcaggctaagtggtggcaatatcgaactgggctgcccggggaatattctgctgaaatcggccaatgtgcagaaaatgcgtaaggcagattttcgtgtacctccgctggaactgcctgaaggggtcgaagagcgttttactgtcaaagatcagaagaccggtgaaattgttccgtttgcccgttaccgcatcaccactgaaaaaggccaggtattcgaaggccgggcagatgctgatgggaaaacggccagcgtttataccgcattgcctgaatcaataaaaatagagctactgtga

SEQ ID NO: 241354 - DNA, 300 bp, Klebsiella pneumoniae
atgaatgaagaaacattaacagaaaaagaaattgaatttgttcaaaacgaattacagaaatattgcgataacctgacagcggaagttaaagcggctattgaaaaaactgaacgagacgttgcaaatgaagccgaaattagagggttaagttatccggtcaatccagcaaactcaggcttcctgaaggcaatgttgattcaggagcttttagacgacttatgtagtgaaagaaaagaatttgctgttcatatactaacgaacgaagcgaacaggttgggtgtaaagataaacatgaattaa

SEQ ID NO: 241355 - DNA, 747 bp, Klebsiella pneumoniae
atgacctactgtgtggccatgtgcctggcggatggactggtgtttgcttccgactcccgcaccaacgcgggcgtcgaccatattgccacttttaaaaagctgcacgttttccatcaggagggggaacgggtgctggtgctgcaatccgccggcaatctggccaccacccagagcgtgataagcctgctcagcgcgcgcatccgtacccagcaggagccgaatctgatgcaggtcacttccctctacgacgccgcgatgctgatcggtaaaacgctgctggaggtgatccagcgcgacagcagcaaccagcagacctgcagtaacaccaacttcaactgcaacctgctgcttggcggccagatcgccggcgaaacccatcgtctgttccatatttatccggagggcaactttattgaagccacccgcgacacgccttatttccagattggcgaaagcaaatacggcaaaccgatcatcgatcgggtgctgaccatcgacacgccgctggagcaggcgatgtgctgcgcgttgatctccattgattcgacgctgcgcagtaatctgtccgtcggcctgccgctggattcgctgctctaccgcagcggcagcttcagcagtgccgggcagcatcgcatcaccgacagcgatccctacttcaaccgcattcgcaaggcgtggtccgaagggctgttgcacaccttccagactctgccgacctggacgccagcggagcgggaagaggagtag

SEQ ID NO: 241356 - DNA, 816 bp, Klebsiella pneumoniae
atgaaactggtcatcgatcatctcacccgctatggctacgatgaagaagtgaagttttccacccagtatctgcgcctgacgccgcgcagtaccggccggcagacgatcaccgcctggacgctgaccctgccggacggcgcggcggtgaccactaccgacggctggggcaatgtgctgcatgtgctgacgctggataacccgcacaaggagatcaccatccgcgccagcgggattgtcgatatcgccgacgaaggggaggagacgcgtgatgaagaggccgagctgctgtcgccgctggtttttctgcgctgtacgccgctaacccgcgccgatacggcgatccgtgagtttgcccagcgcctctatcgtcccggtgcggcggaagagagtctgaatcaactgatggcggatctgctgttaagaatgccatactcccccggcgcgacccaggtgcaggactccgccgccgacgccttcgcccgcgcgaagggggtgtgccaggatcatacccatgtttttctcgcctgctgccgcgcgctggagatcccggcgcgctacgtcagcggctatgtctacagcgataacgcccagcatgtggcgatgcatgcctgggcggaagtctggctcgacggccgctggctgtcgtttgatatcaccaataatacccgtcgcctgaatcagcatttacggctggcgaccgggctggattatctcgacgcctgcccggtacggggcacccggctgggcggcggcggggagattatgttaactaacgctgaagtgcgcgaacacagccagcaggcgcagcagcaataa

SEQ ID NO: 241357 - DNA, 360 bp, Klebsiella pneumoniae
gtgcgggaatactaccggctggataccctgctcaatgcggtcagcgcccgcgaagcctacaacagcctctaccgccagccggtcagtcgtgaaacggtgatggagctgctgatcctgcgcaacgatattccgcgttcgctgcgcgccagcattgccgacctggtgggcgagctggagaagatcgccaacgatcgctcctatcaaccgttgcgcctcgcccatcagctcaacgttgacctgcgcttcagcacccgtgacgacctggcgcaggcggacctgcagaccacccttaacgggctgctggcgagaattaacgcgctgtccgacagcatcagacaaacctacctggaggccttatga

SEQ ID NO: 241358 - DNA, 954 bp, Klebsiella pneumoniae
atgaaactcaccgacgtggcgattgtcgctgtagagggctttagcccgtttcactacgccgtcccctgcatgctgtttggcgattcggtttcggaaatcaaacgctttaatctgcacatttgcgccgagcggccggggctgctgcgcgcccgcgatggttttgcgctgtacgccaccggcgatttcgccgcgctggaacaggcggatatcgtggtggtgccttactggggcgaggtcgatcggcgtccgccgcaggcgctgcttgatagcctggtgcgggcccgggataacggcgcggagattgtcggcctgtgcctcggcgcgttcgtcctcggctacgccgggctgctggatggcaggcgagcggcgactcactgggagttcgagcaggatttccagcgccggtttccgcaggtgcagctggatatcaacgccctgtacgtcgacgaccagcggatcattacttcggcgggcaccgcggcggcgctggactgttgcctctacatcatccgccagcgtttcggcagcctcgcggccaaccagatcgcccggcggatgattgtttcgccgcaccgcgagggcggccaggcgcagtttatcgcccagccggtgccgaaaaacacccgcgatgcgcgaatcaactgcctgctggattatctgcagcagcatattgccgagccgcacagtctcgattcgctggcccgggtggtggcgatgagccgccgtaccctgacccgccacttcgcccgggcaaccgggatgagcattaccgactggctgaccgccgaacgtctgcgccgcagccagactctgcttgaggcgggcgatctgccggtcgagcaggtggcggaggcggtgggctatctttcagcggtcacctggcgccagcagtttaaagcgcgctttggcgtcagcccgacggaatggcggcgtacctttcgtcgcggcgcttag

SEQ ID NO: 241359 - DNA, 1050 bp, Klebsiella pneumoniae
atgctgatcaacgctattggtacctactccgccagccagccgctggaatcaatggccatcacccgccgcgacccggggccgcaggatgtacagatcgccatcgcttactgcggcgtctgccactccgatctccaccaggcgcgatcggaatgggcgggaacgctgtatccctgcgtgccggggcatgaaattgtgggtcgggtgaccgcggtcggcaacgccgtctcgcgctacgccgtcggcgatctggtgggcgtcggctgtatggtcgatagctgtcaacagtgcgaagagtgcgctgagggactggagaattactgcgaccatatggtgctgacctataacggcccgacccaggacgcgccgggacacacgcttggcggttattcacagcagatcgtggtcaatgaacgctacgtgctgcggataacccatcccgaagcgcagctggccgccgtcgcgccgctgctgtgcgccgggatcacgacatactcgccgctgcgccactggcacgtcgggccgggtaaaaaagtcggcgtggtcggcatcggcggcctcgggcatatggggatcaagttggcccacgccatgggggcccacgtggtggcctttaccacctccgaatccaagcgtaatgcggccagagcgctgggcgccgatgacgtagtggtgtcgcgcaatgaagacgaaatggcggcccacgtcaaaagcttcgatttcatcctcaacaccgtggcggcgccgcacaatctcgatgccttcaccacgctgctgaaacgtgatggcaccatgacgctggttggcgccccggccacgccgcatccgtcgccggaagtgttcaatctgatcttccgccgccggtcgattgccggctcgatgatcggcggtattccggaaactcaggagatgctcgacttctgcgccgaacacggcatcgtcgccgatatcgaattgatccgcggcgatgagatcaacgaagcctgggaaagaatggtcaagggtgacgtgaaataccgcttcgtgatcgacagtgcgaccctcgccggctaa

SEQ ID NO: 241360 - DNA, 351 bp, Klebsiella pneumoniae; identical to SEQ ID NO: 203668

SEQ ID NO: 241361 - DNA, 276 bp, Klebsiella pneumoniae; identical to SEQ ID NO: 78807

SEQ ID NO: 241362 - DNA, 249 bp, Klebsiella pneumoniae; identical to SEQ ID NO: 168646

SEQ ID NO: 241363 - DNA, 864 bp, Klebsiella pneumoniae
atgatgagcacctcagaatggggaaggttcggcttcggcattatcgcgatactggccttcatcgcactgttaaccggcctctgcgagctactgttccaccgggcgctaaaaatgcaccccgccatgcgcgatctgttggcgaagatggcgcaggcccgccgccgcgacttttccttttgccagccgctaccgactacggcgcaaaccctccgccagtcggcgaagccttttacgcaagccctgccggaacgctatgccgtccggacgggaaaaattagcaatatcatttttaagaaatggttcgcggggaacccaacgcgggaataccatggcgttgggatacaatgcgacacggcgccgctggccttcttctggcagaacggcttcgccaacttcggcctgcatccctttttttaccgccgtcaaccgccctttctcgctatcggcgatcggatagtcgtcgtctaccaacggaaagataacgacgtccaggcgttatacaacgtcagcgacgggtgcgcttttctgaaaaatcatccctgttatcccggtgaccggcaaatgtcgctagtctataacctgttttatggcatggtgctggtgatgtacctcctcatactcggcatgtcgctaaataacccatacaaaccagccaggggatttgggtggttaattcaggattcactggacatgctgtccctattattactcagtttcggcgggatcctggcggtactggagctgattggcccgacggcctggttattgtcacaccgggtggctgactggatgaagatgcgctcggcgatgcggcactacctgcagggagcggcccgccataccgcgctcgaggagatcatgtaa

SEQ ID NO: 241364 - DNA, 693 bp, Klebsiella pneumoniae
atgaccgccattccccaggcgacggccattgacggataccgttggttaaaaaacgacatcatccgcggggtttaccaccccgatgagaagctgcggatgagcctgctgacgtcgcgctatggcctgggggtcggtccgctgcgcgaggcgctttcgcaactggtggccgagcggctggtaacggtggtcaatcagaaaggctatcgggtggcgcccatgtcggaacaggagcttctcgatatcttcgacgcgcgcgccaacatggaggccatgctggtgcgtctcgccattgaacgcggcggcgacgagtgggaagccgagctgctggcccgcacccatctgctcaacaagctggagtcgtgcgaagcgagtgagcacctactcgatgaatgggaccagcgccatcaggcgtttcacaccgccatcgtcgccggctgcggttcgcagtatctgctgcagatgcgcgaacggctgttcgatctggcggcgcgctaccgcttcatctggctgcgcaccaccgtgctgtcggtggagatgctggaagataagcatgtccagcatcagaccctggtggacgctattctggcgcgcgacgccgaacaggccagcgcgctgatgcgtgagcacttactgactccgatcccgattatccagcaggcgatggccggcaagctgtcgccgcaggcagggtga

SEQ ID NO: 241365 - DNA, 1401 bp, Klebsiella pneumoniae
atggggcaactgtcgcaatcacaggatttaggggcggggctgaagtcgcgccacgtcacgatgttatctatcgccggggtgatcggcgcgagtttatttgtcggctccagcgtcgccattgccgaggcaggcccggcggtgctgctggcctatctgtttgccgggctgctggtggtgatgattatgcgtatgctggccgaaatggcggtcgccacgccggatactggctccttttccacctacgccgataaagccatcggccgctgggcggggtataccatcggctggctatactggtggttctgggtcctggttattccgctggaagccaatatcgcggcgattattctgcattcgtgggtgccgggcgtcccggtgtggttgttctccctggtcatcactctcgccctcaccggcagtaacctgctgagcgtcaagaactacggcgaattcgagttctggctggcgctgtgcaaagtgatcgctattctggcgtttatcgtactgggcgcggtcgccattaccggcttttatccctatgccgaagtgagcggcatttcgcggctgtgggatcacggcggctttatgcctaacggcttcggcgcggtgctgagcgcgatgctgatcaccatgttctcgtttatgggcgcggagatcgtcaccatcgccgccgccgaatcggataccccggataaacatatcgtgcgcgccaccaactcggtgatctggcgtatctctattttttatctgtgctcgatctttatcgtcgtcgccctcatcccatggaatatgccggggctgaagagcatcggctcctaccgctcggtgctcgagctgctgcatattccctatgccaagctgattatggacggcgtgatcctcctgtcggtcaccagctgtctgaactcggcgctgtataccgcctcgcggatgctctactccctgagccgtcgtggcgatgcgccggccattatgggccggaccaaccgcagcaaaacgccatacgtggcggtgctgctctccaccggcgcggcgttcctcaccgtagtggtgaactactatgcccccgccaaggtgtttaaatttctcatcgacagctctggcgctatcgccctgctggtctatctggtgatcgccgtttcacaactgcggatgcgcaaaatccttcaggcgcaaggcggtgagatccgtctcagaatgtggctctatccatacctgacctggctggtgatcgcctttatcaccttcgtgctggtggtgatgctgtttcgtccggcgcagcagctggaggtgatctctaccggcctgttagctctgggaattatttgtacggtaccgattatgtcacgctggaaaaagctggtattgtggcaaaaactgccgctgcaaaatacgcgttaa

SEQ ID NO: 241366 - DNA, 570 bp, Klebsiella pneumoniae
gtgaaacgactgattattggcatttccggcgccagcggcgccatttacggcgtgcggatgctgcaggtgctaagagatgtgccggatattgaaactcatctcatcctcagccaggcggcgcgccagacgttggccatggagaccgactactccgtacgggaggtgcaggcgctagccgatgtggtgcatgacgcccgcgatatcgccgccagtatctcttccggttcgtttaaaaccgccgggatggtgattttaccctgctcaatgaagacgctctcgggcattgtccatagctatacggatggcctgctgacccgggcggcggatgtcgtgctgaaagagcgtcgtccgctggtgctctgcgtgcgggaaacgccgttccatttgggccatctgcgtctgctggttcaggctgcagagctgggggcggtgataatgccgccggtaccggctttttaccaccggccacaaagcctggacgatgtcatcaaccagaccgtcaatcgggtactcgatcaatttgatattagtctggagcacgacttgtttacccgctggcagggggcctag

SEQ ID NO: 241367 - DNA, 543 bp, Klebsiella pneumoniae
gtgaagaaccgctacgtcggccggacgtttatcatgcccggtcagcagctgcgtcgtaaatctgttcgccgtaagctcaacgccaaccgtgcggaattccgcgataagaacgtgctgctggtcgatgattccattgtacgcggcaccacctcggagcagatcattgagatggcgcgtgaagcaggggcgaaaaaagtgtatctcgcctccgctgcgccggaaattcgtttcccgaacgtgtacggtatcgatatgccgaccgccaacgaactgatcgcccatggccgcgaagtggatgagatccgccagatcattggcgccgacggcctgattttccaggatctcaacgatctgatcgacgcggtgcgcgcggagaacccggatattcagcagtttgaatgctcggtgttcaacggcgtatatgtgacccgggatgtcgaccagcagtacctcgactatcttgactccctgcgtaacgatgatgccaaagcggtccagctgcagaacgaagtcgaaaacctcgagatgcacaacgagggttaa

SEQ ID NO: 241368 - DNA, 720 bp, Klebsiella pneumoniae
atggtcattaaggcgcagagccctgcgggtttcgcggaagagtacatcattgagagtatctggaataaccgcttccctcccggatcgattctccccgctgaacgcgagctttctgagctgatcggtgtcacccgcacaaccctgcgcgaagtattgcagcgtctggcccgtgacggctggctgactattcagcatggtaagcccactaaagtgaataacttttgggaaacctccggcctgaatatcctcgaaacgctggcgcgcctcgatcacgacagcgtaccgcagctgattgataatctgctctccgtgcgcaccaacatttccacgatttttatccgcaccgcgtttcgccagcatccggataaagcgctggcggtcctggacagcgcccgggaggtggaggatcacgccgacgccttcgccgagcttgattataatattttccgtggtctggcgttcgcctccggcaacccgatctacggtctgatcctcaacggcatgaaggggttgtatacccgcatcggccgccactatttctccagcccggaagcgcgcagcctggcgctcggtttctatcatcagctggcgaaagtgtgtgaggctggcctgcatgaccaggtttacgagctggttcgtcgctacggccatgacagcggcgagatctggcaccggatgcagaaatcgctgcccggtgatttagccatgaatatgcgttaa

SEQ ID NO: 241369 - DNA, 996 bp, Klebsiella pneumoniae
atgaactacggcgtcgaccgctataaacgtccgcaaaaaatctctctgcaggaggagaaagcgcggcagaaaagccgggaagagtatctgcaaagccaggtgaatatgctgtggcgcaccctgccgaagcgcgaggaagaaaaagcgattgaatccgctcgtcgctacccctccgaaccgcaggagaacctgctgtactttatggagaagaacgccccgctgctcgaaccgtggcagcgcgagatcctgcgcatcgtgcgtaaagtcagccagtatttctacccgcagaaacagacccaggtgatgaacgaggggtgggccaccttctggcactacaccatcctcaaccatctctacgatgaagggaaagtgactgagcgctttatgctggagtttctccacagccataccaacgtggtgttccagccgccgtacaacagtccgtggtacagcgggattaacccctacgcgctgggcttcgccatgttccaggacatcaagcgcatctgtcagtcgcccacggaagaggataagtactggttccccgatatcgccggttctgactggctggaaacgctgcatttcgccatgcgcgactttaaggatgaaagctttatcagtcagttcctgtcgccgaagatcatgcgcgatttccgcttctttaccgtgctcgacgacgatcacaacaattatctggagatctcggcgattcacaacgaagagggttatcgcgagatccgcaataagctctccgcgcagtataacctcagcaatcttgagccgaacatccaggtgtggaacgttgacctgcgcggcgaccgatcgctgaccttgcgctatgtgccgcacaaccgcgtcccgctggacaaaggccggcgcgaagtgctgaagcatgtgcatcgtctgtgggggttcgatgtgctgctggagcagcagaacgccgacggcagcattgagctgttggaccgctgcccggcgcggccgaacgcgctatag

SEQ ID NO: 241370 - DNA, 1014 bp, Klebsiella pneumoniae
atgggtatcattatttgcctgcggttcggtatccgaatcggagtcggagtcgctgtcagaatccgaatcactgtcagaatccgagtcgctgtcggagtcagagtcgctatcggaatccgaatcgctgtcagaatccgaatcgctgtcggagtcggaatcgctgtcagaatccgaatcgctgtcggagtcggagtcgctgtcggagtcggaatcgctgtcagagtccgagtcgctgtcggagtcagaatccgaatcgctgtccgaatccgagtcactgtcagagtcagaatcgctgtcagaatccgagtcgctgtcagaatccgagtcgctgtcggaatcagagtcgctgtcggagtcagagtcgctgtcggaatccgagtcgctgtcgctgtcggagtcagagtcgctgtcagagtccgagtcgctgtccgagtccgagtcgctgtcggagtccgagtcgctgtcggagtcgctgtccgagtcagaatcgctgtcggaatccgagtcactgtcagagtcggaatcgctgtcggaatccgaatcactgtcagagtccgagtcgctgtcggagtcgctgtcagaatccgaatcgctgtcagaatcggagtcgctgtcggaatctgcatcagcatccgactcaccgatatcacttcctgccacgatattaatcgtcagcgtagccgtcgccgtatcaccatccgcatccactatcgtgtaggtaaagatatcggcctggccaacagcatccgcatcgccagtcgccttgtaggtatagctgccgtccgcatggatcgtcagctgaccgtaaagaccatttatcacaacacctgcagccgtcacatcaagcggcgtggtctgcacgctggaggcgattttgcttaccgtaatgccatcaccggtgtctgctacatcaccccctgcatccgcaaccagcacattgccggcaattgccgtcgaggtgtactgcgtagaatccgtgattgtcgcctgggcaaccgacagcagatttgctga

SEQ ID NO: 241371 - DNA, 267 bp, Klebsiella pneumoniae
atgaccggtatggaccagcatgaacaggccattattgctcatgaaaccatgacgaacggctcggcggatgctcaccagaaaatggtggaaagtcatcagaagatgatgggaaataacacggtatccacgaccgtcccgtcaacgtcttacgcggcgatgaatgagcatgaaagagcagcggttgctcatgaattcatgaataacgggcaatccggcccacatcaggccatggccgaagcgcaccgccgcatgatcaatgcaggctga

SEQ ID NO: 241372 - DNA, 720 bp, Klebsiella pneumoniae
atggtcattaaggcgcagagccctgcgggtttcgcggaagagtacatcattgagagtatctggaataaccgcttccctcccggatcgattctccccgctgaacgcgagctttctgagctgatcggtgtcacccgcacaaccctgcgcgaagtattgcagcgtctggcccgtgacggctggctgactattcagcatggtaagcccactaaagtgaataacttttgggaaacctccggcctgaatatcctcgaaacgctggcgcgcctcgatcacgacagcgtaccgcagctgattgataatctgctctccgtgcgcaccaacatttccacgatttttatccgcaccgcgtttcgccagcatccggataaagcgctggcggtcctggacagcgcccgggaggtggaggatcacgccgacgccttcgccgagcttgattataatattttccgtggtctggcgttcgcctccggcaacccgatctacggtctgatcctcaacggcatgaaggggttgtatacccgcatcggccgccactacttctccagcccggaagcgcgcagcctggcgctcggtttctatcatcagctggcgaaagtgtgtgaggctggcctgcacgatcaggtgtatgagctggttcgtcgctacggccatgacagcggcgagatctggcaccggatgcagaaatcgctgcccggcgatttagccatgaatgtgcgttaa

SEQ ID NO: 241373 - DNA, 693 bp, Klebsiella pneumoniae
atgaacgaggggtgggccaccttctggcactataccatcctcaaccatctctatgatgaagggaaagtgaccgagcgctttatgctggagtttctccacagccacacgaacgtggtcttccagccgccgtacaacagtccgtggtacagcgggattaacccctacgcgctggggttcgccatgttccaggacatcaagcgcatctgccagtcgcctaccgaagaggacaagtactggttcccggatatcgctggttccgactggctggaaacgctgcatttcgccatgcgcgacttcaaggatgagagctttatcagccagttcctgtcgccgaagatcatgcgcgatttccgcttctttaccgtgctcgacgacgatcacaacaattatctcgagatctcggcgatccacaacgaagagggctatcgcgaaatccgcaacaagctctcggcgcaatataacctcagcaatctcgagccgaatatccaggtgtggaacgttgacctgcgcggcgaccgctcgctgacgttgcgctatgtgccgcacaaccgcgtcccgctggacaaagggcggcgcgaagtgctgaaacatgtgcatcgtctgtgggggttcgatgtgctgctggagcagcagaatgccgacggcagcattgagctgctggaccgctgcccggcgcggccaaacgcgctatag

SEQ ID NO: 241374 - DNA, 978 bp, Klebsiella pneumoniae
atgcaacctaaccgcgtcgcccgcattctgggtattgaaaaaccggtggtccaggggcccctctcctggctaaccgatgctcgtctggtggcggccgtcggcaacgccggtgggcttggcgtgctgggcccgaacgccggactgacggcggcaaccgccgtctccaccccggaggccaccgccgagaaaatgcgcgaagagatccgcaaaaccaaacagctgacggagaaaccctttggcgtcaacctgatcccgacggcggaaaatgacatctggacgccggcgatcctcccggtgatcaaagaggaaggggttaaggtggtggtctacaccggctacggcgacggttcgttaaaaccggcgctgttcgacgaactgaaagccgccgggatcaccattatctatcgtgacatcaacccgacgccggagaacagccgccgcgcggagcaggccggagcggatattattgtcgccaccggctttgacgaaggcggcacgctgccgggtaccgccctcgggaccttcaccatcgtcccgctgatcgttgacgcggtacagcgggttccggtgatggccgccggagggatcaccgacgcccggggcgcgcgcgccgttcatgccctgggggcggagggcgtcttcgccggttcggtatttatcagcaccatcgaaagccgggttcccgactcggtgaaagcgaaaattgtggccgccaacggtctggatctgcgcctgttccgtaccctaccggactactaccgcgcgctgcccggcaaactgagcgacacactggtggccatggatcgtgccggcgcctcaaaagccgagctggcccaggcgatgggcgggctgcgcgggatgcggctgggcatgctggaggggaataccgatgagggatatatctcggtgggcgcggggatcggcaacatccatgccatcacctccgtcgccgaggtggtcaaccagctggcggtgtaa

SEQ ID NO: 241375 - DNA, 930 bp, Klebsiella pneumoniae
gtggtccagcgtctgcaccagcaggggcgacggctggcgaaggcaatcgagatcgtcggctttggcgatgaagagggcacccgctttggcattaccctgctcggcagtcgcggcgtcaccggcacctggcctgaaagctggctgtcacagtgcgataccgacggggtgagcgtcgcccaggcgctggtgaatgccggactcgatccggcgcggatcgcccacgcggcccgtcacccgcgggatatcgccgcctatctggaactgcatatcgagcaggggccgtgcctggagcaggcggggctggcgctcggcgtggtggaggcgattaacggcgccagacggctgaactgccgttttaccggcgaagctggccatgccggcacggtgccgatgcttcatcgcaaggacgccctcgccgcggcggcggaatggatggtgcaggtggaaaacctgacccggcagcgcggcggtaacctggtggcgacggtcggcaccctgcgctgtgcgccgggcgcggtgaacgtgataccgggcgaggtgcagttgacgctggatattcgcggcccgcaggatgcgccgctgacggcgctgctggaggaactgctggggcaggcgcaggccattgccgggcgccgccagctgagtttcgccgccgaggagtattatcgcatcgccgccaccgcctgcgacagtcacctgcaggcggtgctgagcgaggcggtggtggcggtgcaggggcgttccctgacgctgccgagcggcgcagggcatgatgctatcgccatcgccgagcgctggccatcggcgatgctgtttgtgcgttgcctggggggcgtcagccatcacccggcggagtcggtcaccgccgccgacgtcgggctggctatcgacgctttctcccgggcggtagagaaggtggccgacgcctga

SEQ ID NO: 241376 - DNA, 618 bp, Klebsiella pneumoniae
atgcgccagggcttttttgctgtacagcagacctgtccgcactgccagggacgcggtacgctaattaaagatccgtgcaataaatgtcatggccatggccgcgtagaaaaaaccaaaaccctgtcggttaaaattccggcgggcgtggataccggtgaccggatccgtctggcgggcgaaggcgaggccggcgaacatggcgcgccggcaggcgatctgtacgttcaggttcaggtgaagcagcacgctatctttgaacgtgaaggcaataacctgtactgcgaagttccgatcaacttcaccatggcggcgctgggcggtgagatcgaggtcccaacgctcgacggccgcgtgaacctgaaaattccaggtgaaacccagaccggcaagctgttccgcatgcgtggaaaaggcgtgaaatccgttcgcggcggcgcgcagggcgatctgctgtgccgcgtggtggtggagacgccggtggggctgaatgagaagcagaagcagctgctgaaagagctgcaggagagcttcggcggtccgaccggggaaaacaacagcccgcgttcgaaaagcttctttgacggcgtgaagaagttcttcgacgacctgacccgctaa

SEQ ID NO: 241377 - DNA, 618 bp, Klebsiella pneumoniae
atgcgtcagggcttctttgcggtacagcagacctgtccgcactgtcagggacgcggtacgctgattaaagatccgtgcaataaatgtcatggtcacggccgcgttgagaagaccaaaaccctgtcggttaaaatcccggcgggcgtggataccggagaccggatccgtctggcgggcgaaggtgaagccggcgagcatggcgcaccggcaggcgatctgtacgttcaggtccaggtgaagcagcacgctatctttgagcgtgaaggcaacaacctgtactgcgaagtgccgatcaacttcaccatggctgcgctgggcggcgagattgaggtcccgacgctcgacggccgcgtcaatctcaagattccgggcgaaacccagaccggcaaactgttccgcatgcgcggcaaaggcgtgaaatccgttcgcggcggcgcgcagggcgatctgctgtgccgggtggtggtggagacgccggtggggctgaacgagaagcagaagcagctgctgaaagagctacaggaaagcttcggcggcccgaccggggaaaacaacagcccgcgttcgaaaagcttctttgacggtgtgaagaagttcttcgacgatttgacccgctaa

SEQ ID NO: 241378 - DNA, 927 bp, Klebsiella pneumoniae
gtgtttcggaccggtcgcatctgcagtgatgtacggcaggttaacgtcggtctgctgagcagaagacagttcaatcttcgctttctcagcggcttctttcaggcgctgcatggccagcgggtcgttgcgcaggtcaatgccctgatctttcttaaattcatcaacgaggtagttgatcagacgggtatcgaagtcttcgccgcccaggtgggtatcaccgttggtcgccagaacttcaaaggttttttcgccatcaacttcgtcgatttcgataatcgagatatcgaaagtaccaccaccgaggtcgtaaaccgcgatagtacggttgcccacttctttatccagaccgtaagccagcgcggccgcggttggttcgttgatgatacgtttgacttccagaccggcgatacggccggcatctttggttgcctgacgctgcgcatcgttgaagtaagccggtacggtgataaccgcttcagttaccggttcacccaggtaatcttcagccgttttcttcatttttttcagcacttcagcagagatctgcggcggtgccgttttggtgcctttcacatccagccatgcgtcgccattgtctgcggcaacaattttgtatggcatgatagaaacgtcacgctgaacttcttcgtcctggaagcggcggccaatcaggcgtttaatcgcaaacagggtgttttgcgggtttgtcactgcctgacgtttagccggctgaccaaccagagtttcaccatcctgggtataggcaatgatagaaggcgtggtgcgatcgccttcggcgttctccagcacgcgtgcagtagtgccatccataatcgctacacaagagttggtagtacccaggtcgataccaataattttacccatctaaacgtctccactaaaaattcgatcaacatgtggttgtga

SEQ ID NO: 241379 - DNA, 630 bp, Klebsiella pneumoniae
atggtcgccctggttgcgggtctgtaccagctcttcgaacttacggtcagattcggcgttagcttccgcttcgcgaaccattttctgaatttcttcttcattcagaccggaagacgctttgatggtgatcttctgctctttaccgctgtttttgtctttcgcggagacgtgcaggataccgtcagcatcgatgtcaaaggtcacttcgatctgcggcatgccgcgcggcgccgggttaataccatccaggttgaactgacccagagatttgttatcagacgcgcgtttacgctcaccctgcagcacatggatggttaccgcagactggttgtcttcagcggtagagaacacctggctgtgcttggtcgggatggtggtgtttttgctgataagcgcagtcatcacgccgcccatggtttcgatacccagcgacagcggggtcacgtcgagcagcagaacgtctttcacatcgccagtcagtacaccgccctgaacggcagcaccgatcgccacggcttcatccgggttaacgtctttacgcggttctttaccaaagaactcggccactttcttctgcaccatcggcatacgagtctgaccaccaacgaggatcacgtcgttgatatctga

SEQ ID NO: 241380 - DNA, 513 bp, Klebsiella pneumoniae
gtgagtttctccgcggcgacggcgatggcccgtgagatggggtataccgagccggatccgcgcgacgatttatccggggtggatgtggcgcgtaaactgctgattctggcccgtgagaccgggcgtgaactggagctggcggacattatcgtcgagtcggcgctgccgccggacttcgacgccagcggcgatgtcgagacctttatggcccgcctgccgtcgctggacgatgggttcgcttcgcgggttgctaaggcgcgcgatgaaggtaaagtcttgcgctacgtcggtaacatcgaagaggatggtacctgccgggtgaaaattgccgccgttgacggcaacgatccgctgtacaaagtcaaaaatggcgagaacgcgctggccttttacagccactattatcagccattgccgctggtgctgcgcggctatggcgccgggaacgacgtcacggcggccggcgtattcgccgacctgctgcgcaccctgtcctggaagttaggagtttaa

SEQ ID NO: 241381 - DNA, 930 bp, Klebsiella pneumoniae
atggtcaaagtatatgccccggcttccagtgccaatatgagcgtcgggtttgatgtgttgggcgcggcggtcacgccggtcgatggcacgctgcttggcgacaatgtcactgtcgaagcggcggagcaatttagcctgcagaatcttggacgcttcgccagcaaactgccgacggcgccgcaggagaacattgtttaccagtgctgggaaagcttttgccgggagatcggcaagacggtgccggtggcgatgacgctggaaaaaaacatgccgattggttccgggctgggttccagcgcctgctcggtggtcgccgcgctggtggcgatgaacgagttttgcggtaagccgctgaacgagacgcgcatgctggcgctgatgggggagatggaagggcgtatctccggcagcattcactacgacaacgtggcgccgtgctatcttggcggcatgcagttgatgatcgaagagaatgggattatcagccagcaggtgcccgggtttgatgagtggctgtgggtgctggcctatccggggattaaagtctccaccgccgaagcgcgggcgattctgccggcgcagtaccgccgtcaggattgtatcgcccatggtcgccacctcgcgggctttattcatgcctgctacacccgccagccgcagctggcggcaaaattgatgaaagatgtgattgccgaaccgtaccgaaccaaactgctgccgggctttagcgaagcgcgtcaggcggccatggagatgggcgcccaggcttgcggcatctccggctctggcccaacgctattcgcgttgtgcgataagccggacaccgcacagcgcgtcgccgactggcttggcgcgcactatctacagaatcaggaaggctttgttcatatttgccggctggatacggcgggcgcacgcgtagtgggataa

SEQ ID NO: 241382 - DNA, 1293 bp, Klebsiella pneumoniae
atggcttctttaaagataaaatatgctgcaataattatcagcagcctcatagcaggggggctgatatcggttactgcctggcagtatgtaaactcatcacaaaaaacagtacaaaccgaacaaaaggcaccggagcgaaaggtacttttctggtatgacccgatgaaaccggataccaaatttgataaacccggaaaatctccctttatggatatggacctggtgccgaaatatgctgatgaaagtggcgataaaagcagtggcgggatccgtatcgatccaacgcaggttcagaatctgggattaaaaacgcaaaaagtcacgcgaggaatgctgaattattcccagacaatcccggctaatgtcagttacaacgagtatcagtttgtcattgtgcaggcgcgctctgacggtttcgtcgaaaaagtgtatcccctgacgattggcgatcatgtgaagaaaggcactccgcttatcgatatcaccattcctgaatgggttgaggcacaaagtgagttcctgctgttatccggtacaggcggtacgtcaacccagataaaaggggttctggagcgacttcgtctggctggtatgccggaagaggatattcaaaggctgcgttcaacccgcacaatccagacccgttttaccattaaagcacctattgatggtgtcattactgcgtttgacctgcgcaccggcatgaatatttcgaaagataaagtagtggctcagattcaggggatggacccggtctggatcagcgctgcagtgccagaatctatcgcatatctgctgaaagatacgtcgcagtttgaaatttcggtaccggcttatccggataaaacattccatgtcgaaaaatggaacattcttcccagcgtggatcagacaacccgtacgcttcaggtccgtctccaggtttctaataaggatgagtttctcaagccgggcatgaatgcctatctgaaactgaataccaagagccaggagatgctgctgataccaagccaggccgttatcgataccggcaaagaacagcgcgtgattactgttgatgatgaaggcaagtttgtgccgaaacagatccacgttctgcatgaatcacagcaacagtccggcatcggttccggcctgaatgaaggcgataccgtggtggtcagtggcctgttcctcattgactccgaagccaatattacgggcgcgctggaacgtatgcgccaccctgaaaaaacagaaagcagtatgccagcaatgtctgaccagcctgtaaatatgcattcagggcactga

SEQ ID NO: 241383 - DNA, 219 bp, Klebsiella pneumoniae
atggttcaaatcaaaacagataaacatcccaagctcattcgtttacctgaggtaatgaacagaactggattcgggaagacatggatatatgagcttattaaagcgggttgctttcccgcacagataaaaacaggtgtaagagcaatcgcctttattgaaagtgaggtggatgcgtggattgaacgagctattcagacatcacgaaaacaagcagtttaa

SEQ ID NO: 241384 - DNA, 315 bp, Klebsiella pneumoniae
atgccagcccgcggctttggcgataatcaagttttgcggctcgccgaccatggtcatgacgccgccgagcgcggtcccgacgccggcgtgcatcatcaggctgcgcagaaagccgcggaactgctccagaacctcgcgatagtgctgctcgatatggctgtcatcgagcaggtcgctatcgtccgggcgcgccgaggcgacgcggtgatagatgccgtagaacccgacggcgacgctgatcactaccgccaccaccgtcagcgcatcgagaaaggccgagaggaaggctgccgccaggcagaaggccagcgatag

SEQ ID NO: 241385 - DNA, 453 bp, Klebsiella pneumoniae
atgttcgagcgccgctttcgcttcgttgatgtagaccgtgccgacaaacacgttatccgaaatggacgacagcaggccgttgaacagataaaacagcgacagctgcgcgtgcggcgaggcctgcaggacaaactcgatcaccggcgtgaacagctgctgatcgatgataaccgcgacgatggagaagaagaccgtcagcagcgcggtaaagggcagcgcctcggtgaacgccttgccaatggcgtgctcatcggtaacgccggtaaaggtggtggcgaggatgatcaccgacaggccaatcaggccgacctcagccaggtgaaaagccagggccacgatcagccaaacgccaatgagcgcctgggcaatcagccgcagtcgctcctgacggctgcgctgggcgcggctgcgatcgtcaaactcctgcagcaccttgcgcaccgtcggcggtag

SEQ ID NO: 241386 - DNA, 378 bp, Klebsiella pneumoniae
atgctcgagggcggttttcgcttcgttgatgtagaccgtgccgacaaaaacgttatccgagatggacgacagcaggccgttaaacagataaaacagcgacagctgcgcgtgcggagaggcctgcagaacaaactcgatgaccggcgtgaacagctgctggtcgatgatcaccgccactacggcaaagaacaccgtgagcagcgcggtgaagggcaacgcctcggtgaacgccttgccaatcgcgtgctcatcggtcaccccggtaaaggtggtggcgaggatgatcaccgacaggccaatcaggccgacctcagccaggtgaaaagcgagggcgacgatcaaccaaacgccaatgagcgcctgggcaatcagccgtag

SEQ ID NO: 241387 - DNA, 744 bp, Klebsiella pneumoniae
gtgatccgcctggcgggctcgcttaccccgcgtgcgacgcgactggcgcatgaggcggggctggacgtcgcgccattgggtaaaattccccatctgcgcaccccggggctgctggtgatggatatggactccacggcgatccaaattgaatgcatcgatgagatcgcgaaactggccggcaccggcgagctggtgtcagaagtgaccgagcgggcgatgcgtggcgagctggacttcaccgccagcctgcgccagcgcgtggcgacactaaaagacgccgatgccaacattctgctgcaggttcgcgacgcgctaccgctgatgccgggcctggcgcagctggtgctcaagctggaaacgctgggctggaaggtggcgatcgcctccggcggctttaccttctttgcggagtatctgcgcgacaaactgcatctcgacgcggtgttcgccaacgaactggagatccgcgacggtaagcttaccggcaacgtgctcggcgatatcgtcgatgccaaatacaaagccaatacgctgcgcaagctggcggaaaagtatgagatcccaacggcgcagaccgtggccatcggcgatggcgccaacgacctgccgatgattaaggctgccgggcttggcatcgcgtatcatgcgaagcctaaagtgaatgaacaggcggaagtgactatccgccacgctgacctgatgggggtattctgtattctctcgggcagcatgaaccaaaagtaa

SEQ ID NO: 241388 - DNA, 585 bp, Klebsiella pneumoniae
gtgaaacgactgattattggcatttccggcgccagcggcgccatctatggcgtgcggatgctgcaggtgctgcgggatgtgccggatattgaaacccatctgatcctcagtcaggcggcgcgccagacgctggcgatggagaccgactttaccgtgcgtgaagtgcaggcgctggctgatgtggtgcatgatgcccgcgacatcgccgccagtatctcctccggctcgtttaaaaccgccgggatggtgattttaccctgctcaatgaaaacgctctcgggtattgtccatagctacacggatggtctgctgacgcgggcggcggatgtggtgctgaaggagcgtcgtccgctggtgctctgcgtgcgggagactccgttccatcttggccatctgcgactgctggtgcaggctgcggagctgggggcggtgattatgccgccggtgccggccttctaccatcggccgcaaagcctggatgatgttatcaaccagaccgtcaaccgggtactcgatcagttcgacattagcctggaacaagacttatttacgcgctggcaagggtcacaggattgcaccaaatag

SEQ ID NO: 241389 - DNA, 483 bp, Klebsiella pneumoniae; identical to SEQ ID NO: 241333

SEQ ID NO: 241390 - DNA, 744 bp, Klebsiella pneumoniae
gtgatccgcctggccggttcgctgactccccgtgcgacgcgactggcgcatgaggcggggctggacgtcgcgccattgggtaaaattccccatttgcgcaccccgggcctgctggtgatggacatggactccacggcgattcagatcgaatgcatcgatgagatcgcgaaactggccggcaccggcgagctggtctcggaagtgaccgagcgggcgatgcgtggcgagctggacttcaccgccagcctgcgccagcgcgtggcgacgctgaaagacgccgatgccaacattctgctgcaggttcgcgacgcgctgccgctgatgccgggcctggcgcagctggtgctcaagctggaaacgctgggctggaaagtggcgatcgcctccggcggtttcaccttctttgccgagtatctgcgcgacaaactgcatctcgacgcggtattcgccaatgagctggagatccgcgacggcaagctcaccggcaacgtgctcggcgatatcgtcgatgcgaaatataaagccaatacgttgcgcaagctggcggaaaagtatgagatcccaacggcgcaaaccgtggctatcggcgatggcgccaacgacctgccgatgattaaggcagcagggcttggcatcgcctatcacgcgaagcccaaagtgaatgaacaggcggaagtgactatccgccacgctgacctgatgggggtattctgtattctctcgggcagcatgaaccaaaagtaa

SEQ ID NO: 241391 - DNA, 453 bp, Klebsiella pneumoniae
atggcgcagctcatcgccggcgttgagcaggttctgcaggttctcaatcaccggcaggcccgcgccaacgttagtgtcatagaggaacttacgccgcgagctgctggccgcatggcgcagctggtgatagtaatccagcgaagaggtattggcctttttgttcggcgtcaccacatggaaaccttcgcgcaggaagtcggcatactgatcggcgaccgcctggctggaggtacagtcgacgatcaccggattgagcaggtggtactctttcaccaggcggatcaggcggccaagattaaacggctctttcgcctccgccagttccgcactccagttttccagattcaggccatgcacgctggtcagcagcgcctgagaattggctacaccgcagacgcgcagatcgatatgtttgttcttcagccacccctgctggcgcttgatctgctctag

SEQ ID NO: 241392 - DNA, 1314 bp, Klebsiella pneumoniae
gtgcgcaaatttagccgcagtctgaaaaaaagcctgcacccgcagccgggcggtttaacctcttttcaggcgttatgtaccagtcttgccgccagggttggcagcggtaatcttgccggcgtcacgctggccatcgccgccggcggacccggagcggtattctggatgtgggtctccgccctgctcggcatggccagcagcttcgccgaatgttcccttgcccagttgtataaagaacgcgatagccgcggtcagttccgcggcggcccggcctggtatatggcgcgcgggctcggcatgcgctggatgggcgttctgttttcgatcctcctgctgctggcctatggctttatcttcaataccgtgcaggccaactccgtggctcatgccctgcgctatgcgttcgatctaccggcggcggtcagcggcggcgtgctggcggttgtcgttctgctggccatcctccgcggtttacgcggcgtggcgcgcctgatgcagtggatagtgcccatcatggcgctgctatggatcgccaccagcctgcttatcggcctgtggcatatcaccgccctgccgacgattttcgccaccatctttcgctgcgccttcggctggcaggaagccgccgccggcgcggtgggctacaccatcagccaggcgctgaccagcggctttcagcgcggcatgttctccaatgaagcagggatgggctcttcgcctaacgccgccgcagccgccgcctcatggccgccgcacccggcggcgcagggtatcgtgcagatgataggcgtgtttatcgataccatcgtgatctgtaccgccagcgcgattatcgtcatgctggcgccgcggcccgacaatgaatatacgctcaatggtattcaggacttgcaacacgcgatgagcgtgctggtcggcggctggggagcggattttatcgccctcatcgtgctgctgttcgcttttagctctatcgtggccaactacgtgtatgcggaaaataatctgatctttctgcatctggataagccgcgttatatctggggtctgcgaatactcaccgtcctgatggtgctgttggggaccctggttagcctgccggtcgtctggcagagcgcggatatcattatggcgctgatggcgatgaccaacctgacggccatcctgctgctctccccgacggtgcgaattatcgccagtgattatctgcgtcagcgccagctgggcatccagcccacttttgatgcatcgcgctatcccgagattcaccagcagctggccccgggcgcgtggaatgaactgccgcgcgaataa

SEQ ID NO: 241393 - DNA, 678 bp, Klebsiella pneumoniae
gtgggtaatcgccaccacggtgccttcgaagtcgtgcaggaagcgttccagccaggcgacggactcggcgtcgaggtggttagtcggttcgtcgagcagcagcatatccggtttttccagcagcaggcggcacagtgcgacgcggcggcgttcaccaccggaaagattagcgattttcgcatcccagtccggcaggcgcagggcgtcggccgcgcgctccagctgcacgttcaggttgtggccgtcgtgcgcctggataatctcttcgaacttgccttgctgtgcggcaagcttatcgaagtccgcatccggctcggcgtatttggcatagacttcgtccagccccttcagcgcgttaaccacttcggcgaccgcttcttccacggactcgcgcacggtgtgctccgggttgagctgcggctcctgcggcaggtagccgattttgatgccgggctgcggacgcgcttcaccttcgatctcggtgtcgataccggccatgatgcgcagcagggtagatttaccggcgccgttcagaccgagcacaccgattttcgcgccagggaaaaagctgagggagatatttttcaaaatatgacgtttcggcggaaccactttgccgacacgatgcatggtataaacgaattgagccacgttggacttcgcctctttctattttga

SEQ ID NO: 241394 - DNA, 1023 bp, Klebsiella pneumoniae
atgctctcactaataccatcaattcatgcaaccatccttagtattgttgttgcagttgttgtcgtagttcttcctattgcctaccaaaatattttgaaatctaaaagcagcgtcattgaaaaatgcaaagcaataaacgaaattttttatataggattcaatggcggcggagagttcgaagatatttacgaaaatgctagtgacaatgatttttacgagggcttccgcagtagaataaaaaatataatctacaaccttgagaggaaccgttccagtctagaatttattattgacttcaatagagaatttactttgctcaataactatgcgagcagattcctatccagaagcccttttttaggttctgatgaaaattttgaagatttcctaaaatccgacattcatcgagctagtaacatggctcatttctttcatgaaatgtcatggatgattaaacaaaacaatcaatacatcatttcaaacatcaatcgatattatgatattgaactaccaaaactagaccacattgcacttgagatagcaaaaggtaatttaccttggacaatatctgttgacgaacaactaacacggcaaatgggagtaaatataggaaaaagacataataaagtcgatgagagtacagcaggacttatcaaagatagtcttatcaaaattagttaccacaagcatgatttaatagcctcattaaatcaattaactgatagattcgattatgcacttaatgaagtaatgcctgaactgattgaagaaaagaaaaaatacaacaacctacaatcatttttcaaatccctaccggacacaaaaatcatttacacctttatctactcaacacttactttcggaattgtcgcaccattaattattaatgagatttattcccgtttcagtctcgaaaaagaattactattctggattatatctttaggattcgccctaacattcattccttactactttgcattaaggaaagtgtttttagaaatatcaaaattaaaaatttaa

SEQ ID NO: 241395 - DNA, 414 bp, Klebsiella pneumoniae
atggaacgggatcgcataggtggtgcccatcacctgggcgttcttatgcatcgcgggccagaattccttgtgcagaaaatcgccggccttttgatcgccatatttaaacagctcatccatcggcaggatctcatccttcagcgccagatcggtggtgaagttggcggacatgatcaccagcgccggcggctggccggccttctgcgccgattcggctttgatcttggttgtgtcgtagttgccggtgaagatcccgcgtacttcgacatcctgctgcgagtcgttgaattgcttaatgacgcgggtcatctccatggtcagcttgccgtccaccggcgccgggaacatgaagtctattttctcttttgccagcgccgcgccgctcagggcaaggctgaggccaaccgcgactag

SEQ ID NO: 241396 - DNA, 552 bp, Klebsiella pneumoniae
atggccctccaccagcagctgaaaaccagcaccatctatgtgacccacgaccagaccgaggcgatgtcgatggccgaccgcatcgtagtgatgaacggcggccacgtacagcaggtcgggcgcccggagtatctgtacgccaacccggccaacctgttcgtcgccgggtttatcggttcgccggcgatgaacctcctgtcgctgccctgcgccaacggtgaagtactgttgggagaacagcgccatccgctgccgccgcgccaccgggatcagacccgcgtctggctgggtgttcgcccggaacatattaccgaccgcgtggaggagggccatctgcgcctgccggccaccgttctgcaacgagaactgatgggagccgattatctgctccacgtcagcaccccgatcagcaccctgcgctttagccgccgccaccgcggcacggtgccggagaaaggcgagtcgctactggtcggcttctcacctgccgatgtgcatctttttcatgctgagacccagcataatttgttgatggagtgtaatcatgtttaa

SEQ ID NO: 241397 - DNA, 552 bp, Klebsiella pneumoniae
atggccctccaccagcagctgaaaaccagcaccatctatgtgacccacgatcagaccgaggcgatgtcgatggccgaccgcatcgtggtgatgaacggcggccacgtgcagcaggtcgggcgcccggagtatctgtacgccaacccggccaatctgttcgtcgccggatttatcggttcaccggcaatgaatctgctatcgctcccctgcgttgacggcaacgttcagcttggcgaacaacgccatccgctaccgccgcgccaccgcagccagacccgcgtctggctgggcattcgcccggaacatattaccgaccgcctggagcacggccatctgcgcctgccgggcaccgtcctgcaacgagaactgatgggggccgattatctgctccacgtcagcaccccgatcggcaccctgcgctttagccgccgccaccgcggcacggtgccggaaaaaggcgaatcgctgatcctcggcttctcgcctgccgatgtgcatctttttcatgctgagacccagcataatttactgatggagtgtaatcatgtttaa

SEQ ID NO: 241398 - DNA, 429 bp, Klebsiella pneumoniae
gtgatcgccgatgcgcgcctgcgcgaactggatatgggggtgctggagaagcgccatatcgactcgctcagcgaagaagaagaaggctggcgtcgccagctggtcaacggcacaccggacggtcgtattccgcagggcgaatcgatgcaggagctcagcgagcgtatgcatgcggcgctggcatcctgtctggaattacccgccggtagccggccgctgctggtgagtcatgggatcgcgctgggctgcctggtgagtacgatattagggctgccggcgtacgctgagcgtcgtctgcggctgcgcaactgctctatttcgcgcgtcgactatcagcaaagcccgtggctggcttccggctgggtggtggaaacggcgggcgacgtctcgcatcttgacgcccccgcgatggacgagctgcagcgttaa

SEQ ID NO: 241399 - DNA, 750 bp, Klebsiella pneumoniae
atgtttaaggatgtcaccggccatgccatcggtgcctatattcgcgcgcgccgcttgtcgaaatctgctgtcgcattacgcctgaccgcccgtccaatccttgatattgcgctgcagtaccgtttcgactcccagcagaccttcacccgagcgtttaagaaacaattctcgctgacgccggcgctctaccgccgctcgccggactggagctcgttcggtatgcgcccgccgctgcgtcttggcgaatttaccctgccgaaacatgagtttatcactctgccccctactcagctgcttggcgtgacccagagctatacctgtaagctcgaggaaatctccgattttcgtaaccagatgcgggtccagttctggcgagacttcctcggcaactcaccgtcaatccccccggtgctctacgggctgcatgagccgcgtccgagcctggaaaaagacgatgagcaggaagtattctataccaccgcgctgacgccggagatggctaacggccacctgcagcatgcccatccagtgaccctggagggcggcgagtatgtcatgtttacgtatgaagggctgggtaccggtctgcaggaattcatcctgaccgtctacggcacctgcatgccgatgctgaacctgacgcgtcgcaaggggctggatattgaacgcttctaccctgaagatgaaagccgggatcaggccacgccgattcagttgcgctgcgagtatctgatcccgatccgccgttaa

SEQ ID NO: 241400 - DNA, 396 bp, Klebsiella pneumoniae
gtgtttacgaatccgacgaatggtcacgtcaacggtacggtcatgcggcttcagctcgcgaccggtcattttcttcagcagctcggcacgagactgaattttgcccgggttttcgcagaagtgcagcatcgcgcggaattcactgcgcggcagcttgtactgttcgccgttcgggctaaccagggaacggctgttgatatcgagttcccagccgttgaacttgtagctttccacgctgcgacgctcttcgctcacggtaccgaggttcatggtacgggagagcaggttgcgcgcgcggatagtcagttcacgcgggttaaacggtttagtgatatagtcgtcagcgccgatttcgaggccaaggatcttatccacttcgttgtcgcggccggttaa

SEQ ID NO: 241401 - DNA, 744 bp, Klebsiella pneumoniae
atgggggatttcggcccattagtcggtgaaaaactgcctttcagcataaaccaggatgataaggtattacataaggttgtattaagcgatttttcgatatcaaagtttaaagttaccaacgatgattataataaatatctgcagataacaggaataaaaaaacctcccattaatattctggtaaaagagtacccatccttgcaaaaagatgattactctgttggtgtgacctggcaacaggcaaaagattattgtcagtggctaggtaaggagtccgataaaaatattgatttaccgacagaagcacaatgggaatatgcggcaaggtcaagagggcagtatcttcctttttcgactaataatggaaatttcgagcttggttctaatatacctgaacaaaagaaattagatgaatacacagatggttatggttttcctatttatccaattgggaaatatcctccgaatccgctaggtttatacgatatggggctaagtggagccgaatggagtaatgattggtattcaactgattattattcccactcccctgtttatgatcctcaaggtccagttaagggtaatgaaaaagttttaagggggtatgttggcggagatcgtcagtatgccttgactatattcaggcaatcgtcacaacctgtgccaaaatttgctgggcgtgatgattatcaaaagtttggagttagtcctctttttgtatttcgttgcgttattaataaataa

SEQ ID NO: 241402 - DNA, 435 bp, Klebsiella pneumoniae
atgctgcaggagatgggccgtgaaccgaccccggaagagctggctgagcgtatgctgatgccggaagacaaaatccgtaaagtgctgaagatcgccaaagagcctatctccatggaaacgccgatcggcgacgatgaagattcgcatctgggggatttcatcgaggataccaccctcgagctgccgctggattctgcgaccaccgagagcctgcgcgcggcaacgcatgacgtgctggccggcctcaccgctcgtgaagcgaaagtgctgcgtatgcgtttcggtatcgacatgaacaccgaccacacgctggaagaagtgggtaaacagttcgacgttacccgcgaacgtatccgtcagatcgaagcgaaggcgctgcgtaaactgcgccacccgagccgttctgaagtgctgcgtagcttcctcgacgattaa

SEQ ID NO: 241403 - DNA, 507 bp, Klebsiella pneumoniae
atgattagcgatatccttgcgccgggcctgcgcgttgtcttttgcggtatcaacccggggaagtcctccgcccataccggctttcattttgcccatcctggcaatcgcttctggaaggtcatccatcaggccgggttcaccgatcggcagctcaggccggaagaggagctgcagctgctggatacgcgctgcggcatcaccatgctggtagagcgtccgacggtgcaggccagcgaggtcgccttgcaggagttacgcagcggcggccgtgagctggtgcggaaaattgaggagtatcagccgcaggcgctggcggtgctcggcaagcaggccttcgagctggcctttaaccagcgcggcgcgaagtgggggaaacaggccatgaccatcgggacgacccaggtgtgggtgctgcctaatcccagcggcttaaaccgggcgacgctcgataagctggtggcggcctatcgtgaactggacgatgccctggcaacccgcggccagtag

SEQ ID NO: 241404 - DNA, 369 bp, Klebsiella pneumoniae
gtgaccagcgtggaagggcgagtggaaatcacggcggcggaggaactggtggtgaattgtgcgggagcgtatatcaggctaagtggtggcaatatcgagctgggctgccctgggaatattctgctgaaatcggccaatgtgcagaaaatgggcgcagctgattatgatgcaaacaaacctgagcttcccgtcggtttcagtgagttttttactgcaaaagatgaagagtccggggagattttaccttttacccggtacaggataacaaccggtgaaggtaaagtatttgaaggcaggaccgatgcggaaggtaaaactgttgcagtttatactgccctgcctgatgccctgcatatagaattactttaa

SEQ ID NO: 241405 - DNA, 261 bp, Klebsiella pneumoniae; identical to SEQ ID NO: 112066

SEQ ID NO: 241406 - DNA, 171 bp, Klebsiella pneumoniae
atggatatgctggcggtcgatttaacgccctgtccgcaggccgggatcggcgcgccggtcgaactgtggggcaaagagattaaaatcgacgacgtggcggccagctgcggcaccgtcggctatgagctgatgtgcgccctggcgccgcgggtgccggttgtgaccctgtaa

SEQ ID NO: 241407 - DNA, 735 bp, Klebsiella pneumoniae
atggccgtagcgacgaaccagctcgtaaacctggtcatgcaggccagcctcacacactttcgccagctgatgatagaaaccgagcgccaggctgcgcgcttccgggctggagaaatagtggcggccgatgcgggtatacaaccccttcatgccgttgaggatcagaccgtagatcgggttgccggaggcgaacgccagaccacggaaaatattataatcaagctcggcgaaggcgtcggcgtgatcctccacctcccgggcgctgtccaggaccgccagcgctttatccggatgctggcgaaacgcggtgcggataaaaatcgtggaaatgttggtgcgcacggagagcagattatcaatcagctgcggtacgctgtcgtgatcgaggcgcgccagcgtttcgaggatattcaggccggaggtttcccaaaagttattcactttagtgggcttaccatgctgaatagtcagccagccgtcacgggccagacgctgcaatacttcgcgcagggttgtgcgggtgacaccgatcagctcagaaagctcgcgttcagcggggagaatcgatccgggagggaagcggttattccagatactctcaatgatgtactcttccgcgaaacccgcagggctctgcgccttaatgaccatagtaagatttccattacacagcgttacaattgcactcatcataccagagccgctatagcgcagatagcatggcaagtgaattaa

SEQ ID NO: 241408 - DNA, 297 bp, Klebsiella pneumoniae
gtgttgccagggttatccccactcgcttgcgccgccgccactcgcattgagacgttggtccccggttcgcaggagagagtcaaagactggcgtgctgaccccactttcgtcgccgtgttaaactcgctggcattgatgctgcccatggaaaaactgagattattgctactaacgatgcatcccatcgggatcatctggatgctggtggtgccgctaatgtgcagccgggaaatggagattgtcccgccattatcttttgccgataccgtggccaccggatcgctgaacgataattga

SEQ ID NO: 241409 - DNA, 495 bp, Klebsiella pneumoniae
gtgatcttccacttcccgggcgctgtccagcaccgccagcgctttatccggatgctgacggaacgcggtgcgaataaaaatcgtggaaatattggtgcgcacggagagcaggttatcaatcaactgggggacgctgtcgtgatcgagacgcgccagtgtttcaaggatattcagcccggaggtctcccagaagttgttcactttggtgggtttgccgtgctgaatggtcaaccagccgtcacgcgccagacgctgcaacacttcgcgcagcgtggtgcgggtgacaccgatcagctcagaaagctcgcgttcagcggggagaatcgatccgggagggaagcggttattccagatgctctcaatgatatactcttccgcgaaacccgcagggctctgcgccttaatgaccataataatatttccattacacattgttgcaattgcactcatcataccagagccgctatagcgcagatagcatggcaagtgaattaa

SEQ ID NO: 241410 - DNA, 990 bp, Klebsiella pneumoniae
gtggtacagaccattcgccagcagctggtgcagttggctaccccggccgacggttatacggcggtgctactgcagggtagcggcagctacgcggtcgaagcggtgctcggcagcgtcatcggcgaacagggcaaagtgttgatcgtcagcaatggcgcctatggcgcgcgtatgattgagatggcgcaactgatgggcatcgcctgccacccttacgactgcggcgaagtctcccgtccggacgcggccgcgatcgaacagatcctgcagaacgacccggcgatcacccatatcgcgatggtacacagcgaaaccaccaccggtatgctgaatccgatcgaagaggtggccgaactggcgaaacggtacgataaacgctatatcgtcgatgcgatgagcagcttcggcggcattccactggatatcgccgcgctgaatattgattacctgataagctccgccaacaaatgcattcagggcgtgccgggctttgccttcgtgattgcccgcgaagcggagctggccgcctgcaaaggccgttcgcgctcgctgtcgctggatctgtacgcccagtggcgctgcatggaggacaaccacggcaagtggcgcttcacctcgccgacgcataccgtgctggccttcgcccaggcgctgaaagagctggcgcaggagggcggcgtcagcgctcgccatcagcgctaccgcaacaatcagcgccggctggtcgccgggatgcgcgcgctcggcttccggccgctgctcgacgatagcctgcactcgccgatcattaccgccttttattcaccggatgcgccgcagtatcgctttcacaccttctaccagaagctgaaagatcagggcttcgttatctatccgggcaaagtatcgcaaagcgactgcttccgcatcggcaacattggcgaagtctacgacgccgatatcaccgccctgctggcggctatcgacaacgccatgtactggaaacaataa

SEQ ID NO: 241411 - DNA, 546 bp, Klebsiella pneumoniae
atggtcgcccatgcgggcggactcacgctatcacgctttctgggcgagagttctgcgctggtcgaaacgcctggcgtcagcgatgtgacagtgcgcggtcagacaaacgtgacgacggatgccgccggatatgcggtggtgccttacgtccgtccgtaccatcgtaacagcctggcgctggatgaacaggaaatacctggcgctgaagtggataacgtcgccagaacggtggttccgacgcgcaatgcgatcgtcaaagtgaagtacgacacgcgaattggctataaggcgatgctcaccctgcgtacccgcaatggcgtggtgcctttcggcgcgctggtgaccctcgataatgatcacggtagcgcgtcgcgcagcaatatcgttggcgatgaggggcaggtgtatctgacggggctgcagaaaaaaggccagctgttagcgcgctggggggagaaaagcagtgagcagtgcaccgttcattatgacttctccagcatggcccttggcaacgatattctgttctatcaggccgaatgtcggtaa

SEQ ID NO: 241412 - DNA, 237 bp, Klebsiella pneumoniae; identical to SEQ ID NO: 240945

SEQ ID NO: 241413 - DNA, 921 bp, Klebsiella pneumoniae
atggaggcgaaagagaaagacgaatggcgctactggcaggcggatctgttgctggagcgcggcagggacgaggaggcgcaggcgatcctccggtcgttgatgcagcagcggggtttctacccgatggtcgctgcgcagcgtctcggcgaggagtataccttccgcattgataaagcgattggcacgctcgatccggcgctggcctccggtccggagatggcccgggtgcgcgagctgatgtactggaatatggataacaccgcgcgcactgaatgggcgaacctggtcaccagccgtagtaaatcccagcaggcgcagctggcgcgttacgcttttgatcaacactggtgggatctgagcgtgcaggcgacgatcgccggaaaactgtgggatcagctggaggagcgcttcccgctggcctataacgatctgtttgcccgctatatcagcggtaaagatattccgcagagctacgcgatggcgattgcccgccaggagagcgcctggaacccgaaagtgcgctcgccggtcggcgccagcgggctgatgcagattatgccgggcaccgcgacgcataccgtcagcatgttcagcattcccggctacagcggcccgtcgcagctgttggatccggaaaccaacatcaacatcggcaccagctatctgcagtacgtttaccagcagttcggtaataaccgcatctacgcctcggcggcctataacgccgggccgggtcgggtacgcacctggcaggggaacagcgccggacggatcgacgccgtggcgtttgtcgagagtattccgttctcggaaacacgcggctacgtgaagaatgtcctctcctatgacgcctactatcgctactttatgggacagcaggataagctcttcagcgatgcggagtggcggcagcgttactga

SEQ ID NO: 241414 - DNA, 348 bp, Klebsiella pneumoniae
gtggtttccgtcagcgaaatctacgagtattacaagcagcacggctatgaaaccgtcgtgatgggcgcaagcttccgtaacgttggcgaaattctggaactggctggctgtgaccgcctgaccatcgccccggcgctgctgaaagagctgtccgaaagcgaaggcgccgttgagcgtaagctggtatataccggtgaagtgaaagcgcgtccggagcgtattaccgaatctgagttcctgtggcagcataaccaggatccgatggcggtagacaaactggcggaaggtatccgtaagtttgcgatcgaccaggaaaaactggaaaaaatgatcgacgaactgctgtaa

SEQ ID NO: 241415 - DNA, 687 bp, Klebsiella pneumoniae; identical to SEQ ID NO: 215113

SEQ ID NO: 241416 - DNA, 405 bp, Klebsiella pneumoniae
gtgcgctcgccggtcggcgccagcgggctgatgcagattatgccgggcaccgcgacgcataccgtcagtatgttcagcattcccggctacagcggcccgtcgcagctgttggatccggaaaccaacatcaacatcggtaccagctatctgcagtacgtttatcagcagttcggcaataaccgtatctacgcctcagcggcctataacgccgggccgggccgggtacgcagctggcaggggaacagcgccggacggatcgacgccgtggcgtttgtcgagagtattccgttttcggaaacccgcggctacgtgaagaatgtcctctcctatgacgcctactaccgctactttatggggcagcaggataagatcctcagcgatgcggagtggcgccagcgttactga

SEQ ID NO: 241417 - DNA, 612 bp, Klebsiella pneumoniae
gtgctcggcagcgtcctggcgctgattctggtgtttattccgttccccggcagccaactggtgggccgggtcattgatacttttattgcgctgccgacctttcttatcactctcgcattcacctttatttacggctcggcggggctgctcaacggcaccctgatggcgctgtttgcttttgaactgccgccggtagacttcctctattcgattaacggcgtgattctggcggagattaccgtctttacgccgctggtgatgcgtccgttgatggcgggactgcggcagatagataagagccagctggaagcggcgagtattctcggcgctcatccgttacgggtgattacccaggttatcttcccggcggcgctcccggcgctgatggcgggcggcagcctgtgcctgctattgaccactaacgagttcgggatcgtgctgtttattggcgccaaaggggtcaataccctgccgatgatggtctacagcaaggcgattctggagtcggattacagcgtggcctgcatgattgcgctgatcaatattctgctgtcgctggggctgtttatgctctatcggctggcggcggcgcgcactggcgtaaggagttaa

SEQ ID NO: 241418 - DNA, 273 bp, Klebsiella pneumoniae; identical to SEQ ID NO: 210442

SEQ ID NO: 241419 - DNA, 495 bp, Klebsiella pneumoniae
gtgcacatctccatcaacctgtcggtagatgatttacgctcgcccaccctaccgacgttgttacacgatcagctgcagcactgggggatcgctgccgaacagatcatccttgaaatcaccgagcgcgggtttgtcgacccggagaccaccatgccggtgatcgctcactaccgtcaggccgggcatcggatctcgattgatgactttggcaccggctactccagcctgagctatctgcagaaactggacgtcgacacgctgaaaatcgataaatcttttgtcgataccctcgagtaccggccgctgacgccgcacattattgaaatggccaaagcgctcaatctggccaccgtcgccgaaggggtggaaaccgaaagccagcgcgactggctgcgccagcatggcgttcagtacgcccaggggtggctttacagcaaagcgctgccaaaagagcagttcattctgtgggcagagcataacctccatgcgcattaa

SEQ ID NO: 241420 - DNA, 300 bp, Klebsiella pneumoniae; identical to SEQ ID NO: 104026

SEQ ID NO: 241421 - DNA, 684 bp, Klebsiella pneumoniae
gtgaagattttgattgtcgaagatgagaagaaaaccggagagtacctgaccaaagggctcaccgaggccggcttcgtcgtcgacctggccgataacggcctcaacggctatcacctggcgatgaccagcgattacgatctgctgatcctcgacatcatgctgccggatgtgaacggttgggatatcgtgcgcatgctgcgcgccgccgggaaaggcatgccgatcctgctgcttaccgcgttgggcaccattgagcatcgggtgaaggggctggagctgggcgctgacgactatctggtaaaaccgttcgcctttgcggagctgctggcgcgggtgcgtactctgctgcgccgcggggcggcggtcatcgtcgaaagccagtttcaggcggccgatctcagcgtcgatttggtcagccgcaaggtgacgcgcggcgccacccgcatcaccctgaccagtaaggaattcacgctgctggagttcttcctgcgtcatcagggcgaggtgctgccgcggtcgttaattgcctcgcaggtgtgggatatgaacttcgacagcgacactaacgccatcgacgtggcggtgaagcggctgcgcgccaaaattgataacgacttcgagccgaagctgatccagaccgtgcgcggcgtcggctatatgcttgaggtgccggatggccgctaa

SEQ ID NO: 241422 - DNA, 522 bp, Klebsiella pneumoniae; identical to SEQ ID NO: 101469

SEQ ID NO: 241423 - DNA, 327 bp, Klebsiella pneumoniae
atggtcaggaagaccgccatcgggtcgttactgcctgactctatctccagcgtcgagccgacgcgctcgttgagccccttgccgccgagcagcgagaagaccgccgcggcgtcggtggagccgacaatggcgccgatcagcaggccttcgatcatatccagtttgaacagccaggccgccatcatcccggtcagcgccgaggtgatcagcaccccgaccgtcgccagcgacagtgctggccacagcgcgacgcgaaaggagctggcctgggtgcgcatcccgccgtccagcaggatcaccgccagcgccaggttactcaccatgtag

SEQ ID NO: 241424 - DNA, 366 bp, Klebsiella pneumoniae; identical to SEQ ID NO: 241088

SEQ ID NO: 241425 - DNA, 507 bp, Klebsiella pneumoniae
atgatcccattactggcgatcgccgcatggagcggtaccggaaaaacaacattattaaagcgtcttatccctgagctttgcgctctaggattacgcccgggactgataaagcacacccattatgatatggacgtggataagccgggcaaagatagctatgaactgcgtaaggcgggcgctgcgcaaactattgtcgccagcgaacagcggtgggcattgatgaccgagacgccagagaagccggaattagatctcacgtggctggtcagtcgaatggatgccagcaaactggacctggttttagtggaggggttcaaacatgaacccgtgccgaagatcctgctttttcggcaaaacagcggccatcgtgtagaagagctggtaattgatgagcataccatcgccgtggccagcgatgtatcgatcgcgacctcacttccgctgctggatttaaatgatgtaccacagatcgcgacatttattgtgagttggttagagaggcaatag

SEQ ID NO: 241426 - DNA, 648 bp, Klebsiella pneumoniae
atgaccctgaccgggacgctgatttttggtgagaacagtgaaattaccccgctgccggcacgcaccaccgaccaggatctgattaaagccatgatggagggcggcacggcgaaaatctaccactgcaatgattcggataagtgcctgaaggtggtggccgatgccagcgtgacgatttctgacaagaaggcgttgaaaaatcagatatcagctctgctgagcagtatccagaacaaggccgtagaggacgtcgcattgacggagcaggagaaagggtttatctccagcaccaccatcccggtgttcaaatacctggtcgatccgcagatgctcggggtgtctaactcacttatttaccagctgacggactatatcggctacgacatcctgctgcagtacattcaggaacttatccagcaggcccgggcgatgatctcaaccggtaattatccccagtcgacaatggatatgatcatggaaaacctcaaccaggcgagtgtccagattgccgctttccagtcccgcgttcaggtccagcaggacgccttgcttgtggttgacagacaaatgagttacatgcgccagcaggtctctgcccgcatgatgacccgctaccagaataactatcattttggggggaatcagtaa

SEQ ID NO: 241427 - DNA, 240 bp, Klebsiella pneumoniae
atgtttaccgtcatagcaaatatgaacctccgcatttccttcaaagcgggatgcgacggctttccaggtttcatccagctggaccgccagctgttgcacgcctttatgtccatcagtgggatgtcccagcgcccggcaaacggggacccgctgagcctgccattcttccccctgcaacagcttctcgcggggatttccccagcgatcgctgttttcgagccagatgtcccgtcggcgtag

SEQ ID NO: 241428 - DNA, 519 bp, Klebsiella pneumoniae
atgaatctggcacggcacgcggaaatacgccagtcgcagctcaacagcctgtgggtctgggcgctggttgcccaggtgtcgtttatgctcatcgggtacccgtggtataccgggaatattctgtttgcctttgccgtcacgggccaggtcctgcggtgggtcagccagccgtcctggtattacaccctcccggcggctggactgctggtcgcctggatacccctgtcaaccgccagctacggcatggccggagtgggtatgctcaccgccagctggctgctttgtcgcgcacagcatgcaccggaacggctgggatacggtgtgctgtgggccctcatggtgttgctgatgaatatgaatgacgtgagtgaatcagtggccgggctggcgattgcgctgctgacgctgatggtgtgctcatctgccggagagcgtgtgaaacgcttctggccgcggcagttcttcgtgatgttctatgcggtgcacctggcggtactgggtattgtcgtctcaatgtga

SEQ ID NO: 241429 - DNA, 219 bp, Klebsiella pneumoniae
atgatctcaaccggtaattatccccagtcgacaatggatatgatcatggaaaacctcaaccaggcgagtgtgcagattgccgctttccagtcccgcgttcaggttcagcaggacgccttgctcgtggtggacagacaaatgagttacatgcgccagcaggtctctgcccgcatgatgacccgctaccagaataactatcattttggggggaatcagtaa

SEQ ID NO: 241430 - DNA, 687 bp, Klebsiella pneumoniae
atgcgtttaacgattattttagtcggtcctgcccgggccgagaacgtcggcgctgccgccagggcgatgaaaaccatgggatttcgcgaactacggatcgtcgatagcgaagcccacctggcgccgccggcacgctgggtggcgcatggctcaggcgacatcctcgatggtatcaccacctatcccacccttgccgaggcgctgcatgacgttgattttaccgtcgccaccaccgcccgcagccgcgcgcgttttcactattacgccacgccgcagcagctgttgccgctgctggaggagaaggcgcagtggatgaaacatactgccctggtatttggtcgtgaggacgccggattgaccaatgaggagctggcgttggctgatgtgttgaccggtgtgccgatggctgcggattatccgtcgctgaatctcggccagtcggtgatggtctactgttatcaattagcatcgctaatgcaacaaacggcgcccgccgccgctgcggcagaccatcatcagctgcaggccttacgtactcgtaccctggcgttactttcgcgtttgggcgtggaggatgatgccaaactggccgactggttgtcgcaacggctgggcctgctgcagcagcgcgacacggcaatgttgcatcgtttgctgcatgatattgaaaaaaacctgccagaataa

SEQ ID NO: 241431 - DNA, 687 bp, Klebsiella pneumoniae
atgcgtttaacgattattttggtcggtcctgcccgggccgagaacgtcggtgccgccgccagggcgatgaaaaccatgggatttcacgatctgcggatcgtggacagtgaagcccatctggcgccggcggcacgctgggtggcgcacggctcaggcgacatcctcgatggcatcaccacctattccacccttgctgaggcgctgcacgacgtcgattttaccgtcgccaccactgcccgcagtcgctcgcggtttcactattacgccacgccgcagcagttgttgccgctgctggaggagaaggcgaactggatgacccataccgcgctggtatttggccgtgaagacgccggattgaccaatgaggagctggccctggccgatgtgctgaccggcgtgccgatggtcgcggattatccgtcgctgaacctcggtcagtcggtgatggtttactgctatcaattagcatcgcttatgcaacaatcggctcccgccgctgccgcggcagaccatcatcagctgcaggcgttgcgcctccgcaccatggccttgctttcgcgtctgggcgtggaggacgatgccaaactggccgactggctgtcgcaacgattggggctgctgcagcagcgagacacggcaatgttgcatcgtttgctgcatgatattgaaaaaaacctaccagaataa

SEQ ID NO: 241432 - DNA, 414 bp, Klebsiella pneumoniae
atgaaagcagccgtggtttttgacctcgcagaaggcccggtttgggccgattttatcgacccgcagcccgcgcccggccagacgctcattgacgtccgcgccgccgcgataagccatgtggttaaggcccgggcatccggacgccattacagcttcgacggcaatctgccctttgtgcccggtatcgatggcgtcggcaccacacctcagggccagcgcgtctacttcgccttccccaccgcccccttcggcagtatggcgcagcgggcgccggtcgccctgcagaattgtctgccgctgccggatgcgctcgatgatatccaggcggcggcgatggccaaccccggtatgtccgcgtgggcaatcgctggtgacacgcgcccagcttcaggccggcgaaacggtgctgattaa

SEQ ID NO: 241433 - DNA, 726 bp, Klebsiella pneumoniae
atggcgggccagcgcttggcgcaggcggccatcgagcaccagcacaccgagcagcaccagaccggcgataaagtcattccaccaggcgggaaggcggaacagcaccagtacggtgtcgatttgggtaaggaaaaaggcgccgagaaacgcgccgagcagcgtaccggtaccgccaagcagcgagatcccgcccagtacgcaggcggcgatggctttcatctccaggccgctgccggtctgattaggcacaaaaccaatctgcgcggcgaagacgatcccggcgcaggccgccagcataccgttgagagtaaaggccagcatccgcgtgcggttgaccgccacgcccagttggcgcgcggcggcgaggttatcgccaacggcgtaaaaatcacgaccaaaggcggtgcgcgacagcagccagccgcccgccagcagcagcgccagcaccagccagcccagcggcgacacgccgataaacgcgggctccgagagcgatttcaggctgtcgggcaagccttcgatccatttcccgccggtccacagcaacatcaccccgcgatacaaccccagcgtgccgagcgtcgcaacgatcgccggaatgcgcaaccccaccaccagcaggccgttaaacgccccggccagcgcgccaatcgccagcgcgaaggcgatggccgtcgccaacccgtagccgttgttcagcgccacgccgacggcgatggcgcatag

SEQ ID NO: 241434 - DNA, 567 bp, Klebsiella pneumoniae; identical to SEQ ID NO: 152639

SEQ ID NO: 241435 - DNA, 216 bp, Klebsiella pneumoniae
atgttgcttgatgacgccctcggcaaaccagttgctgacgcgctcaccctcctgctgatagtgactgaccggccagcttttttgcccctgctcatccacccgccagccctgctgcaagggggcggtatagatgggatgttcggcggaaaagaccagggtgccgccgggaaccagcgcctgctgcagggtggcgaagagcggggcaatgtccggtaa

SEQ ID NO: 241436 - DNA, 303 bp, Klebsiella pneumoniae
atgggcgatatcggcggagaagttggactggcgggtaaagacatcctctatgcgctccagcatatggttaaacgacagcgccagccgctccagctcgacaggcaccgcctgcgggtcaaggcgcacatcgagatcccgcgaggtaatattctggatctggcgactgatctggcggatcggcttatgcccctggtagaccacaaacagcacgatggcgatgatcagcaaactgattatcgacgccgcggagatcagcttcgctttcagctcattaatatagtgcaggtgaaaatcgatggataa

SEQ ID NO: 241437 - DNA, 603 bp, Klebsiella pneumoniae
gtggccgatgcgctctcgaaacggctggtcagcggcgtgctggatgccgctgtcgttgagagcgagcagattcatctgcgctgttttgaatccactcatgagctgctgctggagcagctgagccagcataagctcgacatgattatctctgactgcccgatcgactcgacgcagcaggaagggctattttcggtgaagatcggcgagtgcagcgtcagcttctggtgcatgaatccggcgccgacgaagccgttcccggcctgcctcgaagagcggcggctgctgatccccggccggcgatcgatgctgggacgtaagctgctgaactggattaacgtgcagggcctgaaggtggagatcctcggcgagtttgacgacgcggcgctcatgaaagccttcggcgccgcacataatgcgatatttgtcgcgccgacgctctacgcgcatgatttctaccatgatgaatcgattgtcgaaattggccgtatggatagcgtgatggaggagtatcacgctattttcgctgaacgaatgattcagcacccggcggtacagcgtatctgtaatcgcgattattcgtcgctgttcaccgaaccccgatag

SEQ ID NO: 241438 - DNA, 588 bp, Klebsiella pneumoniae
atgctggttttcccatccgttgcggccctgctcacccgctggttttcaccggggcaggtgtccacggcgggactgatgatggcctccgtcgggttgttgttgctgggcgatgcttttcacagtaaccacctcccgcaactggtgctggcgctgatcctctgtggggcgggggcggcgcttccctggggactgatggatggcctggcgatatccgctgtgccggtcgccaaagccggtatggcggcaggcctgttcaacaccgtacgcgttgccggcgaggggatcgccctggcggtcgtctccgcggtattaacggcaagcaataccctgaccctgcagagtcgcgttcacgggtatgcccccgaggtgattcaccgcgccgcaggctggctgggggccggcaatatgccgcaggcggctgcgcttttgcctgatttttccctccgggtgctgcgcgagagctatgactctgcttatacgctactgtttagcgggctggcggtcgtcaccctgctgtgcgccctgatgatctggctgacgctatgccggaaggggggcgctatccaaacccgcgacagtggatcctga

SEQ ID NO: 241439 - DNA, 282 bp, Klebsiella pneumoniae
atggtctgccgggatctggctggcggcaatgcggcgggtggattcggcgatatcgacggtggattccagatagtggcccacggcgagcagtttttcgaccgggttaatgacactgactttatgtccacgggcttccagcagacccgccatgatggcgatggagagcttttcgccgcggcagatcagcgcggcattgacgctgtccgggcactgacccagcaggctgatgccgtgcagaacatgcttaatctgagcaaattcctgctccacgaaggcttttaa

SEQ ID NO: 241440 - DNA, 411 bp, Klebsiella pneumoniae
gtgaagattggcgagtgtagcgtcagcttctggtgtatgaacccggcgccgacgaagccgttcccggcttgtctcgaagagcgacggctgctaatccccggccgacgatcgatgctgggacgtaagctgctgaactggattaatgtgcagggtctgaaggtggagattctcggcgagtttgacgacgcggcgctcatgaaagcctttggcgctgcgcataatgcgatatttgtcgcgccgacgctctacgcgcatgatttctatcatgatgaatcgattgtcgaaattggccgcatggatagcgtgatggaggagtatcacgctattttcgccgaacggatgattcagcatccggcggtacagcgcatctgcaatcgcgattattcgtcgctgtttactgaacccagatag

SEQ ID NO: 241441 - DNA, 174 bp, Klebsiella pneumoniae
gtggccgatgcgctctcgaagcggctggtcagcggcgtgctggatgccgccgttgtcgaaagcgagcagattcatctgcgctgttttgaatccacccatgagctgctgctggagcagttgagccagcataagctcgatatgattatctctgactgcccgatcgactcgacgtag

SEQ ID NO: 241442 - DNA, 153 bp, Klebsiella pneumoniae
atggtcgtccataaagcggcgcacaaagctggtgattttcgcgcgggttttcagacgctgcgccatttccggacgacgcaggtcgaggtagcggtatttcagacgcgcttcttcggtgttgacgtgattggagtccagcggcagcgattctga

SEQ ID NO: 241443 - DNA, 171 bp, Klebsiella pneumoniae
atgcttccggccggcatgaacgaggacggtgtgattgaagatatgcaggcgtatgacgcctgggcagatgagcagacacagcgggatatgcagcggcgtgaggaagtcaatatcaaccacagccaccgccacgatgagcaggatgatgtcgagattggggggaacttctga

SEQ ID NO: 241444 - DNA, 543 bp, Klebsiella pneumoniae
gtgaagaaccgctacgtcggccgcacatttatcatgccgggccagcagctgcgtcgtaagtctgtgcgccgcaagctcaacgccaaccgtgcggagttccgcgataagaacgtgctgctggtggacgattccatcgttcgcggcaccacctcggagcagatcatcgagatggcgcgcgaagcaggggcgaaaaaagtgtatctggcctcagccgcgccggaaattcgtttcccgaacgtgtacggtatcgatatgccgaccgccaacgaacttatcgctcatggccgcgaagtggatgagatccgccagatcattggcgccgatggcctgattttccaggatctcaacgatctgatcgaggcggtgcgcgcggaaaatccggatattcagcagtttgaatgttctgtgttcaacggcgtgtacgtcacccgggatgtcgaccagcagtacctcgactacctcgattccctgcgtaacgatgatgccaaagcggttcagctgcagaacgaagtcgaaaacctcgagatgcacaacgaggggtaa

SEQ ID NO: 241445 - DNA, 258 bp, Klebsiella pneumoniae
gtgccggcactgctgattattgccgtccgcagtcgatttatgaatgaatccccgctgtgggcggcgaaccagggcgatctgacctctgcagtgcgtattttacgcgactcctgggggatccatgcccatgaggtcccggcggcgaagcccgcgccagcgccgaaagtgagcttccgcgtgctgttcgaaaaaccctaccgcgagcggactatcgtcgccggggtgatgaatatctgggtaatgactccaacttactga

SEQ ID NO: 241446 - DNA, 531 bp, Klebsiella pneumoniae
gtgacggcagtagagcgtaagcaggaaggccccacctgggtgccaaccgccaatacccgccgcgagtatgcgaaagagggcaaaacgctgccggcgatggtgccccccgggcccgataatccgatggggctgtatgcgatctacatcggcaggctctacgccatccacggcaccaatgccaactttggtatcgggctgcgcgtcagccagggatgcatccgcctgcgcaatgacgatattaaattcctgtttgataacgtgccggttgggacgcgggttcagctgatcgatcagccggtgaagtacagcgtggagccggacggcagtcactggctggaggtgcacgagccgctgtcgcgcaaccgcgcggagtttgaatccgacagaaaagtccccttgccgatgacctcggcgctgcgcgactttacccaggggccgggagtgagccctgcccaggtcgagcagaccctgcagcgccgctccggcatgccggtgaatatcagcgccacagcggcgcagggaagtttgtag

SEQ ID NO: 241447 - DNA, 387 bp, Klebsiella pneumoniae
gtgagctttaaaggcatcaacgacgcgcagaagaaagcggcctaccagttcctgacttatctggtgagcccgcaggtgaacggcgcgtggagccgctttaccggctacttctcgccgcgtaaggcttcttacgatacgccggagatgaaagcttatctgcagcaggatccacgagcagcgatcgcccttgaacagttgaagtacgcgcatccgtggtattccacctgggagaccgtcgccgtgcgtaaggcgatggagaaccagctggcggcggtggtcaatgatgccaaagtgacgccggaagcggcggtgcaggcggcgcagaaggaagccgacgcgctgatgaaaccgtatgtggataagaccgcgctggcggaagtgaagtga

SEQ ID NO: 241448 - DNA, 189 bp, Klebsiella pneumoniae
gtgaaaaaaggcaccttcaccgtcccgggcgacggggtgatcgatttccgtccggtgttcaagctgctggacgactttggctataaaggctggatggtagtggaagccgagcaggatcctgctctggccaatcctttcgaatacgccgtcaaagcgcgcaaatatattcgcgaaacggcagggatctaa

SEQ ID NO: 241449 - DNA, 507 bp, Klebsiella pneumoniae; identical to SEQ ID NO: 241425

SEQ ID NO: 241450 - DNA, 612 bp, Klebsiella pneumoniae
atgtgcttccgcctcgctgtagcccacggtggcgacctgcgggtcggtgaacaccacggccggcattgcggtcaggtccagggccgcatcgccgccagtcatgttgatcgcagcacgggtgccggccgctgccgccacatagacgaactgaggctggtcggtgcagtcgccagccgcataaatgtgtggcgtactggtgcgcatgcccttgtcgatgacgatggccccctgcgcattggcagcgactcccgccgcttccaatgccaggctgcgcgtgttcggtgccctgccagtggcgaccagcagctggtcggcgcgtatttcaccgtacccggtggtcagcacgaattcgccgtccacatgcgcgacctggctggcttgcgtgtattccaataccttgatcccttcggcacggaacgcggctgtaacggcctcgccgatggccgggtcttcgcggaagaacagcgtgctgcgtgccaggatcgtcactttgctgcccagccgggcaaaggcttgcgccagttccagcgccaccacagacgagccgatcacggccaggcgctcgggaatggtgtcgctgaccagggcctcggtggaagtccagtagggtga

SEQ ID NO: 241451 - DNA, 312 bp, Klebsiella pneumoniae
atgcatactggtatagatcaggtcgtagtgagtttgataaatctcggtcagactgccgttgagatcgtggcgcagcagctcaggcacccgcgcgggcagacagtggttttcgcagtagcacaccggacgcccgtcggcatagcgcagccgggtcagcaggtagacctgatcgaagggctgcagcgccagcggcgccatcacatccagcggcacggcagccaggcggccatcaagcagcaccgttttcggttcgcgaccctgctcgagacacagcttgtggaagttggtattttgcgtcggatccagccatag

SEQ ID NO: 241452 - DNA, 189 bp, Klebsiella pneumoniae
atggggccgggcaaggcgcgcattggcgacgcgatttcgtgcgccagcgcgcgtttcctcgctgccgaagggctgttccggcacgccgctctcgacggcgacggactcaatgtggcaggatccttcgccgaaaatctcgtcaaaagcctgcagaattgcctgaattttggcgggattagtggtcgctga

SEQ ID NO: 241453 - DNA, 195 bp, Klebsiella pneumoniae; identical to SEQ ID NO: 235731

SEQ ID NO: 241454 - DNA, 471 bp, Klebsiella pneumoniae
atgacaggtcggacaggtctgcggtttgctgccggccttggcgccgctaccgtggcagacgtcgcactcttccagcgtcggaatacggatctctttagtgacgccgcgcaccgcttcttccagcgtcagctccatgttgtaacggagatcggcgccgcgtgccgcgcgctgacgaccacgcccgccgccaaagatatcgccgaaaacatcgccaaagatatcgctgaagtcggcaccgccgccaaaaccgccgccgccgcccatgccgccctgttcgaaggccgcgtggccgtactgatcgtaggccgcacgcttctgggcatcagtcaggatttcatacgcttctttgatttctttaaatttggcttcagcctctttatcaccctggttgcggtccgggtgatatttcatggccaggcgcttataagcctttttgatttcacgctcttccgctgttttggaaacgcctaa

SEQ ID NO: 241455 - DNA, 273 bp, Klebsiella pneumoniae
atgagttttcagaaagtaattacagttaagtcgatcaaaaattacgatgcattgggcggaatgaaaatgcctggcgcggacgaggaaatgactgtgacattttctgctgaggcactggtgagtcttgtaggctcactctgtacagtgcgctacagcatgactacagatggcgctctgtctcccggatacgctgagattgagtttcagtattcaggcactggctcaccactggaagaggcagaaaccacgctaaaggcatctttaataagttaa

SEQ ID NO: 241456 - DNA, 174 bp, Klebsiella pneumoniae
gtggctaatgcgctggtcgtagaactcgaacagcgtctcgtcatccaccaggatgtcgcggcggcgcgacttatgctccagctcttcgatttccgcgcgcagcttcaggttatcgcggaagaaggcgtgccgcgtctgccagtcgccctctaccagcgcgtggcggataaatag

SEQ ID NO: 241457 - DNA, 318 bp, Klebsiella pneumoniae
atgagtaaagcaataacagaagtccacgaaatcaaagtttacaatgaatctaccagattattccttgtgaagtcattttattgctatgagctttatatcagtaatatgcaggaatacatgggcgatagatttgttaaaatggttgaagacagaatatatatggatgatgtttttgacaaggtaatagaaaacagtaaggaaggatttaataagtttcttaaggagtgtaaaagctcaggctctatcagagatgttttattcgatgaggtcaaagtgaatctgagacatatgcacaacgttatttttaactcaaactaa

SEQ ID NO: 241458 - DNA, 204 bp, Klebsiella pneumoniae
atgaataatatcaatttaattagaagtgaaacaaccaaaggtattcatgtaattaaaggtaaggcactcattgatgatattttgagttattctattttgcatttgtcgcgacacattcaactttgtcacgaattctttttgaagaaacatagccttgtcttcataaatacccctaacctctgggtgatggtgccaacttactga

SEQ ID NO: 241459 - DNA, 354 bp, Klebsiella pneumoniae
gtgcgccgctccctgcacccgatccagcacgtgcaggtagtagggcattaccccggcgtcgaacagcgcattactgaggtcggccagggtttgcgcgttgtcgttcaccccgcgcagcagcacgctctgattgagcaacgtgacgcccgcctgacgcagcatggccatcgccgcgcgaaactcaccgtcaatttcattggcgtggttgacgtggttaaccaggattatctgcagcgacgaacgctggaagcggctggccagcgtctcggtgatgcgcaccgggatcacaatcggcaggcggctgtgaatacgcaggcgcttaacgtgcggaatagcttccagctgggtcattag

SEQ ID NO: 241460 - DNA, 306 bp, Klebsiella pneumoniae
gtgcagcgctatgcggattacgcggcgtttgtcgccagcgcgcagccgcagcgtctgttcgccctcaccaccaaaggcacgcctgcgcacagcgcagtgagctatcaggacggcgatttcttgatgtttggcccggaaacccgcggtctgccggccagcatcctcgatgccctgccgccggagcagaaaatccgtattccgatgatgccggacagccgcagtatgaacctgtcaaacgcggtgtcggtggtggtgtatgaagcctggcgccagctggggtatcctggcgcggtcttgcgcagctaa

SEQ ID NO: 241461 - DNA, 222 bp, Klebsiella pneumoniae
atgattggcgccggggcgaagatcctcggcaatattgaagtcgggcgtggggcaaaaatcggcgcaggctcagtggtgctgcagccggtgccgccgcataccaccgccgcaggtgttcctgcgcgtatcgtcggcaagccggagagcgataagccggcgatggatatggatcagcatttcaacggtattcaccacactttcgagtacggcgacgggatttaa

SEQ ID NO: 241462 - DNA, 414 bp, Klebsiella pneumoniae
atgaaagcagccgtggtttttgacctcgcagaaggcccggtttgggccaattttatcgacccgcagcccgcgcccggccagacgctcattgacgtccgcgccgccgcgctgagccatgtggttaaggcccgcgcatccggacgccattacagcttcgacggcaatctgccctttgtgcccggtatcgatggcgtcggcaccacacctcagggccagcgcgtctacttcgccttccccaccgcccccttcggcagtatggcgcagcgggcgccggtcgccctgcagaattgtctgccgctgccggatgcgctcgatgatatccaggcggcggcgatggccaaccccggtatgtccgcgtgggcaatcgctggtgacacgcgcccagcttcaggccggcgaaacggtgctgattaa

SEQ ID NO: 241463 - DNA, 558 bp, Klebsiella pneumoniae
gtgatttctgtgccgagcggcaacttcggcgatctgaccgccggtctgctggccaagtcgctggggctgccgatcaagcgctttatcgctgccaccaacgccaacgacactgttccgcgctatctgcagggcggcgagtgggcgccaaaagccacccaggcgacgctgtccaacgccatggacgtcagccagccgaacaactggccgcgcgttgaagagctgttccgccgtaaaatctggcgtctcagcgagctgggctatgccgcggtcgatgatgagaccaccaaagcggcaatgcgcgagctgaaggccatcggctacatctctgaaccgcatgcggcgattgcctggcgcgcgctgcgcgatcagctgcagccgggagagtacggcctgttcctcggcaccgcccatccggcgaagttcaaagagagcgtggaggagatcctgcaggagactctgccgctgccgaaggagctggccgaccgcgccgacctgccgctgctgtctcacaacctgccggcggatttcgccgcgctgcgtaagctgatgatgggctaa

SEQ ID NO: 241464 - DNA, 270 bp, Klebsiella pneumoniae
atggcgatcctcaagcagcccgcctcgcggaaaaaccacaccaacgtgctgatgcatattcagggttatttccgcgaccagctgaacagccgccagcgcggcgagctgcgggaggtgatcctcaactatcgcgccgggctgctgccgatcctcgccccgctgacgctgcttaagcactatctggccgagtatccggatcgctacctgcaggcgcagaactattttgacccctacccgcaggatctggccctgcgcctgacggtgaactga

SEQ ID NO: 241465 - DNA, 234 bp, Klebsiella pneumoniae
atgcgaaatccggatgtgcattatgccggtgacgggctcggtcctcgcgatgtgtttgtgaatggaaacccgatcagacatgttgtttacgcaaaccaggcaaagggtattgtagagttttctcctctcccgctgcgggttaagcgtaatggcgaaatttatacccgcaaactccgcggtacagtgatcgttaaacctcagcagcgtattggtgggtgcaatgggcattcgtga

SEQ ID NO: 241466 - DNA, 507 bp, Klebsiella pneumoniae; identical to SEQ ID NO: 137281

SEQ ID NO: 241467 - DNA, 291 bp, Klebsiella pneumoniae
gtggcctttaaagcggcagtctcccgggaaattttcgctgccaatgaccgcgtgacgctgcgctttatcgatgcgggagagatctttcctgccgaacgcctggcgctggcgcgtaacgatgagcactttgatgtcgatccgttagctgaaggcggcaggggcttgcggcttattctgcgtgcggtggactattttaatgtggaaactggcgccggggagaacgtgactaccctgatagaagcgttgcctgatacccgcctaagccatgccaccgacgatcgctgcgggtga

SEQ ID NO: 241468 - DNA, 303 bp, Klebsiella pneumoniae; identical to SEQ ID NO: 241436

SEQ ID NO: 241469 - DNA, 192 bp, Klebsiella pneumoniae
atggcggtggggatcctgtgcgggattggctttacgatgtcgattttcatcgccaccctggcctttggcagcgtggatcccgcgttgatcaactgggccaagcttggcatcttgatcggctcagtgttatcggccgtcaccggatacctcatactgcgtcagcgcgcgacggatactcgcctcgcggtataa

SEQ ID NO: 241470 - DNA, 435 bp, Klebsiella pneumoniae
gtggcgtttagccaggggccgctgcagatgaacggcaccttctttatcgttctggcggcgcacttcgtgctgatctccgcctttaccttcagcaacgtaacgaccgggctggcgcgtatttccgctgatattgaaaacgtcgcctccagcctgggcgcttcgccgtggtatcgcctgcgccatgtgacgctgccgctgatgacgccgtggatgatctcggcgctggcgctgagcctgtcgttgtcgatgggagagctaggggcgacggtgatgatctatccgccgggctggacgacgctgccggtgaccattttcagcctcaccgatcgcggcaatatcgccgatggctcggcgctgaccattgtgctggtgggcgtcacgctgctgttgatgatgaagcttgagcgtatcgcccgccgattaagccagagataa

SEQ ID NO: 241471 - DNA, 507 bp, Klebsiella pneumoniae; identical to SEQ ID NO: 137281

SEQ ID NO: 241472 - DNA, 405 bp, Klebsiella pneumoniae; identical to SEQ ID NO: 241416

SEQ ID NO: 241473 - DNA, 447 bp, Klebsiella pneumoniae
atgctctccggcctgtatggcgtgctgcgcccgctggacctgatgcagccctaccgcctggagatggggatccgtctggaaaacccgcgcggtaaagatctgtaccagttctggggcgataccattaccgagaagctgaatcaggcgctgcaggctcagggcgacgatatcgtcatcaacctggcttccgatgagtattttaaatcggtgaaaacgcaaaaattgcagggccagctgatcaagccggtcttcctcgatgagaagaacggcaaattcaaagtgatcagcttctatgccaagaaagcccgtggcctgatgagccgctacattattgaaaatcgcttaacccagccggagcagctgaaatcctttaatagcgaaggctatttctttgatgcggaggcatcggagaaaggcgaactggtgtttaaacgccacgagcagtaa

SEQ ID NO: 241474 - DNA, 291 bp, Klebsiella pneumoniae
gtgaaagcgcaccactggcccggcgaagggcggataacctttgccagcaggaatagcgccgcgctgccggacgccagtgcgctactggcgctagtaaaggcatggcaggcgcaggacttaccgcgtcaggtgacgttcgctaatggcatgcgcaaggtgggattcggcgaactgccagcctatccctgcggaggcacccacgtcgcccgtctggcggagctgggcgacattgtcattagtcagattaagatgaagaaggggcaactggtggtcagctacaccctggcgtaa

SEQ ID NO: 241475 - DNA, 381 bp, Klebsiella pneumoniae
atgctgacctcgcttatcggcacgccgtggctgccggcgatccgcgacggcatcctggtggtggaggatatcaatgagcacccgttccgcgtcgagcgcatgctgcttcagctgttgcacagcggcgtgctggcggcgcagaaagcggtgatcttcggcagcttcaccggcagcgcgccgaacgactatgacgcgggatacgatttgccgcaggtctttgattatctgcgccagcagctatccctgccgctgattagcggactggagtttggccacgagcagcgcacggtgaccctgccgctgggcgcccgcgcgcgcctggtgaatcaggcggcggccaccaccctgacgatcggcggccatccggtgctgacagaataa

SEQ ID NO: 241476 - DNA, 264 bp, Klebsiella pneumoniae
gtggcgctgctacagcaggcctatgcgcaggatctgcatctaccgttgctgcagctcatgctgacccctgatgagcgtgaagcgctggggactcgggtgcgcattatcgaagagctgctgcgcggtgagatgagccagcgcgagctgaaaaatgagctcggtgccggcattgcgaccattacccgcgggtccaacagcctgaagtcggcgccggttgagctgcgccagtggctggagcagacgctgttggctagcgataaatag

SEQ ID NO: 241477 - DNA, 135 bp, Klebsiella pneumoniae
atggagaaccagctggcggcggtggtcaatgatgccaaagtgacgccggaagcggcggtgcaggcggcgcagaaggaagccgacgcgctgatgaaaccgtatgtggataagaccgcgctggcggaagtgaagtga

SEQ ID NO: 241478 - DNA, 189 bp, Klebsiella pneumoniae; identical to SEQ ID NO: 241448

SEQ ID NO: 241479 - DNA, 309 bp, Klebsiella pneumoniae
gtggccttcctgttagccccttgcccgtggggagcgtttcccggccacacgctcgacgatattcagagcgggcggggcaaggtgcataacagctttatgctggagaaaacggagcgcacggtgattgaggcgccgtttcggccgtttccgcgtagtctttggcatggcgaactgacgctgatgcccctgccgccctggttcatcacccaccgggggcaggaagcggtggcgcagcggctggtggatttttaccatcggccgcgctggcgcaaattgccggcgctcctctggcgcgcgctgcggggctaa

SEQ ID NO: 241480 - DNA, 261 bp, Klebsiella pneumoniae; identical to SEQ ID NO: 112066

SEQ ID NO: 241481 - DNA, 387 bp, Klebsiella pneumoniae
ttgagcgggcaattttcagcgaccagcgccgcgcagattgacgtggtcatcgattacctgtggggacacagcgcggaagtgttattgccggccctggcgaaatataccccagccggcagaccggtgcgctatgtgcaggtggggtccctggctggcgccgatatcgcgttaaatggcgcagttctgcgttccgcaccgctcgtgctgatgggcagcggtatcggtagcctgtcgatgccgcagctgctggcggcgacaggtgaaatgctgcaggcggcggtgccgggtaaattcaccatcgccaccaccccgcggccgctgcaggagatcgcggcggcctggccgcgggacgacagccagaagcgcacggttttcaccctcggataa

SEQ ID NO: 241482 - DNA, 147 bp, Klebsiella pneumoniae
atgctgctgggcgaagtcaaagtcgtcctcggtgagtgtctctgcctgcaggccagtgtagacatcgcctttaaaggcgaggatcgcctggcgggcattttgcggcgtaaagtcagggtgccagtcgtggaagcgggtggcgtttag

SEQ ID NO: 241483 - DNA, 255 bp, Klebsiella pneumoniae
atgccctacagctgttttggcaatgctgccggcgttggccctgctcatctgcaacgcgccatcctgataaccacggttagcgtgtccgcgtaccttgcgggctatctgctcatgcgtatcacccagcagaaatccctgccgcaccgtattgctgatacgcgccatgcgatcggcttcaaggttatcagcccactcactaagcaggcgcccctgaaatggctgtgccatcgccgcggcatacactgcatccggtga

SEQ ID NO: 241484 - DNA, 297 bp, Klebsiella pneumoniae
gtggtcaactatgaacaaaaaatccagtccgcctttaaagaggtggccgacgcgctggccctgcgccagagcctggccgatcaaattgccgcgcaggagcgctatctcgcctcgctgaatatcaccctgcagcgcgccactgcgctctatcgccacggcgcggtcagctatatcgaagtcctgagcgcccagcgcgatattttcaccacccgacaaaccctgctggaactcaactattcccgtcaggctaatgaaatcaccctgttcaccgccctcggcggcggctggatggaataa

SEQ ID NO: 241485 - DNA, 297 bp, Klebsiella pneumoniae
gtggtcaactatgaacaaaaaatacagtccgcctttaaagaggtggccgacgcgctggcccagcgccagagcctggccgatcagattgccgcccagcagcgctatctcgcttcactaaatatcaccctgcagcgcgccaccgcgctctatcgtcacggcgcggtcagctacatcgaagtcctgagcgcccagcgcgacattttcaccacccgacaaaccctgctggaactcaactattcccgtaaggcaaatgaaatcaccctgttcaccgctctcggcggcggctggatggaataa

SEQ ID NO: 241486 - DNA, 222 bp, Klebsiella pneumoniae; identical to SEQ ID NO: 241461

SEQ ID NO: 241487 - DNA, 276 bp, Klebsiella pneumoniae
atgtattataaaatagtaaggtgccatttagtaattaatctaaaatcacttcacattaaaccccgctattattattcatttgggggttttatccttcaggtaataggttttcataaaggtcaagcgatcaccattaaacatatagtccgggttaataaagtaatagttctgtatcatggtctctgcaataaacttcttgtcagcaagttctttcatgcctttgaaatatgttgttctggatatttttacaacatcttgatcaacgatatcgaatga

SEQ ID NO: 241488 - DNA, 276 bp, Klebsiella pneumoniae
atgacaatgatggatatgagcggtcacgatcaggctgcaatgacccatgaaatgatgcaaaacggcaacgcttctgcccatcaggacatggctgaaatgcataaaaaaatgatgaaatccaagccagcagcttctaacgaaacagcaaaatcattttccgaaatgaacgagcatgagaaagccgctgttgtacacgagaaggcgaataatggtcagtcttcagtgattcatcagcagcaggctgaaaagcatcgcagccagatcacccagaattaa

SEQ ID NO: 241489 - DNA, 270 bp, Klebsiella pneumoniae
atgatggatatgagcggtcacgatcaggccgcaatgtcccatgaaatgatgcaaaacggcaattctgctgcccatcaggacatggctgaaatgcataaaaaaatgatgaaagccaaacctgagaacacccaagaaactgctaagccattttccgaaatgaacgagcatgagaaagccgctgttgtgcatgagaaggcgaataatggtctatcttccgttattcatcagcagcaggctgaaaagcatcgcagccagatcacccagaattaa

SEQ ID NO: 241490 - DNA, 210 bp, Klebsiella pneumoniae
gtgatcctgctggagaacaacaccccgtgggtggctgatgggttacgcagtcttgggagttcggtggatcgtaaagagtttcagtcgctgctggtgtcgctgctgaaagagaatgagatcgagttcgtccatgttaaggagtcggactatgatacgcgcttcctgcgctgcgtcgagctggtgaagcagctgatgggggagcaggggtag

SEQ ID NO: 241491 - DNA, 216 bp, Klebsiella pneumoniae
atgttctgcaatggtaacggtgaacgtcgctacaaagtgaatgtaaagcgatgtccggtctacacggaatcacttgaacagcaagtatggggtgacaacggtgagccggataaaacggcggataacgatcaccccaacgatgccggcgggtatttcattgtgaagcaattcccgatcatcaaaccgactggaaaagtcacccaactgcggatgtaa

SEQ ID NO: 241492 - DNA, 216 bp, Klebsiella pneumoniae
atgttctgcaatggtaacggtgaacgtcgctacaaagtgaatgtaaagcggtgcccggtgtacaccgaatcgcttgagcaacaggtttggggcgaaaacggagaacctgacaaaaaagctgataacgaccaccctaacgatgctggcggctacttcattgtgaaacagttcccaatcatcaaaccgaccggaaaagtcaccaaactgcggatgtaa

SEQ ID NO: 241493 - DNA, 234 bp, Klebsiella pneumoniae
atgtgggcggtgaccaccggcggcggtgaaagccactttgatatcggttcgtttcccggttttccggtgctggcgcagcctctgcaggcaaccgcgctttactgcgggatgaagtggctgccgccgttcgctatgcactgcacctttatctgcgatgatgaaacgctgcaggcgcaggcccgccgctatcgtcaacgcttaatcgactggcaggaggcacaccagaatggatag

SEQ ID NO: 241494 - DNA, 141 bp, Klebsiella pneumoniae
atggcgcagttcatcgccggcgttgagcaggttctgcaggttctcaatcaccggcaggccagcgccaacgttcgtgtcatagaggaacttgcggcgcgagctgctcgccgcgtggcgcagctgatgatagtaatccagtga

SEQ ID NO: 241495 - DNA, 168 bp, Klebsiella pneumoniae
atgtgcgcgccggattgtcctggcactcgcttccgacagtccccagtgtttcactttcccctcctggatcagcgccttcacggtttccgccacatcctcgatcggcacattcgggtcggggcgatgctgataaagaagatcgatgtggtccgttttcagacgctttag

SEQ ID NO: 241496 - DNA, 201 bp, Klebsiella pneumoniae
atgaaccgttttcgcctgctggaggccgcgccgcgcgctgaatttagccgctataccggacttgaggaagcggcgatccgcccgcagctggacgcggcgatagcccagggctacctgcaggaagacgagcagaactggcagattaccgagcacggtaagctgttcctgaattccctgcttgagttgtttctgaacgagtaa

SEQ ID NO: 241497 - DNA, 225 bp, Klebsiella pneumoniae
atgaccgaaatttcgctggcctggctgctgacaaaagtgacgtcgcctgtcgtaggggccacaaaaaaagatcacgtcgatggcgcggtaaacgcagtcaatcttcacctgagcccggaggaaatccagtttcttgaagaaacctaccagccgcacgttctgacggggatcatggcgcaaaacacgccgcaaacgaaggacgttaagcaggtctggacgcggtaa

SEQ ID NO: 241498 - DNA, 225 bp, Klebsiella pneumoniae
atgaccgaaatttcgctggcctggctgctgactaaagtcaccgccccggtgatcggcgccacgcaaaagcatcatgttgacggcgcggtcaacgctgtagcccttcaactgagcccggaagacatccgttatctggaagaagcctatcagccgcacttcctcacaggcgtgatggcgcaaaacacgccgcaagccaaagaccgtcctcaggtgtggacgcgctaa

SEQ ID NO: 241499 - DNA, 291 bp, Klebsiella pneumoniae
atgaataatatgcccagcgtactggtcggcgccctgtcgattgatggcagcgcggcaacagggacgatcaaagaggccatgatttatgccaacgtcatcggctgcgatctggggcccaagatcacgccaattggtagcctggccacgctgctgtggctgcatgtgttggcgcagaagcacatcaccatcggttgggggtattatttccgctgcggcatcaccatgaccctgccggtgctgcttgtgacgctggccgcgctggcgctgcgtctctccttcaaccagccatga

SEQ ID NO: 241500 - DNA, 276 bp, Klebsiella pneumoniae
atgcgtcccatcaccctcgacgagctggcgcaggtggcagcgctgagcccgtaccactttcagcgccagtttaaagcccactatcacgtgacgccccaccagatgctgatggctatccgtctgtggcgcgccaaggcgtttctcacccacggcatgcccgccgccgaagtagcgattgccgtcggcctcaccgaccagtcccacctgacccgcgccttcaccctgcgttacggtattacgccggtgcgctatcagaagcaggtcgccaggcgctaa

SEQ ID NO: 241501 - DNA, 216 bp, Klebsiella pneumoniae
gtgctggtggacggcgtacgcaccaccaccgtcgggcgcgtgtcgatggatatgttggcggtcgatttaacgccctgtccgcaggccgggatcggcgcgccggtcgaactgtggggcaaagagattaaaatcgacgacgtggcggccagctgcggcaccgtcggctatgagctgatgtgcgccctggcgccgcgggtgccggttgtgaccctgtaa

SEQ ID NO: 241502 - DNA, 177 bp, Klebsiella pneumoniae
atgtacgccttgaaaatatatacgtacatgatttccgtggacactctattaaccatgccgggaaccgtgaactatatgccagaggattgcgatttaattcacatgtcgcacaggcatttcctttgggtggctcgcgcggagacgggattaccggttgctcagaaatcgttgatataa

SEQ ID NO: 241503 - DNA, 183 bp, Klebsiella pneumoniae
atgggcaaggaagatctcctgaacgtgcacttcaccctgccggaagcaaaaatcatggctatccacctcgaggcggtcaaccactgcctggtgagtcgggaagagatgcgccagtatgcgctggataatcagattgccgatgtggtttctatcccgcaggatggagaaaccgtcgtttattaa

SEQ ID NO: 241504 - DNA, 183 bp, Klebsiella pneumoniae
atgggcaaggaagatctcctgaacgtgcacttcaccctgccggaagcgaaaatcatggctatccacctcgaggcggtcaaccactgtctggtgagccgggaagagatgcgccagtatgcgctggataatcagattgccgatgtggtgagtatcccgcaggatggggaaaccgtggtttattaa

SEQ ID NO: 241505 - DNA, 204 bp, Klebsiella pneumoniae
atgccggcaatcaggatcgccatcgccagcaccggcggcagcacctgggtggcaaacaagaaggcgaagccgctgttctccaactgcgggttcatggtccataccgccataccgatgatcgccggcaggaaggagaatcccagatacagcaggccggtaatcgtgaaagagtggcgtaccgaagagacggtcttcgctgagtaa

SEQ ID NO: 241506 - DNA, 183 bp, Klebsiella pneumoniae
gtggtgttacacgaccactatctcgatcgggtgactgacgttgcgcagcatttcccgcagcgggcgcgtcaagatggccgtttctacgccatcgactttaccctggacgagattaagtcgctgaagttcaccgaaggttttgagccgaaaaatggtaagaacgtgcaaacctatcccgggtga

SEQ ID NO: 241507 - DNA, 201 bp, Klebsiella pneumoniae
atgcgctatgcggtggtggtctcctatgccaacggcgctggcgcgctgctgcgcaccttctcgtcaaaccggcaggacgccatcgaggagattaacgacctcgacgccgatgagttcttcgagcatgtggcgaaaaaacacccggctccgcaggcgccgcgctatatctggaagctgcagaaagcgctggacgccatgtaa

SEQ ID NO: 241508 - DNA, 2175 bp, Klebsiella pneumoniae
atgtcaccagtgactaataaagatatatcaaaagagtctgaagggattgatttaggtcgtttaataggtgaattaatagaccatagaaaattgatcatctctgttactgcgttgtttgcactaatttcgcttatttatgcgcttttttcgactccagtttaccaagctgatgccttaatacaagttgaacaaaagcaggcgaatgcaattttgagtaatttgactcaaatgctgccggatagccaaccacaatctgcgcctgagattgcactccttagatcacgaatgatcttagggaaaacagtagatgaccttaatttacaagcgagagtagaggaaaagtttttccctgtgttcggtagggggtgggccagattaagcggtcagtcactaggggaagtaaatatatcgcgcttttatgtatctgatgctaaatcgaatgatgatgagattaagtttactttaaaagtaattgataataagcaatatgtattaactggagataattttaccctcaaagggcgtgttggtgaattaattgagggggatggcgcgactataaaaattgatagtattgatgccgaaaagggaagtgaatttgaaattaaatatgtaacaaagcttaaagcaataactgacttgcagaatgaccttatagttatagatcagggcaaagataccggtattctaactgtctctctaacgggtgataatccggcattaatcaaaaggataattaacagcatcagtaataattatctagcacaaaatattgcaagacaagcagctcaagatgaaaaaagcctcgagtttttaaatttacaattaccgaaagttcgatctgaattagatattgcagaaaataaactaaatgcatatagaaaacaaaatgattctgttgatctttcgctagaagctaaatcggtacttgatcagatagttaatgttgataatcagttaaatgaactgactttcagagaatctgaaatatctcaactctacacaaaagaacatccaacatataaagctttaatggagaagaggaaaacgctacaggatgaaaaaataaagctgaacaaacgtgtctcaggtatgcctgaaaaacaacaggagatattaagatttagccgggatgttgaatctggcagagctgtatatatgcaattgttgaaccgacagcaagagcttaatattgccaaatctagcgcaataggtaatgttaggattatcgatacggcagtgactcagccaaagcccgttaaaccaaaaaaagctctggtagttttactcggaattttcgttggtgcaatattttctgttgcgttagtgcttctacgtgtcttcctgcgccgaggaattgagagtccggagcaactagaagaattaggtataaatgtttatgcgagcatcccggtatctgagatgtttgcaaaaaaaatgactcaacctattaatttacgtaagaaacaaaacgaagatggagcaggttttttggccttagagaaccctgctgatttagctgtagaggctataagaggtttaagaactagcttgcatttcgcgatgatggaagcaagaaataatatattgatgatatccggggcaagcccaaatgcgggtaaaacatttgtaagctctaatttatcagctgttattgcgaatgctgggaaaagtgttctttttattgataccgatatgagaaaaggatatacgcataaacttttcaatgttaataatcagaatggcctatctgattatctttctgggaaatctgatattaagagcattgtaaaaaaactcgatgatgctggctttgatatcatttcacgtggtgttgtgcctcccaatcctgccgaattattaatgcataaacgtttctcagaactgcttggctgggcaagtgaaaactacgatattgttattcttgatacgcctccgatacttgctgttacagatgctgcaataataggaaattatgcaggaacaactttactggtggctcgctttgaacttaatacccctaaagaaatcgatataagtgtaagacgctttgaacaaagcggtgtagttgttaaagggtgtatattaaatggagtcgtgaagaaggccagcagttattacggatatggttataattattatggctattcgtatagtgaaaaaagtaagaaataa

SEQ ID NO: 241509 - DNA, 246 bp, Klebsiella pneumoniae
atgtggcaattgtcttccatacgcacacgcgactttatcattttcaaatgctgctataatattttctacaaatccagcttctggaattgcgtcctgagtcataaatattacgatatcgtactgtgtcttgtgcatttctactgcgaggtttcgagtccctccatgattaaactcagcagtatcaatcttatgaacattaaaaccatgcgcgatggcgatatctcttgtattatcagtgctatttga

SEQ ID NO: 241510 - DNA, 1158 bp, Klebsiella pneumoniae
atgagctggcagcagcgaatcgatcgggcgctggacgagcggcgggcggcggaagcttttcgccgccgcctgccggtgacgcacggcgccgggcgctggctggagcgggaaggggagcgctggcttaacttctccagcaatgactatctgggcctgagtcagcatccggcgattatcgccgcctggcaacagggggccacgcgctatggcgtcggtgccggcggctcgggccacgtgagcggctatagcgaagcccaccgcgcgctggaagaggcgctcgccgactggctgggctatccgcgcgcattgctgtttatctccggctttgccgcgaatcaggcgctgatcgccgccctggtggagaaagacgatcggattgtcgccgaccgtctgagccacgcctctctgctggaggcggcgagcctcagcccggcgcagctgcggcgctttacccacaacgatccgcagcagctcgcgcaactgctggctaagccgctggcgggcgaacagttggcggtcactgaaggcattttcagcatggacggcgacagcgcgccgctggcggccattcacgccgcgacgcaggccgcaggggcagtgttgctggtggatgacgcccacggtgttggcgtggtcggcgacgaaggacgcgggagctgcgccgcgcaggcggtgcgccctgagctgctggtggttaccttcggcaaggccttcggcgtcagcggcgcggcggtgctgtgcgacgaagcaatggccgattatctgctgcagtttgcccgtcatctgatctacagcaccgcgatgccgcccgcccaggcggtggcgttgagcgctgccctgggaatcattcgcagcgatgaagggcagcagcgtcgcgacatcctggccgcccgcatccgtcagttccgtgaggggatgggcgaggtgtcgctggggttgaccgactccgtcagcgcgatccagccgctgatcgtcggcgacaacgcccgggcgctgaacctggcctgccgtctacgcgacgcgggctgctgggcaacggcgatccgtccaccgacggtgccggtcggcagcgcgcgtttgcgcctgaccctgacagccgcccatcatactgaagacattaaccgtttactggaggtgctgcatggccacagtgaataa

SEQ ID NO: 241511 - DNA, 327 bp, Klebsiella pneumoniae
atggaagagaaaaaagcatacgggctggtcatggtgtttgtcggggtgtttgtctttctcctggtcagcattatgtcgtacagcctgtggcgggacaggcaggttaacgcatttatgacaaccaaccgggcctgggggatccagtgcgacactgtttctcaggccgcgtgggtgatcagggacggggagcgggtggaccttcagataaatcatctgcctctgtactgcagcggttatcgctttgaagcccgtgatgatgcaggaaaggtacagcgccagctcgataaatacagtgtctatcagcatctgtcacgccagtcgcattaa

SEQ ID NO: 241512 - DNA, 237 bp, Klebsiella pneumoniae
atgaatgataatattgcaatatcagtaagtctgctatgtgagcaaacacctgaaatactctgtaccatccaagcaagcgtcagtacgttcattgcgctatgcgggtattcagccgaggaagtaatggatgatgaaaacctgacagatgcgttgaacagttatgttaataacgaactggtcagtgaaatggatttaagatatggatcagtgaacattaatctggtttataaaaagtag

SEQ ID NO: 241513 - DNA, 312 bp, Klebsiella pneumoniae
atgaatacggatgataaaggtagaaagccgagatcagaaaaaaccattaagcaaaaaatagcatcagctcaaatgcgtctgaatcgccttaagagtaaagaaaaatctctatccaagagcgcagagacacgcttaaagatcattttgggtgcagaagtggctaaagctgttggctgcaaagtagaagaagtggataaagagttaatattaggattgatattacaatcctcgaatattagcattgaagataaagcaaggttaaaattaagaggaaaaagatttcttgaggatatggttgggaggcagaaatga

SEQ ID NO: 241514 - DNA, 198 bp, Klebsiella pneumoniae
atgggagacatcgttaaatctaccatgcgtattcttagtttctttagcttgtccatcccaattaccatcaatttcgccaccttcccagctaaaatcgtgattataatcgccttgaattataaacattgtcttattaacattatcagccagtttaattattacattatcatcacatctaatgtgcaaatttttatgtaa

SEQ ID NO: 241515 - DNA, 636 bp, Klebsiella pneumoniae
atgtctcaaatgaccctccattttcttaatgcccagaagaaactcactgctcactatgaatggcttcaaaccaacctgactgatacctacgaacaagctaacaggttaatgccgattccttcactggacgtggtggttaaagcagggaaacttgtcatcccggagaaagggcatgttggtttttgccctgaagctggagttgtctatataactgtagatcctgaaaatccaacattttgcaaaaatgatgcgcactccattgaacgaatgtttgcacatgaactgcaccatgctgttagatgggccgggccgggatacggctcaactttaggagaagtcatagtctctgaagggcttgccgggcatttttctcttgaactttttggtggtgaacctgaactctgggaaaggctcaaatcagaacttattaagccctacagcccacaattgtttcaaaactggtataatactgattacgatcataatgcttggtttttcggaaccggggacttgccaagatggctaggatataccacaggtttcaaactgatttccagatacctcgcagcattcccgcatttaaaggcttcaatgctggcgaatataaatgctgaggagctaaagacatttatttga

SEQ ID NO: 241516 - DNA, 330 bp, Klebsiella pneumoniae; identical to SEQ ID NO: 224106

SEQ ID NO: 241517 - DNA, 237 bp, Klebsiella pneumoniae
atgctggcgcggaactgcgccgcccggcgccctggtcgcgaaccctacgaaatggccgagtacatcgcgctgctgatccgccaggatgacgcccgggtgcgcggccggattaacgccatcagcaaacgccgctgcggcaagtgcggcgatcaactgccggtggcatcctgcccgcactcaggagaagccgcatgctgggtgatgtacggctggcacgaaacgaaactaccgctgtga

SEQ ID NO: 241518 - DNA, 570 bp, Klebsiella pneumoniae
atgtatagcgaaagcaaaactgcgcaaatggctggctatctgctgcttaaacgtggtggacgcatggcatacatcaagctcatgaagttgctgtatcttgctgacagggaatacatgatcacttacggcgactccatgactggtgatcgtgccgtatccatgaataatggacctgttctgtcaagaacgtatgacctgctgaaatcaggtagcccggaggaagaatcaccctgggatgactggattgccggtgaggcagattttgaagtgtcattgaagaaacgagttaacggacttgatgacgatgacgcattcgatgagctcagcaaggcaaacaaacgcattcttgacaaagtatttgatgaatatggccggtacaaacgatttgagctttgtgacctgactcatcgagtatgtgctgaatggcaaaatccgcatggctcatcagttccaatcagccctaaagatattcttatggctggggggaaaagtgaatcagaagctgatgaactaattcgccatatgcgtgaaagagatgcactcaaacagttcagcaggcaacttgcatga

SEQ ID NO: 241519 - DNA, 327 bp, Klebsiella pneumoniae
atgaacagcattgatattgcgggtctggttggcagccgtcatgacagcgttaaacgcgcaatcgaaagactagccgccgccggcgtaatatcccaacctccaatggaggatggggaaaaatcggcaaatggtgttgtgacaaaggtgtttatttttgaaggtgaaaaaggaaagcgcgacagcatcattgtcgttgcccagctcagccctgagtttactgcccgcctggttgatcgctggcaggaacttgaaacgcagatctctgagtttgaaagtcaaactaccgagatctcggtagttacgaaggaaggcaagaacggtggctaa

SEQ ID NO: 241520 - DNA, 1083 bp, Klebsiella pneumoniae
atggcgcgagaatcacagccagcacgtaccgggctgacgttggcccttaacaagggtatctggcgggccaatttttatcgtttctgccagctactggaacaggaaaatccggacgttcctaaactgggcaccaccagccatccgggcgacgatccggtacgattcagaccctggcctggtatgggtttcccggtcagtaccctgaaagcagtggagactgacgaagaccatccgacattacccccaacggttcgcacgacatttctaggggtgtatggcgtggactcgcctctgccgacgtcctggctggacgatattgcgcagcgccgcgaaggacacgaggcggttacctcattcctggacattttcagccaccggatcaccacgcagtattaccggatctggcgaaaatacgcgtatccggcgaccttcgaggccggtggccgtgatgccacatcacagtgtctgctggggctggttggactcggtataccaggcacagcggaacgggtggcaacgccggtttcccgttttctggccctgctgggcaccatgcgattacccacccgtaatgccgaaggtatccgggccctggtgagcctgttggcaccgaatacccgggcaattatcaccgaacccgatccggttaaggtccatattgataaccgcagtgggctgggtaccggaaaccgcatccgtctttcgcagcgggccacgctgggtaaaacggccagggaagcatgcagtcgggtactggtgacgctggaaacggaagatccgggcgaagcggaaggctggttacccggtgctgtcctccataccgatttgctggtcctgctgcgcgtctatcttggctaccgcagtgacgcccgactgcgcctcacggtacccgtgcggttattgcctgagcctcgcgttggcaaaggcaggcgtattcagctgggccgaaccggtttgctggggctgaaagcaggaaaactcagcaataacagggagagtctgactgtcagcctgggctgctatgaagggttgcaatgctctgttttacctcctgctgaagacgggcattaccgcttcgactaa

SEQ ID NO: 241521 - DNA, 717 bp, Klebsiella pneumoniae
atgattagaatatcagcaaatgcttactatgaggattcgcaacttccagatgttgagctatgccttgatgagttgttttatatttctaaattgatagactcattactgaaaacaaaaaagaggtggtatgaaaagggttattcaagaaagcaggcgctcgagcatatagtatttaaccatgacaaggctgagtctgatgttattgagaggtggcgtaagcaaataaaaaaagatttccctttaattattgaaggtgtatgggatggtgaagttgaaagcaggatctgctcaataaattacataaaaaaacatattgataacttaaaaaagaccaacttagatgtgagtattacatgtaatgaggaagaaataaatgaaactaaagtcattgaatttataacgtctttaatttgtaataaaaagaatgtgtatgcctctataaatacaaacggatactggaacaatagtaacaatgttttccctgatcgaattcctgttggatggatgatttatattccagcaataatcctagcagatttaattcctgaggctgccagagtagtgccagtaatggatggcgagaaacagaaaggcaccatagttgtttctactgaagaaatattcgatggcaacaacaaagaacatatcggcaaatctaacgatttagaaattaagcttctggatcttggcctgttaccattgatgacagagctttaa

SEQ ID NO: 241522 - DNA, 939 bp, Klebsiella pneumoniae
atgcaaactcctaaaaaattatttaaatataaaagttttaacgatgattgtatggagttgataattgatgattatttgtattttgcaaacccaatccaatttaatgatccgttagattgtaaagttacaatattcgatgatgtgaatgatgaggagcagttacgaaatattctttcaacgcttcttcagcaaaactctgaaaagaaattaaaggtggccgcaaaaaacctacgttacaatggtccaaaaaccactgacaaaatttctcttttaagcatgagtgaaacagataaaataatttcaggtatctattctgaattttcatttggactatacgactataatgccccgacgatcaaacaagtattagctaatacgattgggaatattatattgtcagggtataatagaggggtgctttctttgtcaaaaaaagataagtgtccgctaatgtgggctcactatgctgataaccataaaggcctttgcttaggttattctatacctgaaagtgttgctaataaaataagaccaataagctatacaagtgaatctagagagataaagattagtcagatacataggatgttagcgggggatcaaaaggcaaagacagaaatagagcatgatatatttttgagaaaggccaaacagtggaaatatgaagaagagtggcgaatgttatcagatgttggtttacaaaattcatctatatatctgtctgaaataacttttgggcttcgttgtaaatatacaactattttcagtgttatgatgtctctctctaaaagagagaccccgattgatttttatagaattatcgaagtcccgcataaattcactctcaaaaaagaaaaaatatcatttgatgatgaagaattgcaaggcttgccgagatgcatggaaagccttgttcaaatgttgaatgatgatgattaa

SEQ ID NO: 241523 - DNA, 246 bp, Klebsiella pneumoniae
atggacatagttataaatgtacagaagtcactggttgaagaggtcgcaccaggtaaagtggaggtctatatcgctgaactaaaaaatcgattagctctcttctatccctcagcggaaataactgtgacagcagaggaaagacgtaactatatcaaggttaacgacccggtaaacattaccgatgaacagacagtcagcaccatcacggatgagatttttaattctggggagtggcggtatttataa

SEQ ID NO: 241524 - DNA, 1233 bp, Klebsiella pneumoniae
atgaaaatcagcatacctggcgcaaaatacaaattatcttgggtttttgttttaatgtattttttgccgtcttttatttttgttttctttaagcaatcctcacttgctgtaggtattgcgatcgtttcaatattaataatactctttgatatattacaaataaccaaccgaaagataggagttaagggactaattttattcgtattagtaataatgtttttattaatcgagtcatttcactcggtgtactcattcaacgacagcaaacctattatgtcaattccagttgtaatccttatgattatagctgcatggtctctttcttttagaatagagaatagcgacgaaatagtcgttaaggattcttttaagtttgctttatgtgtatttttatttttcggctggctagctgtatttaggacaattgacattggcaattacgcatcaaaagggaaaggtgcgtttcccttctcggaggatagtcattacgccctttgtgccggtttcctttcttgcatagttggatcaacctcaagttttaagggtaagcttttcattctactaaatatctctgctcaagccattctattccccaatcttaccttgctggttttctctttgatatgctgcttcctgttttggttttcaaacagattcttattgttggcagttttaatttgtgttgttgcagtatctggaacactgattttgcagtcaatgcaaggaacatttgcaggggattacttactatctcgcatggacctaagtaaaaactcaaacaacctcactacattggtttttttacaagggattgatgacagtattcgcgctctcactgacacatatggcattgggttaggatttcaaagggctggaacagatacccttggagaatatggctatttaatcaaggtgcttaccggcggtgaatacaaccgtactgatggtggctttctttcttcaaaaattataactgagtttggggttatgggacttatggcatccctcttatatatcttattaatattaagaagtgtaacgaattacagacagtcagacagtcagacagtcagacagtcagacagtcagtatatcataaaaatatcatcagccgcaatgattgcattctctgttgagttctttttgagagggtatggttatttctcgccaagtgttatcttgcttatggctctagcactatgctcaataagaatgaagaaaaatagcatataa

SEQ ID NO: 241525 - DNA, 1056 bp, Klebsiella pneumoniae
atgaatagacgtggatttatccgtaattttctccctcttccacttttattaatcggtggttccaatcaatcttctgctagtcaacccttaacaacggataggccatcattgaatggtgatggtggagaggaagatcacgcttcaaagcttcaatccgttcttgattatgctgcatccttagcgaagaaggttcctaatggatatcaaaaaaccgagatatttctctcgggggtatttaacgtcagaaaggcattaactatagatgctaacaaagtatgcattactggccctgctaccttattatttgatatagaaatcgataagtactgcatcgaatttaacggggtaagcgatgtaagctcagcatataccaacaatgttggtgcccttttcgactcaattaattttttttcaaggaggaaagcagatttattctattgtgccgccagcactttaggagataaaaatccagtatgtttaatgaatattacgaagtgcagatttactggttttgattgtatttttacaaacggacctggcggttgggggtggacatggtctatgtgtggttttaactcatgccagacgctgcttaaaataaaaagagagaaagaaacatatgagcgttatacatttgtttcctgtatatggcagaatggtggtgttgctttctatgttgataaccctgatggtaaaatatactggtctgatggtagttttgattattgtaaatcgattgccattatatctaatgggcatgtgcagatatccggtcatgtagaatttaaggggaggaatcgtccgttagttcaattatcagggatagggtcttcattcacatttaatggtggctcaattttcataagaaagaacgtcggcagatatgtaatgtttgagcaggaatacgataatcagatatctcttatcggagttaattttttatctgatggagtgaatttagatgactctctgatatcgaacaggaaatataactcttatgctgttaattttgggaatgaaaaaacaaaggatataatgaaaaatattccctattaa

SEQ ID NO: 241526 - DNA, 888 bp, Klebsiella pneumoniae
atgacgcgattaacggccaaagatttcccgcagcagttgctcgagtattatgactactatgcccacggcaaaatcagtaaacgcgagtttctccagctggcggggaaatatactgtcggcgggatgaccgcgctggcgctgtttaatctgctgaagcccgactatgccctggcagagcaggtaccgttcaccgacccggatatccgcccggagtatattcattatccctctcctgacggtcacggcgaagtgcgggcttacctggtgacgccgacaaaaatagccgacaaagcgcccgctgtggtggtggtgcatgagaaccgcggcctgaacccctatattgaagatgtagcccggcgggtagcgaaagcggggtacatcgcgctggcgccggatggcctgagcgccgtcggcggctatccggggaatgatgatgaaggccgcgccctacagcagaaagtcgatcccgtgaagctgatgaatgatttttttgcggcggtcgcgtttatggcgaactatccacaggcgacggggaaggtcggtatcaccggtttttgctacggcggcggcgtcagcaacgcggcggcggtggcgatccccgagctggcctgtgcggtgccgttttacggtcgccagccgccgctgaaggaggtcgataaaattaaagcaccgctgctgctgcactatgccggcctcgatagcggcattaatgaaggctggcctgcctatgaacaggcgttgaaggaacaccataaagtctacgaggcctatttctatcagggcgtgaatcacggctttcataatgattccacgccgcgctacgatcgggctgcggctgatctggcctggcaacgcacgctggcatggtttgagaagtatttacgctag

SEQ ID NO: 241527 - DNA, 180 bp, Klebsiella pneumoniae
gtgctgctgggggccgcctttgcccgcccggagctgcaggacgtgatcaagtggcacagtaaatacgcccgtcagaacggcatccatgtctcgccgacctttatggtcaacggcctggtgcagccggatctgggcagcggcgatgatgtcagcgtgtgggccgcgcggattatggcctga

SEQ ID NO: 241528 - DNA, 936 bp, Klebsiella pneumoniae
atggaagatattacagtttctgccgttatcccgacaatcggtcgggacagtgtatttaaaactattgagtcagtactcaaacaagagattccggttaatgagattgttctttgctatgatggtgatgattttgacgttttcgaaagaaaagtaagtgagcgtctccccgggcgagaaaacattaaaataataaattgtggtccattcaatggagggaataatgcaaggcaaactggaattgaaaattcaaattcatcatacattgctttattggatgacgatgatgagtggttatctcatcacactcaggaatttatccatgcaataaaagataaaatcacatttgcagattttatcttttactcatctggtgtttttttgatcgaagatggtcttaagataggtgagcgaccgggtaggatgaaaataaacaatgaatcattttcggaatacatatttgttaaaaaatcatttaattgggaaagcggttttatccagtcgtctataatgatattttcaagagcattggctgaagctataccgtttgataaatcattgcgttttcatcaagatatagactggatacttaaggtgcaaagatctggtctggattatttatatatacaaaatccaatgaaaactgttttatattattccactgcagatagtgtatccaaaaaaataactgcagatgattccttctcttgggctttaaggtcttttgaccctatggataaacggcctctgggtgatttcttgcttacgcaaacattcagattcgctaaaagcaacggcggatatataaagtcatgggaggttttttttaacggtatcaagtgggggcagccttctatatattcaatcaccttggctttgtcagctttattattgccaaagagtgtgaaaagtgtattaaagaaaattttgaaaagataa

SEQ ID NO: 241529 - DNA, 321 bp, Klebsiella pneumoniae; identical to SEQ ID NO: 5987

SEQ ID NO: 241530 - DNA, 450 bp, Klebsiella pneumoniae; identical to SEQ ID NO: 91796

SEQ ID NO: 241531 - DNA, 486 bp, Klebsiella pneumoniae; identical to SEQ ID NO: 5988

SEQ ID NO: 241532 - DNA, 486 bp, Klebsiella pneumoniae; identical to SEQ ID NO: 5989

SEQ ID NO: 241533 - DNA, 696 bp, Klebsiella pneumoniae; identical to SEQ ID NO: 5990

SEQ ID NO: 241534 - DNA, 1131 bp, Klebsiella pneumoniae; identical to SEQ ID NO: 5991

SEQ ID NO: 241535 - DNA, 1284 bp, Klebsiella pneumoniae; identical to SEQ ID NO: 5992

SEQ ID NO: 241536 - DNA, 1380 bp, Klebsiella pneumoniae; identical to SEQ ID NO: 5993

SEQ ID NO: 241537 - DNA, 528 bp, Klebsiella pneumoniae; identical to SEQ ID NO: 5994

SEQ ID NO: 241538 - DNA, 1941 bp, Klebsiella pneumoniae
gtgcgtaacttccgtaactctttgttggttactctctttggcttgtttataagcatgagtgtctgggcgtcgacgaattatgcgcctttgattgaagatatcgagcaacgtcttgataaaacagcggaactttatcagcaacagcatgccgacgaggcgcgccgcacggtacaaatggcctattttgaggtgttcgagaacctggaagggccgatccgcatcaacatttccgcgcgcaaaagttacgagatggagagcgcattcggcgagatccgtcgaatgattggcgagaaaaaaccgctcgctgacgtccaggcgcgcattgactggctgaaagccgcactgcgcgaagtggaaccggtgctggatggcggacatcgtctggtggccgaagagcagcacaacgcgctgtccagggacgacattgccgttcactggcaggagagtttcaggacgatcgacgatctgctggcgcaggcggtcactgaatatcaggccgggaattacagcgttgccagtcagcacgttcaacaggcgcactatcagggctttaaaaactctgagatggagatgtccctcagacaaaaccgttctgcaaaagatgccgcctccattaaccaacaattctcatccctgattgcgctgaccgcgcaacctgaccatctcaacgatgtctcctatcaggtcactacgctgctacaggatatcgaggatatcttacccggcttgccaaccacccgtgacgatcagcaggttgccgcagcgcaaagcgcagacaacattccggcggcggacgagggaaataaccgcaccgactgggctgaggtgacgacgggaattaaccagagcattcaggacgcgatagcgcgctatcagggcggcgatgcgaagaatgcgattctggatatccaggatacctacttcgaccgcttcgaagccagcggcatggaaaacaaaatcggctctcgcgattcggcatttaaaaccacgctggaggcgtattttacccgcctggtcagtctgatgaaggccggtcagccggttgagcgcctgaatgcagaggccagcgcgctggcgcaggatctgcaaaaagccgtgacgatgctgggcgaaggcgaagaaacccagtggagtctgctgctctatagtctgatgatcatcgtgcgcgaggggctggaagcgctgctgattgttgcggcaatcgtggcctacatggtgaaaaacaaccatcaggataagctgccgcttattcgtcagtcggtaattgtggcgctgatcgccagcgtcatcaccgccgctatcttccagatgctgtttactaactccggcgccagccgtgaactgctggaaggcataacgatgctgattgccgtcgtgatgctgttctttatgagttactggctgctgtccaaagtggaagcgcgccactggaaagcctggctggaaggcaaactgtctcattccctgtcgcgaggctccctggtcggactatggctgaccagcttcctggcggtgtaccgcgaaggggcggaaacggtgctgttctattacgctctgattggcgatgcaaacacggtatccggccatatggcgattggcgccggttttgtgattggctgcgtggtgctgctgctcgcctggctggtgatgcgttactcagtggtgcgcctgccgctgaaacccttctttatgtttaccggcagtttcatgtatctgatggccttcgtctttgcgggcaaaggcgttctggaactggtggaaggcaaactgttccagcctacgttgattaacggcttccctgaaatcagctggctggggatttatccctacgtggaaacgttgttaccgcaggtcgtattgctgctcgcggcgctggtggcgctgtgggtgatgcggcgcaaaagcgcggttcccggggagacgataaaaaataacccataa

SEQ ID NO: 241539 - DNA, 762 bp, Klebsiella pneumoniae
atgcgcaagggtaaaattattgttgcatcaatgatggtgctttgtgtccttatttttgttgcggcggcggcatggtttatgctgttccagggagaaatgacggagccgacagaggaggaaaaacaggcggcaattttacacgctgcgggcctgatgaaatcagagacccaggataaaaaatcagtcgaaacgctctatcatcgttatattattcaacgccatgttaatttagattccggcgaactggtggctggcagcagcgcggacaccgcgcggcagaagtgtgaaaaacttgcccctgaacgcgacccagcgcaggttcgtcagcgctgtacggtggcggatgtgttctttgtgaaagataaaaataatgaaattcagcaggttatcattccagttaccggtaagggcgcgaaatccatgatgcatgcgtttcttgctctggggctggacggtcgtacggtgagaaatctgtattattatcagcaacgggaaacgccgtttctgggggctagggtggaagacgccaactggcgcaaacagtggccagggaaacgattattagataacagcggacatcctgcattgaaaatagtacaggataaacctgaacatgccgatgaatataccgttgacggtatttccggtgcgacgttgacatcaaccggcgttgagaaaagtattaactactggatggggccgcagggatatggtcaattcttacagcgtcttgccagcgatcgaaataaccttaatctttga

SEQ ID NO: 241540 - DNA, 507 bp, Klebsiella pneumoniae
atgctcagtaaactgcgccgctggctgcgtgaaggcgcgatcttactggttctgctggctggcgtgataatcctgctggatgtctggcgttctccgcagatgccggccatgtttgacagcacgccgctgcatacgctggacggggaaaccgtaacgctggcgtcgatcagtgaagaacgcccggtgctgctctacttctgggcgagctggtgcggtatctgccgtttcaccacgccggatgtcgcccgtttgcagtcggaaggggagagcgtcatgaccatcgcgctgcgttccggtaatgacggggaggtttcccgctggttatcgcgtaaaagggtgacgttccctgtcgtgaatgatagcggcggtgagatatcacgaaactgggaaatcagcgtcacgccaacgctggtggtggtgtcgaaggggcaggtggtaactacgaccagcggctggaccagctactggggcatgaagttacgtctgtggcgggcagccatgttttga

SEQ ID NO: 241541 - DNA, 159 bp, Klebsiella pneumoniae; identical to SEQ ID NO: 5998

SEQ ID NO: 241542 - DNA, 261 bp, Klebsiella pneumoniae; identical to SEQ ID NO: 12476

SEQ ID NO: 241543 - DNA, 306 bp, Klebsiella pneumoniae; identical to SEQ ID NO: 5779

SEQ ID NO: 241544 - DNA, 168 bp, Klebsiella pneumoniae; identical to SEQ ID NO: 5936

SEQ ID NO: 241545 - DNA, 642 bp, Klebsiella pneumoniae; identical to SEQ ID NO: 5937

SEQ ID NO: 241546 - DNA, 321 bp, Klebsiella pneumoniae; identical to SEQ ID NO: 5938

SEQ ID NO: 241547 - DNA, 2166 bp, Klebsiella pneumoniae
atgtcttcagttaaaaacagagccgttattaaagaggcggatgaaatcgatttagcacgcctgctaggagagcttatcgaccataggaaactcattatttccattaccgcattatttacgctatttgctcttttatatgcactattttccacccctgtatatcaggctgatgcactattgcaagtggaacaaaaacaaggaaatgcaattcttaatggcctgagtcagatgttacctgacagccagccacaatcggcaccagaaatagcgctactgcagtcccgtatgattttgggaaaaactgttgatgatctggggttgcaggctcgagtagaacaggattattttcctttatttggaaagggctgggcgcgattaaccggtaagcagataggtaatgtgaccgtaagcagactctatttaccttctgatagtgaattagatattccgaagctagagttaactgtaaaggataaaatgcattatagtgtgacttttaacgataagaagatgtcgggagaagttggtgttttgttaaatactcatggtatttctcttaaggttgataatattgaggcagattctggttcggtatttaccattacttatgtgagtaagcttaaggcgattacagacttgcaagaagttttctcagtaactgatcagggaaaggatacagggatgctgaatctgtcattaacagggcccgatcctcgattacttgagaaaatactcacaagcattagtaataattatttggctcaaaatgtagaccgccaagctgcacaggatgcaaaaagtctagagtttcttagtgaacagctacctaaagtgcgcaacgatttagatattgcagaggataaacttaatcagtatcgacaacaaaaagattcagttgatctctctttagaggcaaaatcagtacttgagcagatagtgaatgtcgataatcaattaaatggattgacctttagagaagcagaaatatcccagctttacaccaaggagcaccctacctataaggcattacaggagaaacgcaagactttgcaagatgaaaaagaaaagcttaatcaacgggtctcagcaatgccaaaaacgcagcaagagatattacagttaagccgtgatgttgattcaggacaagcagtttatatgcagcttttaaaccgccagcaggagcttaatatagccaaatcaagtgctattggtaatgtgagaattattgatgatgctgtttcccaaccgaagcctataaagccgaaaaagataataatattattgggtggtattcttttaggtggggtaatctcagtagggatggtattactaagaatatttttgcgccaagggattgaaagccctgaacagttggaagaagtaggtattaatgtttatgccagcgtacccatttcggaagctatcgctaaaagaaacgtacaatcctttaggcggaagaaaaaaatggagaacgggaacggacattttttaattgctgaaaacccagcagatttagcaatcgaggctatccgtggtttgcgtaccagtttacattttgccatgatggaagctagaaacaatgtattgatgatttccggtgctagcccgaatgcggggaaaacatttattagttctaacctcgctgcaataatagctcaagccggacagaaggttcttttgattgatatggatatgcgtaaaggatacacacataaattatttaatttaaataatgataatggattgtccgatattttatccggtaggaccgaaattcaaaatgcgataaagaatgtttcagtagcgggtattgactatatttcacgaggcatctctcctcctaatccagcagaattattaatgcaccaccgtttgggtggacttattgattgggccagtcagaactatgatattgttatattagatacccccccaattttagctgttactgatgctgctattattggtcattacgctggtactacgttgcttattgctaggtttgaggagaatacggttaaagaaattgaggttagctttaaacgctttgaacaaagtggtgttattgttaaaggatgcatccttaatggtgtggtgagaaaggccagcagctattatggttatggctataatcactatggatattcttatacggacgataaatga

SEQ ID NO: 241548 - DNA, 327 bp, Klebsiella pneumoniae; identical to SEQ ID NO: 5975

SEQ ID NO: 241549 - DNA, 261 bp, Klebsiella pneumoniae; identical to SEQ ID NO: 17248

SEQ ID NO: 241550 - DNA, 510 bp, Klebsiella pneumoniae; identical to SEQ ID NO: 5976

SEQ ID NO: 241551 - DNA, 348 bp, Klebsiella pneumoniae; identical to SEQ ID NO: 5977

SEQ ID NO: 241552 - DNA, 336 bp, Klebsiella pneumoniae; identical to SEQ ID NO: 17229

SEQ ID NO: 241553 - DNA, 567 bp, Klebsiella pneumoniae; identical to SEQ ID NO: 170886

SEQ ID NO: 241554 - DNA, 876 bp, Klebsiella pneumoniae; identical to SEQ ID NO: 5981

SEQ ID NO: 241555 - DNA, 777 bp, Klebsiella pneumoniae; identical to SEQ ID NO: 5982

SEQ ID NO: 241556 - DNA, 2262 bp, Klebsiella pneumoniae; identical to SEQ ID NO: 5983

SEQ ID NO: 241557 - DNA, 1176 bp, Klebsiella pneumoniae; identical to SEQ ID NO: 5984

SEQ ID NO: 241558 - DNA, 267 bp, Klebsiella pneumoniae; identical to SEQ ID NO: 5985

SEQ ID NO: 241559 - DNA, 327 bp, Klebsiella pneumoniae; identical to SEQ ID NO: 5986

SEQ ID NO: 241560 - DNA, 357 bp, Klebsiella pneumoniae; identical to SEQ ID NO: 6160

SEQ ID NO: 241561 - DNA, 192 bp, Klebsiella pneumoniae
atgacgaaacaacagaagaccgcgctgaacatggctaaattcatccagcatcagtctctgctcctgctggagaagcttaacgagcttgatcttgatgctgaggctgacctttgtgagaaactccacgatgatgcggagcatcttttccgtacactgtcctcgagactggatgaattacaggatggtaactga

SEQ ID NO: 241562 - DNA, 1140 bp, Klebsiella pneumoniae
atgaataaacctaggtttaatggaacacctatagcatccttggattctttggctgcgatgttaggtatagacaggaaaagattggactggatggtcttatcagtatctaggtcatacaagcagtttactgttgaaacaggaaaaaataaaaaagaaagaaaaatatttgagcccaagagatctttaaagggtattcaaaagaaaataaataaagaaatatttgaaaatatagattaccctcattatttgcatggggcgataactgggcgtgactatatatcaaatgcatccgtgcacacaaagaaaaaaacaataatatgtctagatataactaatttttatccaagcattagtaagcgggatgttactcttatatttaaaaatttaatgcgattctctcctgatgtatctattgctttaactgagcttgtgacattgaataatcaagttccgcaaggagggtgttgctctagttacattgcaaatcttttgttctttaatagtgagtataatctttataatagattgcaatctattgggtattcatacacaaggttgttagatgatattacaatatcctctgatgaggatatttcattagaagagaaaacaaaagtaattcaactcgtctatagaatggtttctcagcataggctatccataaatgaagataaaacgacaatagagcacaccaaggactcctcttcgaagcttagcgtcactgggttgtgggtgaagcatggtgttcctaaattaacaaaagagaatagacgatatataagatatttggtgtatatatgccaaaagcaagctgcttatgagcggcatacgaaagagtatcatgatttatggaatagatgttcagggaaggttgcacaaatgtctcggcttgggcatgttcaagctaatgagttaaggtgcgttctttctgatatattgcctatttatgatgactataaaataggtaagttaaaatatgtggctaagcattatttaagtaagtttacgcaccctttgagtgaagagcaaataagaaaagttgatagaatgatctatgactttgatatagttggtcgaactaatgaaaaactagcaaaagactatagaagtaagcttagagcgttgcttcctgagaggtga

SEQ ID NO: 241563 - DNA, 183 bp, Klebsiella pneumoniae
atgtttattttcaacatcaacatttacgtaaccaagagctcttcatcttgttccggagacggacagaagaagaaaaaaagagaggttggctctctggaagtgctgaaaaccccgcagttttggggttgtatgttcttgatttttgttaaattattagattatatatcaaaattctttaactaa

SEQ ID NO: 241564 - DNA, 855 bp, Klebsiella pneumoniae
gtgcatccggtggtgtttttggaggcgatccgtttaaaaactcaatgtgcctgtaatagggatataactttagaagaattaaaagaggtggctcccacagtaaatgagtcagttcttggtagatatctcgccgatataaatgaaggttttactcgattcggtatgactacttgcagggagaaggcgcattttcttgctcaacttatacatgaaagtggttatttcagatttgctagggaaattaggggggaattggctccttatagtccttggtttggtcgtggtttaatccaaattactggggcggataattattctgcctatgaaagatatatcggtgaggacgtaacatcttcagattcagcaagagataaactcatcacgataccgcattgtatactgtctgcattttggtattttaatgtatttaaaacattacatgaagacgcatgcaacgatgattttaacaaagttaccgcgaagattaatggtggatttattcattataacgaaaggctatcgctttttaataggttggtcacttcattacatgctgaacatttaaatgaaaaatatatagatggggatttctcatttgaaaatagtggcatatataataataaagtatatgctctgggttgggggctatggcatgatccgggtagttcccagcaaggtacagtcaagagcaaagagaaagcactgacaggatatagacgagcaaaagatttaatagctttttctccgtttcctcaagagggccgggagggactgaagaaaatttatgggatagagcgaagaaatgtagccgcatttgttgatagaagaataactgaattggagtcatcaatatga

SEQ ID NO: 241565 - DNA, 954 bp, Klebsiella pneumoniae
  misc_feature (126)..(161): n is a, c, g, or t
atgtataagaaaatgtattttttacttctcttcttttctttttcatcattagcatccgtgaaaagctattcatactggtttgctccaaatcattacgaatttttactcgatgaaaaaagatcaaannnnnnnnnnnnnnnnnnnnnnnnnnnnnnnnnnnnatatttaggagattatgacatatcagtttttcagttttatgctgggtatcttgaacgtctagacgataaaatgatgagaaatgaatttgccacactaaagaagcacaatatagctatttctattgaggcacctccattagttgttccaaatctcggtcgtgcttcggaagggtttggtcataaagatagcatcaaaaatttgttggttagaatcaaaagtaatggtggagatattaaattcattacgatggatgaacctatcatggcatggtataaaatgcataatcattcattgagtgactctgatataaggaaattagttgaagaattatctgaagtgactaatgatatttattctattttcccaaatgttaaaattggagatgtagaacctctcaaccagtttgatggagatgaggaaatgattttttcatccttcatcgattattataataaaagatttgagaataagctgagttttctccattatgatgtttcgtggggggggggatggaaatcaaaaataagttcgctcataggattagctgataataaatctataaatactggggtcatttttaattcgcaaaatactggcggcactactacatcttggatgcataatgccgaagataatattgaaagttataaatcgttgaatatcccatcactgcagcatattattgttcaaagttggagtaaatatcctttggcaataacaccaaacgattctaaaacaaattcgtatcatatgtatttattagaaattttaggtgcaaaagtcacacattaa

SEQ ID NO: 241566 - DNA, 624 bp, Klebsiella pneumoniae
atggatgatgctgattactatattttaatggatgatgattctattcttaccgatgaatatatttcaatgatttcctctctgggaaaaaatgattttgatatactagtgccaagaataaaatctatcaaagatgattgtatatattatcccgtagagcatggttcggttattgtagaagatcgaatattagattctatgaaagttttttccataggttcagggatgatcatttcaaaatgctgtgtggaaaaaattttggcatttttctcaaacgtttttgatgagagatatgctttttatggtgttgatatgagcatttttcgaagaattcggataatatcaaggaagataaaaggcaatgattttttgattgtatcaaagtctatggtattacattctctttctcgtgtagattctcctcttactttcttcagggcaagtgagagattaattgatgcagctttaacatttagaaattattttagtgtcctaaatgcaattgatttttttagaattttattaaaatgttttcctaccttaggactgaataattcattgaagatttctttgacaactttttttaatggttgccattttagaataaaaaaatggaattcgagatag

SEQ ID NO: 241567 - DNA, 867 bp, Klebsiella pneumoniae; identical to SEQ ID NO: 71859

SEQ ID NO: 241568 - DNA, 1134 bp, Klebsiella pneumoniae
  misc_feature (20)..(29): n is a, c, g, or t
atggactcaaagccacgaannnnnnnnnncacgaaaggctcagaaagcgaaacttgggttcaagaaatatgggaacaagctataactgataattggggggagttagcggaagtacgcattgcccaagtattaccacctgtaatgtcactttggctgaaaatagaatcgagaccagttaatattagtacaatatattggcagacgatccctacatttaggctttctgcagatttagagcttgagtatgtcattgatcatttacttctggcagaccgaagtcacgatgctcttgcgtggcttgctaataatataaaaatagaaccagagggctcagttattattagagtaatgcataccgctgcaagcactaaagactcttccaataatgataatacgatgtcgagctattatattggtattctcctagattacctggagagtgatgtaaagacttcaaaagaagaacttgtgaggctcgaatggatttattttcaagttttacggtattcacgacatccagccaggaacttacatcaggctcttgctaaagaccctgtattttttacctcactaatgaaattactctatctacctgaagaagatagtggtgtagttgaatctgaaccagcaaatcctaagcaggcccgtgatctagcaagccaggcatatcaagttttgcatgattgggcaattgtacccgggaccgatgagaacgggactattgactcttatgtattgatgtcgtgggtcaagcaagctcgtcaattactgaagtctgcaggtcgtggtgaaataggtgatgacacgattggtatgattctctctgccgcaaaaagaaaaaaaaatgaaacgtggccgccagaagcaattcgcgaagttcttgagtttgctagaagtcgagcaatggagagtggttttgaagttggtgtttacaaccgccgtggcgtaactgtacgcatgccacatgatggtggggggcaagaacgaatattagtagaacgctataaacaagatgctgatgatcttagatttgaatggcctcgaaccgcagcttgcttagaccgcattgctataagctatcaacaagatgcaattagagaagatcacagtgcggaccaaggtgattggttataa

SEQ ID NO: 241569 - DNA, 258 bp, Klebsiella pneumoniae; identical to SEQ ID NO: 135178

SEQ ID NO: 241570 - DNA, 405 bp, Klebsiella pneumoniae; identical to SEQ ID NO: 203623

SEQ ID NO: 241571 - DNA, 291 bp, Klebsiella pneumoniae; identical to SEQ ID NO: 139383

SEQ ID NO: 241572 - DNA, 192 bp, Klebsiella pneumoniae; identical to SEQ ID NO: 76488

SEQ ID NO: 241573 - DNA, 576 bp, Klebsiella pneumoniae; identical to SEQ ID NO: 76487

SEQ ID NO: 241574 - DNA, 237 bp, Klebsiella pneumoniae
atggtggtggtgagtctggcggtggtgagtccggcggtggtgagtccggcggtggtgagtccggtggtggtgagtccggtggtggtgagtccggtggtggtgagtctggcggtggtgagtccggtggcggtagttctggcggtagttctggcggtagttctggcggtggctctagtggttccagtctttctaaaggtgatattcagtctgcgatcgaaggtgcttcacccaaaatag

SEQ ID NO: 241575 - DNA, 183 bp, Klebsiella pneumoniae; identical to SEQ ID NO: 138576

SEQ ID NO: 241576 - DNA, 408 bp, Klebsiella pneumoniae
atgatggatattgaaacgactggggcttccaaacttgacaattaccagaattttgctaaagccttccgagtagaagactatggccgtgtaatgggtaatatttctgcaaataaggcacagttgaagcgagtgtgcgagtttacttcacgtgaactgactgatagcactgaaatcggatcaacttggcttgggtccctgatcattggtttacaagaaatactcaatgaaaaagagcctcaagctgtaattagtcagttacaggaagagttgccagactttatagagatccgccccctgttaatagacattctcaacttttttgagaaaaaagctcctgagaaagctactcgtgatgccgctgaggtattaggtgcgcgcttgaggaacatgcgggcgtttggtcagtga

SEQ ID NO: 241577 - DNA, 339 bp, Klebsiella pneumoniae; identical to SEQ ID NO: 207937

SEQ ID NO: 241578 - DNA, 348 bp, Klebsiella pneumoniae; identical to SEQ ID NO: 203618

SEQ ID NO: 241579 - DNA, 231 bp, Klebsiella pneumoniae; identical to SEQ ID NO: 203619

SEQ ID NO: 241580 - DNA, 543 bp, Klebsiella pneumoniae; identical to SEQ ID NO: 213964

SEQ ID NO: 241581 - DNA, 423 bp, Klebsiella pneumoniae
atggcgggacgggattaccggattgatccggatctgctccgggctatttcatggcaggaatcgaaatgggtggtggatgctgtcggtaaaaatccgggaacaggatacggtgccggactgatgcagatcgattcgcagcaccatgcccggttatcggagttcggtattaaaccggaacatcttctgacggatgcctgcctgaatatttacactggcgcgtattatctggcgctggcgtttaagaagtggggcgtcagctgggaggcagtcggtgcctacaacgcgggattccgcagaacggacaggcaggacatgcgacgactggcatatgcgagaaaaattgaggctatctaccgggccatcaaggcaaataaaaatgccggacaatcccgggctgttaaaaacgaaagacctcatgaatga

SEQ ID NO: 241582 - DNA, 396 bp, Klebsiella pneumoniae; identical to SEQ ID NO: 183187

SEQ ID NO: 241583 - DNA, 687 bp, Klebsiella pneumoniae; identical to SEQ ID NO: 183188

SEQ ID NO: 241584 - DNA, 366 bp, Klebsiella pneumoniae; identical to SEQ ID NO: 213959

SEQ ID NO: 241585 - DNA, 306 bp, Klebsiella pneumoniae; identical to SEQ ID NO: 213958

SEQ ID NO: 241586 - DNA, 567 bp, Klebsiella pneumoniae; identical to SEQ ID NO: 213957

SEQ ID NO: 241587 - DNA, 741 bp, Klebsiella pneumoniae; identical to SEQ ID NO: 213956

SEQ ID NO: 241588 - DNA, 1422 bp, Klebsiella pneumoniae; identical to SEQ ID NO: 213955

SEQ ID NO: 241589 - DNA, 435 bp, Klebsiella pneumoniae; identical to SEQ ID NO: 100988

SEQ ID NO: 241590 - DNA, 564 bp, Klebsiella pneumoniae; identical to SEQ ID NO: 213953

SEQ ID NO: 241591 - DNA, 204 bp, Klebsiella pneumoniae
atgattaagtttcaggattttaaaaaagataaaaaaacatctggcgatggggagattgactgcgtccgtaaaatgaatgaatggattgaaaacaagaaaattcaggtaatttcagttgaaaccctgaccgaagttactggcgacggtttctctaccgacacctgttttataatgctcaggctctggtataaggaagtctgttaa

SEQ ID NO: 241592 - DNA, 414 bp, Klebsiella pneumoniae; identical to SEQ ID NO: 213951

SEQ ID NO: 241593 - DNA, 300 bp, Klebsiella pneumoniae; identical to SEQ ID NO: 213950

SEQ ID NO: 241594 - DNA, 225 bp, Klebsiella pneumoniae; identical to SEQ ID NO: 213949

SEQ ID NO: 241595 - DNA, 405 bp, Klebsiella pneumoniae; identical to SEQ ID NO: 203623

SEQ ID NO: 241596 - DNA, 291 bp, Klebsiella pneumoniae; identical to SEQ ID NO: 139383

SEQ ID NO: 241597 - DNA, 318 bp, Klebsiella pneumoniae; identical to SEQ ID NO: 202556

SEQ ID NO: 241598 - DNA, 840 bp, Klebsiella pneumoniae
atggaaaagcgtgggattttggagcgtgatgccgagaatacgtggttgacactggaagagggcgaagacgatacgctgactcaattacatggtgcttcggttacgtatcgcattgccgtcggcccccagcaagggcgcaaagtcttcaccctgcaaaccttgccagggcgtgaggataaagccgactcaagcagtcgagtagccaaccatgctggtttctcgctacacgccggtgtgatggccgaagcgcatcagcgggataagcttgagcgcttgtgtcgctacattagtcggccagcggtttcagaaaaacgtctggcattaaccgccaatgggcaggtgcgttacgagctcaaaactccgtaccgcaatggcaccacccatgtgatcttcgagccgctggacttcatcgccaaactcgctgcgttggtacctaagccgcgagtcaacctcacacgcttccacggcgtctttgcaccgaacagcaaacaccgagttcaagtaacacccgccaagcggggcaagaagcccgacaaatcggaaggtctcgatactaactggcgtgacaagagtcctgcagagcgccaccgcgccatgacctggatgcaacgcctcaagcgagtcttcaatattgatattgaagtctgcgaacactgcggcggtcacgtcaaagtgattgccagcatcgaagatccgaaggtcattgagcagattctcaagcatctgaaacagaaaacagccaaggcgaatgccgccaagcagcgtgagctgccaccagaacgagcgccgccactgactcccagcctgttcgatccatcacagagtcgtctctttgactga

SEQ ID NO: 241599 - DNA, 219 bp, Klebsiella pneumoniae; identical to SEQ ID NO: 139514

SEQ ID NO: 241600 - DNA, 558 bp, Klebsiella pneumoniae; identical to SEQ ID NO: 25303

SEQ ID NO: 241601 - DNA, 912 bp, Klebsiella pneumoniae
atgaaacgtgcggtgatgctgttcgagcgcgccgaatactgggaacagcgcgcgcaggcctctctgcggcacgcgaaatacaaggagcgtccggatgtgcgttaccgccgtatcaaaaaaatcgaggcggaattacgcaagtcccaaaagcacattacccggtctgaagagtatatgacgatgtggcgtgcgcagacgctcgatctgaaaatggcgttactggtcagtaattatgaccatatttatgcctgcttcacgctcgacaaatacccccgcccggcagagaaaagccagtatgagggctcgatgtctctccattctgccctgtctgaggagatcattacttttgaacaggcgcgtgatattgcgatccgctgtcatgagcgcacgattagccaccaacagcgctgggttaatcattaccagaaccgcctggcctacgaacgcgcgatgctcaatgaaaatggtggcgttgtcacccgaacacaggaatttgaaccaggcgggcaggtactgagccggggagaatggttaaccattctccgggttaaccggagtaagggggaggtgagttcagtcgaaacgcccggttatcgctttctgggctacagcggcacgatgaaactcacgcccgaccgtatcacggactacaaagccccgacagcggaggaagccagcgacgcgaagaaagcggcgaagcgcccaccgatcgtcaattatccgggggaagggttccgggaaatgacaaaagccgagtgggcgaaattacccgctgattataaaggcgtgcggggtgctgcagaaaccgaaacacacggcgcctaccgcttccgccggtgcatgacgcacggttgtacgctcgtgaatgtgtatatcacagacatgaaaaccgttgaaattccgaaaaaatga

SEQ ID NO: 241602 - DNA, 159 bp, Klebsiella pneumoniae; identical to SEQ ID NO: 139694

SEQ ID NO: 241603 - DNA, 888 bp, Klebsiella pneumoniae; identical to SEQ ID NO: 10348

SEQ ID NO: 241604 - DNA, 639 bp, Klebsiella pneumoniae
atgaaattaatgaatctgtttatggtcatgcttttgctgaccggacgagctgtgttggctgaaacttcctctgttacagacatggaatggctgaagcagcaggagaacctcagcgaacaactgcaccagcatccggataaacagctgcagcaggagcttgaggcgcaaatcagccgcaatcctctgcccaaatctgaccgccagtttatcgataatctggtcagccagcagaaagcggcgaatcaggaaaaaccggcagaaggggcgctgtactttgtctccttctcgatacctgaagaggggctgaagcggatgctgcacgaaacccggcagtatggcattccggcgacactgcgcgggctcgtcaataacgacatgaggaccaccaccgacgcggtgctgcagctggtgaaagacggcgtcaccgacggggtgcagatcgacccgacactatatacgcagtacggcatccggagtgtgccgtctctggtggtacggtgtcaggccggatatgacgtggtacgcggtaacattcacgtcaaacaggcgctggagaaagtggcacaaaccggtgactgcgcacaggtggcccggcagatgcttgatgcgccctcaaatgccgccgggagccagccatga

SEQ ID NO: 241605 - DNA, 372 bp, Klebsiella pneumoniae; identical to SEQ ID NO: 104932

SEQ ID NO: 241606 - DNA, 480 bp, Klebsiella pneumoniae; identical to SEQ ID NO: 104057

SEQ ID NO: 241607 - DNA, 480 bp, Klebsiella pneumoniae; identical to SEQ ID NO: 203675

SEQ ID NO: 241608 - DNA, 1017 bp, Klebsiella pneumoniae; identical to SEQ ID NO: 135533

SEQ ID NO: 241609 - DNA, 381 bp, Klebsiella pneumoniae; identical to SEQ ID NO: 234463

SEQ ID NO: 241610 - DNA, 3003 bp, Klebsiella pneumoniae; identical to SEQ ID NO: 137993

SEQ ID NO: 241611 - DNA, 219 bp, Klebsiella pneumoniae; identical to SEQ ID NO: 222344

SEQ ID NO: 241612 - DNA, 396 bp, Klebsiella pneumoniae; identical to SEQ ID NO: 183187

SEQ ID NO: 241613 - DNA, 687 bp, Klebsiella pneumoniae; identical to SEQ ID NO: 183188

SEQ ID NO: 241614 - DNA, 741 bp, Klebsiella pneumoniae; identical to SEQ ID NO: 213956

SEQ ID NO: 241615 - DNA, 1422 bp, Klebsiella pneumoniae; identical to SEQ ID NO: 213955

SEQ ID NO: 241616 - DNA, 435 bp, Klebsiella pneumoniae; identical to SEQ ID NO: 100988

SEQ ID NO: 241617 - DNA, 564 bp, Klebsiella pneumoniae; identical to SEQ ID NO: 213953

SEQ ID NO: 241618 - DNA, 204 bp, Klebsiella pneumoniae; identical to SEQ ID NO: 241591

SEQ ID NO: 241619 - DNA, 300 bp, Klebsiella pneumoniae; identical to SEQ ID NO: 213950

SEQ ID NO: 241620 - DNA, 225 bp, Klebsiella pneumoniae; identical to SEQ ID NO: 213949

SEQ ID NO: 241621 - DNA, 405 bp, Klebsiella pneumoniae; identical to SEQ ID NO: 203623

SEQ ID NO: 241622 - DNA, 291 bp, Klebsiella pneumoniae; identical to SEQ ID NO: 139383

SEQ ID NO: 241623 - DNA, 834 bp, Klebsiella pneumoniae; identical to SEQ ID NO: 24079

SEQ ID NO: 241624 - DNA, 294 bp, Klebsiella pneumoniae; identical to SEQ ID NO: 24078

SEQ ID NO: 241625 - DNA, 267 bp, Klebsiella pneumoniae; identical to SEQ ID NO: 24085

SEQ ID NO: 241626 - DNA, 279 bp, Klebsiella pneumoniae
atgcacggtcaacatgatcactttggtgcccgccacggagcgcgcgattttgcgcgtcgcttcaagaccaccgatcccaggcatgttcatgtccatcaggacgacatctgcggaattagcccggcaccacttgacggcgtcctcgccgcagcaggcttcgccagcgactttaatcccttttatatcttccagaatgcgtcgtatccctgcgcgcaccagttcgtggtcatcaacaagaagaacgttgatcaaaggaataatctccagaatgagggataa

SEQ ID NO: 241627 - DNA, 414 bp, Klebsiella pneumoniae
atgaataatatgtcatttatgatttggttttccgtttatgcctgcgcgatgattaccttaggctggtacgtttcgcgcaaacagaaaaccggcgaagactttttacttggcggtcgttcgctgccgatgatcctcactctcggttcgacggtcggcaccatggtggggaccggctccagcgtcggcgccgtcggctttggctacagcaacggctgggccgggatgctttacggcctcggcggcgcggtggggatcctgctggtggcatggttattcgcaccggtacgtaaacttcgcttcatgaccatgagtgaagaaatgtcgtattacaccggcgtagtaaaattattaaaaacctcgtcgcgatacttatttttattgcctctatcggctggctgggggcgcatatattag

SEQ ID NO: 241628 - DNA, 423 bp, Klebsiella pneumoniae
atgaccaatatcaccgaactggtgcagagagagaaattcgaagcgtggcgggagcgcgagtataaacatctcgaatcctcgaaatataccgatgctgtgccgcatatcaaatacggtttctggatggcatatcaggccggtggcgctgagctggtagaggcgctggagaaggcgaaggccaaagcagatatatacgacatgcttcgggatgactacggtttgcgcgaaaaaggtgttgggcttgcagatttcgttgactggcaggctaagcgcatcgccgagctggagtcccgcaccgtgaagctgccgcatcgaaatctggggcaccctaaattattccttctttgcccgttcccttactacgacgcagaggatatggagaaggctctggccgccgctggcatcaaggtggaggctgagtag

SEQ ID NO: 241629 - DNA, 576 bp, Klebsiella pneumoniae
atgaatcagttgttatcatcaattgaagaatctttggcgaaggaaaattggttcggagctttgtttattgccatttcactaccagatatctgtggtgccacagaaaacgctgtgcaaggaaatggagccagatatagagattggttcaatcggtatcttaagccgcgatacaacccagacaacttctatgagttaatgctcgtcacctcgccggaggctttacaaggaatgccgctagatatggtagagcaatggaaacaacagcctccaaaagttgcatttactgcagaagactgctggagcttaagaaatgcatgtttacatgaaggggtggatgaaaatcgattgcggaagtttaaaattaccccgccaaccaatgtgggcatatctatgcacatgaataacttcaatggtacccttcagcttgatgtcattgaactttgtaaagacattgttagtgcagttcggcaatggattgatgatatgcaacaaaaccctgatgtggttgctaaattagaaaaaatgatcaccattgataaaagcacatttaaaggcattattgatttcggggactaa

SEQ ID NO: 241630 - DNA, 669 bp, Klebsiella pneumoniae
atggctcatcaaatcttaagccatcagcatcataatgcgccatcttataatggcgtggcaggcgtttatcagattaccaacaccatcactggtgaggcgtatatcggttccacggttaatatttcaggacggtgggcgagtcatcgttataagttgcggaaaggaactcatgggaacagaaatcttcaggagtcatggaataagtatggaaaaggcttctttgagttttccgttctggaagtagtgagtgataaatccgaacttattgcagccgagcagcgattctttcgcgaattaaacccgtctttcaacattgcgccaaacgccgggagcagcctcggagttatacacaccgaagaatccaaggcgaatatggcggaaagccggcgcggagataagaactgctggttcggcaaagttccagcctgtgcaggtatgagcagacagcctgaagtcaaagctaagatatcaaccaagaattcaggcgctggcaaccctatgttcggtgttaccccgccacacgccaagttcactgatgatcaggtgcgcgaaattcgtcgcgccatttctgaaggttattcactcactgttatcgctagcaagtatggtgtttcaaaagcgactattgctcatatccggcagggtcgatcctatacgagggtggtgtaa

SEQ ID NO: 241631 - DNA, 348 bp, Klebsiella pneumoniae; identical to SEQ ID NO: 195283

SEQ ID NO: 241632 - DNA, 840 bp, Klebsiella pneumoniae
atgaacgttattgcaatcatgaatcacatgggggtttacttcaaagaagaacccatccgtgaactgcatcgtgctctcgaacgcctggacttccgtattgtctacccgaacgaccgtgacgacttattaaaacttattgaaaacaactctcgtctgtgcggcgtgatcttcgactgggataaatacaatctcgaactgtgcgaagaaatcagcaaaatgaacgagtacatgccgctgtatgcgttcgctaacacctactccactctggacgttagcctgaacgatctgcgcatgcaggttcgcttcttcgaatatgcgctgggcgctgcggaagatatcgcgaacaaaatcaaacagaacactgacgaatacatcgacaccattctgccgccgctgaccaaagcgctgttcaaatatgtccgtgaaggtaaatataccttctgtaccccaggccacatgggcggtaccgcgttccagaaaagcccggtaggcagcatcttctacgatttctttggctccaacaccatgaaatccgatatctccatttcggtttctgaactgggttccctgctggaccacagcggcccgcacaaagaagcggaagagtatatcgctcgcgtgtttaacgcagaacgcagctacatggtgaccaacggtacttctactgctaacaaaatcgtcggcatgtactccgcgccggccggcagcactgtgctgattgaccgtaactgccacaaatcgctgactcacctgatgatgatgagcgacattacgccgatctatttccgtccgacccgtaacgcctacggggctttgttgaataaatcgaacttttgctga

SEQ ID NO: 241633 - DNA, 168 bp, Klebsiella pneumoniae
atgtgggtgctcattatctggatgttcggcggttacgaaaacccgaccattaccactcaagagtttcaaacagaatccgcctgtcgagctgcatttgccgaagtgaaaaaggtaaacaatgccgacgtttctctacgtggcgtatgcacgcctaagggtgaccaatga

SEQ ID NO: 241634 - DNA, 147 bp, Klebsiella pneumoniae; identical to SEQ ID NO: 162667

SEQ ID NO: 241635 - DNA, 666 bp, Klebsiella pneumoniae
atggcaaaaaagctagagcaatggaaaaatacacttgccgttgagaaaattgtagaaggcatgaatgctgcatcatctaacgcacgaaggcttctgaacgatgcctctgctttgtttgatttagaacgctatccctctgctacctctttagcaatcttggctatagaagaagcaggaaaggtgtcaatacttcgagagatgtcgctgttgaaagatggtaaagatatcaaacagatttggcgcaggtatcgctcacatactgaaaaaaatatgatgtgggtgtttcttgatgaatttaaaaaaggcgctaggaatatcaacgattttgcaccaattttcagcgatgaatcagagcatccctttgtattggatcaattaaagcaaatatcattttatacggattgtcttggtaaggcacattggtcgataccagacaatgtaatcgatagagatacagctataagcatcatagaagccgctaaacctttagtgtcgtcaaaattacacacagtcgaggagattgaactctgggtgaagtacttgggacctgtgtggaaaactgatgatgctcttaagcgtgaggcattaaaaagttacttcgatgccatggccgcaaaaggactactttcaaataaaactgccgtctcagcattcttaagcatctga

SEQ ID NO: 241636 - DNA, 2445 bp, Klebsiella pneumoniae
atggataccgtaaacagaattattcaagacgctcaaaaaatcgcattatcatctgcaaacgaagcagaaactcgccttaaagttattgatggtattttatttgatattttgaaatggacaaaagaggatgtttcagtcgaacatagagtaagtgaggacggtaaaaccacatttgctgactacgtaataaaaacagcaagcactgcatttatagtagaagcaaagaaaattggtgaatcattcaaaacaaaacatttcgatagacgtctaaaattgaacaataataatctagaaggcgcttttggcgaagcggtaattcaagctcgcgattattgtagaaaactaagcatacaatttgcggtagtcacaaatggtgaacaatggataattttccccgcaaataggacagatcaagttgcattcaactcatcttatgcaattgtttttaacaatcttcaaagcgcattgaaagatgattacactgaattttatgatttactttccagaaaagcagtaattaactccagcctagaagtaacgttattgggcaatcgagaggaccagattgaagagcgcagattaaagaatacattacgaaaaagcatatcttacgatgctaaaaatccaatctaccctctggttgaagaagcaataataacatcgttctctgatactataactgagatagactcggctttatttgaaagatgctatgtgaacacccctgacagaattaaatttgacaggcggataaacatgcacatctctaaaagccaacatttatttagctctacaccgatcaggcctatgcaaaaacgagatgccaatactttcagaaactctttaatccaagcaaagaaaaactcaaagccattggcaatagttattttgggcactgttggagctggtaaaacaaccttccttcattatactcgaaatatctctgctgctgatattttcgaaaagcataataatgcaccttatccgcactgggtcaaagttgacttccttcaatacactaatgacacatcacccattgattacatttataaaacgataaaagattatattatcaacgacgagttcttttccaactacgaactttgcattcagaatgcttataaagacgagataaactcgatcaaaaaaggccctgcattcttaatagccaaagatgaagagaaaatcaacgaactgattacccaaaagttaagcgctgactacgataaagtaaaaccatatgcagatcaactaattaagtatgcaacaaaacatactcctgtttttttagtagtagataacgttgatcagttgaacgaggaagctcagtcacaaatattcactgattgcgtagcattttctcaaagattaaaatgtaatttagttatttcattaagaaactcaacctatgttgagcaccgtaactctcccgcatttaatgcatttgacttcgacccaattcttattgaaccacctaaagtagaagcagtattatcaaaaagattctttttagcaaaaaatatgctagaaggagagcaaggcgactttgaatcagataatggtataagattccatgttgataacaaagcagaattaatcagcttacttcaaagctcagtattaggtactgaaatagggaacttacttgaggtgcttgccgctggggacataaggaatgcactaagaatgactcgagaatttatcgaacatggttatacaaacccaggaaaagcaatgagagtctataaagaacatgggaattatgtattaccaaagcatgaagctttaagggcaatccttttaggaaatcaggcagtatattctgaagcatattctttagttggcaatccctttgactctcgccaaggaaaaacaaatttccagttgttacgtctttttgttttggctgctttagttcagtatagcgcagaccctgcttttcagtatatcgaaggggtagagatccgtacaaaccttagaaaaattggtgttggtgatgatgatacacttaacatcctgaaagatttgtgtaaacttcgatttatcaacactgccggccatgatacaccggagtttaaatctagtttttatccgaccagattaggcggatatattacaagagagttaataagcaactttatgtttgttgaatgcacaatgatggatacattcattgcggatgaaactgtctgggaggagcttaaaagctatgaaagacttattaccaactcgtcaagtgacgtgatcaaaagattaggattcaggaaagatagggcgctggcattctatcattacatgcaaaagctatatgattctttacttgaagaagcaaacaaaagagcgttaccgaaagagtggcgaactaacccaattaaagagtctagatatacttttgtagataatctgaataaagcaatgtactctgcacaaagaaactacggttaa

SEQ ID NO: 241637 - DNA, 1284 bp, Klebsiella pneumoniae
gtgaaagagacgccgaatgcgacctggccggtacacgcggttatcaccaactcaacctatgatggtctgctgtataataccgacttcatcaagaaaaccctggatgtgaaatccatccactttgactccgcgtgggtgccttacaccaacttctcgccgatctatgaaggcaaatgcgggatgagcggcggccgcgtcgaagggaaagtgatttatgaaacccagtccacgcacaaactgctggcggcgttctcccaggcgtcgatgatccacgtgaaaggcgacgtaaacgaagagaccttcaacgaagcctacatgatgcacaccaccacctctccacactacgggatcgtggcctccaccgaaaccgcggcggcgatgatgaaggggaacgctggtaagcgtctgatcgacggctctattgaacgttccatcaagttccgtaaagagatcaaacgtctgaaaggcgagtctgacggctggttcttcgacgtctggcagccggagcatatcgatggtcctgaatgctggccgctgcgttccgacagcgcatggcacggtttcaaaaacatcgataatgaacacatgtacctcgacccgatcaaagtcacgctgctgactccggggatgaagaaagacggcaccatggatgacttcggtattccggcaagcatcgtggcgaaatacctcgacgaacacggcatcgtggtagagaaaaccggtccgtacaacctgctgttcctgttcagtatcggtatcgataagactaaagcgctgagcctgctgcgtgcgctgaccgacttcaaacgcgcgttcgacctgaacctgcgggtgaaaaacatgctgccgtcgctgtaccgtgaagatcctgaattctatgaaaacatgcgtattcaggacctcgcgcagaacattcacaaactgattgagcatcacaacctgccggacctgatgttccgcgcgtttgaagtgctgccatcgatggtgatgaccccgtatgccgcgttccagaaagagctgcacggtcagacggaagaagtgtatctcgaagagatggtcggccgcgtcaacgccaatatgatcctgccgtatcctccgggagtgccgctggtgatgccgggtgagatgatcaccgaagagagccgtccggtgctggagttcctgcagatgctgtgcgaaatcggcgcccactatccaggcttcgaaaccgatatccacggcgcctatcgtcaggcggatggtcgttacaccgttaaagtgctgaaagaagagaataacaagtaa

SEQ ID NO: 241638 - DNA, 636 bp, Klebsiella pneumoniae; identical to SEQ ID NO: 239603

SEQ ID NO: 241639 - DNA, 3156 bp, Klebsiella pneumoniae
atgccccttgaagcaggcgacctcgttgactcgccttatggaatcggcaaacttattcgcattaacaataatgatgctctaattaagtatttcgattctcccgtaaattatgaaggcatagagcaaactgtcgaaataaaacacctaaaaaaagccgaactccacgctgaaagtctggtttatcgctacgactacgaggtagcacactggcagattgcacgtgttgttggtgccgtgcctggaggggtgcgtttgcattttcctaacaagcagcaggaagacgtcagcttaaatgatatctttgtgcgctgggatcgccctatcagcgatgctgcggcccttctggccgagcgcattacctatacccccttctggcaagatgcccgtctagcttatcagcatcagatgctgaaacaacgcaacgcttgtgctgggattacctcttcgctgtcgtccagtattgaactcgaaccttaccagttggccgtcgcgcgtcgggtgttatctgaccctattcaacgctatctgttggctgatgaagtcggcctcgggaaaaccatcgaagctgggctgatcgtgcgtcaacacgtcacggaaaatccgctcacccactgcgtggtgattgtggcgcctggagttctgcaccggcagtggcagcaggaactttctgcacgttttcacctggaggaactgcttaataagtcgatccatatcattgatatggccgccttcagcacagcggaccccctgtcgttccgccccgatatgctggtgattgacgaagctcatcaggtcggtgcctgggcatgggatgcagagtacgagcagcgctacgctagtgtgaactacttggcgcaacaaagtgaaaaattgctattactatcagcgacgcccgtaactggcaatgaaaagaacttcctggccatgctgcatctgctggatgctaaaaattacccactgactgacactggcttactgaaatttcagcagcgtatccagcagcgcgaagaaataggttcactgttctacgcgtttaactgtgaaaacgacaacatgacgctggaagagaacctggaagcgttgactaggatgtttcctgaggatgaagtactaaacgggatggcttcacagttgcttccccatttagatatgatgcaaccgctgcggagtgaggcgcgtgatctgctgatcaataaaatccgccactacattggtaaccgttaccgtctgcaccaccgcctgctacgcaaccgccgtagcaaccccgccattagtgtcctgatgcctggcttgtccggcctatcactaaaaaaatatgccacgacgaacgccagcaacgacatgatgatcgcctggcgcgaatcggcaataatgatgcacccacaagaccccacgttggcggcaatttatcagttactgtttgaagccgctatcgctacgccggagctactggcccggcttgcaaactatcgcttacagcaggagtcacttggtgccgcgcagggctttctctatagtgattcacagctcgcgctgttgcagcatccgctgtttgatggcgagaaggagatcctgcttgagctgatagaccgctgcaaaatggagtgtgacagcaagcgccagcgcttaattgatgtattggaaaaacttctggatagtaacgtcagagaactcccttatattgttgtgttctgtgaccagccatgggtagccgaccaggtatttaccgacctgatgataccatttattggcaaaatccagcgccataaccccgacaaagaagtgcgctttggcaagggaagcaaatgccagatcttagtgtgcgatcgccgggctgaagaaggtgtcaatctgcacggcgggcgcaagattgcgctgcattacgacttgttgctgtcgcctaaccgtatggaacagcgtcttggccgcttgaatcgctactgcgcgactgagagtgcgactactatcctcagcatggcgctggtgagtgaagcagagggtctgcaaaatcagtggctgactattctcaatgaagtgttcgatgtcttcgaagagtcgattgcaagcctacaatacttgattgatgaggaattacagcagcttatttccaatctttacccgctgggtgaagagagcatgatgcaactcagtgcgcgtctggctggtgaagatggccgccttacggtggaaaagcagcgcatcgaaatgcaggaagtcctgctacaaattgatggcgatatcatcgaagccagagagtatgccgatgcattggcggatatagatgagaatgaagaggaattccgccgctgcgctcgtaatctgataggtaatgtactgaaattcgattttattccagatgagaaagatccaacgatattccgctatcgcttcaaccctggtgatagagggacgggcaccttagtcagcccacagcgcctacaaaaacactgcctgctgggcttcgatcttaaccaatctagcggaagttcgcccatgacttggccgcttagctactaccgggctgatacctctcagggtaaaatccgcccggctcgcttgggtgaacctttccatgatgccatcctacaaatgctggattttgaagaacgcggtgttgctagcgcgattatccgcatcacaccaggcatgggcgatgaaaatatttttttccgctacgattttctgattgaagctgatgtcaatacaccagcactgcaacgactggccgaccatctgatgcctcctgaaaccattaccctgtggctggaccaggccggcgagctggtcaccaacgcagaggtgttgatgatacttaatgaagactataaaccgaaggataagggcggacgccacctaaatctcaatgaggaacgctgggcgcagatttcccattgcatcagcgctaaagattggcgcacctggtgtaacgatagctataacatagcccagcgactggcggtggaacagttcgccacacaacaggctgtaagcctgaaccgactggaacattatctaagcagcgccgcgctgcatcatgctaaccggcaggagacggggcagacgctgcgccagggtattgcacagccgaaaatgacctgcctggcgacgcgtgccttaatcattgcatcagaagctatattgaatgaggactcataa

SEQ ID NO: 241640 - DNA, 2568 bp, Klebsiella pneumoniae
atgaatcttactcaactgattgataatgatgtcatttcatcaaggttgagggagtgcctgctgccggaggcgactgccggacacctcgaccgccgggcgttgatccgtgactggctgtaccgggaaaaacatgcccatcacaacgataacgaactgaccgtccctgatgacagccaccctggttggccaagacaggaggagtgggaagccagcggtattaactgtcaacgactaggtcagacctttctgctcagcgctggccctgcttggtgtccgcagtggctggagcagggaaacggcatgccttttctcgccagcgatcagcaccaattctgccgccaggacactcgagtaccgatggaccatgtcctgcgccgttacttcaagaaggacaactatatcagctatcaggcaccgggccagcgcgatgcggtacgccgggctctgttcgccccaccgggcagtacgctgttggtcaatttgcccactggcaccgggaaaacactggtagcgcaagcattagctctgacagcctcagctcccggggcactttgtgtactgatcgccccgaccacggcgctggtgttggagctggctagccgtttccggaagttactgattgaagcagggaacaaagcagaatctgtcaccggttggtatagcggcttaccggcgcaggataaatatgatacgtacatgcgtatccgcgtgggtgagcagcggctgatcgtcacctctcctgaagcgacctgcagttccctgcagttcgccttatttgaagcggcaaaacagggagggctgcgccatgttattgttgatgaagcgcatattgtcgccaactgggggaacgactttcgcccgcatttccagcaacttggtggcttaattcgcgggctgaagcgcatcagccgtgaagcgaatcttacaccgtgctcaacactgctgatgagtgcgactatcaccgaagccagccgtaaaatcctgcgcgataccttcgatcacgagatgagcgaagtccatgcctgccatctgcgcccggaacctgcttactggtgttatcgggcaaaagaccacagcgacaaacgggataaggtgctgcaatcactggctcatgcgccacgcccgctgatcctctacgtgacgcgaccgaaagaagctgaagagtgggcgcaacagttgcgtttgcaggggtatcagcgtttggcaacatttaccggtgatacaccgagtgaagtacgccgaagcctgctggaaaaatgggataaaaaccagctggatatcatgattgcgacctcagcatttggcgtaggtatggataaaaacgacgtgcgcacagtgatccatgccacagtgccggaaaacatggaccgcttctaccaggaagtgggacgtggtggacgcgatggctatgcctgcacctcactgctaatttacaatcatcaggatgttaaacaggcagaacatctgtcctcacaaaagttgattggtcttgagttgggcctggaacgctggaaaaagttatggggcagtgccgaatcggtgggcgacaacctgtatcgtattgatatagagaggatccatagcggccttaatttccgcagcaaacaaaataaattatggaacttgcgtaccgtactgatgatggtgcgtgcaggagtgctggaactggatgccgatctacaaaacccgccagacaaaaaagactttgccgatgttaatcgttacgaagcggcaaaagagcaaattatccgacagaacggaaattcactggtagtacgcatcctgcgtagtcaccacaccggagaagaattgtggaaaacacgtattatcccttcccgtgaagagacgctgcaagctgcaagggctaaccataatgcattaatcaactggctgcatacgccactgagcagaccgctgtgcgaggcacttgtggatctctactccatggcggaatttattccgggtcacgcctgtggtggttgccctgcctgtcgcgataatcaggcgcttactagtaattatccgagcccaccgacgctgttgcttaacccgccagcgtctgtggcaccgcaggcgttaagccgctggcaggcgctcagcggcctatcttactccagttgctttatcacctatccgccagttaacgacgatgagtgggaacgtgagaactggtatcatcgcatcgcgacgctactggtgcaactgtatcatagaggcattgtccagcgcgtctgggcagatcctgccttgttgcatagtatatttagcgccattccgcgcggtgagcgcctgatcttgttgagtgacgaattgcctgcacgtgatgagccagcgccggataaagatgtaatggccgagttggcagagttggtatttcccactcaagagtcctgcgccaatggttacctgccgcctttcaacccagcaccattacaactgacgctgatcccgcatgatatgcccgatcctcaccatcctggcggggcgcattacgttcttctcgataatcacaattggatcaccatcgaacaacttcaaaggaaactagacagtgtcgattatcaataa

SEQ ID NO: 241641 - DNA, 906 bp, Klebsiella pneumoniae
gtgtcgattatcaataatgcccatggtggcagccagtatgccgtgctggccgcattttatcaggtgctgaaagccagcccgaagaaccaactaccgcgtgaaaagctgatggcgctctgtgcaccggaaacattgcaaaccggcgactcacaaaatgcacgtggtaaagcgtctcaggaattaagagcatggctggacttggggttactgacggaagaaaaagtagaagagacaacacaaatcagtttcaacgcgaactacttcagcacaaaaagtatgccgctgcgccagactgcacgccgctgtttacaggctcaggaaaataacagtgacctgagctcacgcgatgaacgcgccgtcgaccttacccttttggctgcgttgctgctggcgctggatgtctatcagaacgcagaaatcaaatcgggcaaccttgaagtgctggtgaacacgtttatacctgattttcgtatcaacagtaatgaaattgctgtcgttccggggtatctcagttggctgggctttgctcaacaactcactcgcgacagttacgccattgaccccaccgattctattcgtgaagagttaccgttccttatgcgtgttggcgaacaactttccatcggcgaagtgctgcaacgtcttaatcgggcgctcccggtgctagatggtggcagttatcgccagcaggtcgaggagcgtatcagtctgtatggctggcactctcttagccctaaccgcctttccacctcgctgtcgcgtgcgctgctgcggcttcagctttccggagtaatcaacatgaaggctgagtctgacgccagcggcgcaatgcagttaaccggccggaacggcagcgtgctgcgtaccgtaacccatctgaccttaaatgatgtgggagtccactaa

SEQ ID NO: 241642 - DNA, 3063 bp, Klebsiella pneumoniae
atgccacaactacagagctactggcccagcgagcagaacgttactgcctgcatcctaaccgaggctgagtcactggctgacagccagttgctggcggtgcatgaaccgatgcgtctcgaccgcattgagtttcaaagtggtaaggtcacgcaggtgggagagggggcgctgctggactttctgcttgaacataaccgcccgctgccgctaattggcgcttctggcgtggggaaatcccacttggtacgctgggttcatgctcagctcaaacgtcgtgaagatcatgcgaaataccacattatacgcatccccaaaaatgcttctctgccacgtgtacttgccgccattctggaaggtcttgacggcgaggagtatcagagtattcgtgaaaaggttaacggagttggaaagcaattaatccccgaaaacgttgccgaacatattgctcttaaattgcgtcaagcgctaaacgcagcatatacagatgccattgaagagcttcgccaagaaaaaatgggaaaaattcagctggaagaaagcagaaaaaagcagctggaagaaattcaacaacacgcagcatcatcccgactgcccgcgctgttttttgacagcgtgatgacgcagtattttactgctcctggcgcctgtcttcacaatatagcgcagcgcttctgccagggagctaacgacgacagtattgccaacttgcggtatgaaatgtctgcggaagacttcaccttcaacggactggacttcaggcaggtttcaccaacagtgcttccctacctgcgcaaccaacagttgcttaccagtgatgaaaaaaagcaagcagcggctcgcgttgtcaacgtggtgcgcagccaagcgttagaagacaccttcgtcgaactatttagctttaaccgggccaatttccaggatctgatgcgtatgatccgccgacagttgctggaagaaggtcgcgacctgatccttcttgtggaagatcttactgccacctcggcgattgaagatgtcctgatcgcctgtctgatagaggaagatgagtacgacggcaaaaaggttttatgtactctaagatcgattattgcggttactgagggtcacgatagctttaagcgcctacgtaatacactaggcacccgcgcccgctacgaatgggtgatccagcagcatgccagcgaaaacgatgtcgcgctgaaaaaacgcgttattgacttttgcggccgctatctcaacgctgcccgtcacggcgctgctgctctggaaacttatcacctccaacaggacgcgcagtgttatcaggagattcctgtatggcaggatcaggaggtgctggagaacgaatctgctgcgccagcgctggccagttttggcagcagtagcattggtcatccgctgtttcccttcaacccagcagccattgggcagttggtagaacgacactgcaaagttaaagaacaaggcctagtgtttatcccgcgtaatattttgcatgaaattttgcgcgagccactgaaaaagtatcgccagaattatctggacgggcaattcccgccatcacaatttgctgagattgtatgtaacccggcattacagcagagggtacgcctggaaggcctcagccagcctgagcggattaattcactgctggctgtttggggggggaatagtacaaacctggcaggtcttacgcccgccatctgtaaagagtttggtctgccggatgcggcagtactgttggggggcggtggaacgccaccggaaccagcgccggaaccagcgccggaaccagtatcggaaccagtaccggaagcagtaccggcaccaccatcaccacttgatgaatggaaactcgtgctggacaaatggcaccagaccaagacgctcgagcaaaccagagcccgcgacattcgtaagtggctcctggaagcgctgaatgcccgtatcgactggtcaactgagcttatccagacctctctcatggccagctcagcaaaaactcagggtaggatccacttgcccggcgtgcttgtagggaatcagtcacatccgctggtgaagcttgaagatacacctgagttgcgtagcgcctgtctggcgatggcgcacttcaaccattatcagagttgggattatgatggcagtgagatcgactacgccgcctttcatagtttcatggattgcattgagcacgaagtaaaactcaaggtgttgcaggaagaacgcgaggagctttccagtatcatcaacgatctgcagttaagtggtgcattccttgggttggatggattatcagcatcccacccggccacgctggtgcaggcactgttaacggaaccgcaagtcgcaaacagcaaccatccactgctggatgagttcttaacccaagcgcgcgacaccgtgattgatgagcatctgaaacgtcgcgagcgtttaatcgcgcttacggcggcgaaaaaaccgggtgctcagccgtatgctattaacggcttaatgctggtggaggcgtctaagaaacaaccgccagacgctggcaaacaaccgggcaagatccatgaagtcaaaagtaagctcggtggctatcgcaccctgctattgaagacccaagagagcatcactgaacgcctgagcgacggcaacagcgccagcctagcagcggtaaacctctgcgacaccatgaaggagatagtcgaactggcgaatagcgcggacgtcgcccgtccaatgggtgaaactgtaccggtactgctgaagttgctgaagagctggaaagatccagagctgaaaaaactgatcagacaactggaaaaactgacgttgccagccgataactcgcacatgttgatgagagagatccttgccatcaatggcgagcagtttgaggcgtttcgacagttattagagacttggggcaagttcgaagacgccaccgacaagtatgtgcaacagcgtataagcgataagggcggagaccaagttgaggatgcggaaaaccaagttacagataccttggcaaacctggctgaacagttaacgctgctggaggcggacttatcatga

SEQ ID NO: 241643 - DNA, 792 bp, Klebsiella pneumoniae
atgagtgaagtaaacatcaatgacgtggtaactcccgtagccagcgtaccggaagaacgcggtatttttgcacggcgcagcggtgtttttaaagcacgccttcaacgctaccaacaaatggagaaagctcaggatatccgcgataacctgctgcggatagcaaaaaaaatcgatactccgacccaaacactagcacaggccctctgtagctatagggtgttaaggcaggtccgcgacaatgaaacgggtaagccgattgttggtccgtttgaccgtgcgactttcggcaatccacaaatactgctgacggccttttgccagcagtacgcgacgcataaacatgatgttgagcaagagggtgaacttgccctgcttactcaagaaattaggcgcttagccagcgaactcagcacgcacaccaccgcggcgtgggttaactatattcgcggattaaaagcgcagtgggaagtggatcagagactgttcagtaacttggctcatcaggaaggacaacgaaaagtacaacagcattacagtgatctcgtggaaaagttcaccagcagtagccggggactgccgaaaaccattgaagaatttgagacggtgggagacctgcatgagaaactctgccagcaacgcggagcacttaagctggatgtgccaggagaggtcaatctcttcctcaaagccgtagccgggcaaggtgctacgctcgatatgttgacgcctaatgtactcagttggctgattgaagaagacgacccgacgcgctatcgtataagacgcctgtaa

SEQ ID NO: 241644 - DNA, 4530 bp, Klebsiella pneumoniae
atggaacagattattcgcgcagtacttgatgggctggagtcgcaggaggcggtactgctcacttggggtaacacacaaggttttttcactgagaccgagctccgtaatactatttctcaggtcctacagaaccacccgctcgacgccaacggcctaactagttttggcatagtgaaagttatgatcgatcgcggattgctgctgcgccaccagcaaaatggtgtttcggtgtttcgtacccgcatggcggaggccgtgcggctttacagccagttgcgccagatgtttcctaagcacggctttaatgataactggcgtactgcaccgacgttggtgtccgactatcgcttcttacgccgccagcgcaaatacccgaagcgtgaccagccggctgctgaagttttgcagcaacttgatgaaatagcaggttttacctctacgcaccgccaactactctcagccctgctcagccactcgagcggaatgtacaacctcgcctactttcaacaagaagcctgcaaaaacgtactgcgcggattgcagcagagccagcaccgctcgactgctaccattgtctgcgccggaactgggactggtaaaactttggcattctatctgcccgctctgacctttatcggcagtgaactggtcgccaaaagaaaagacgcggtgaaggctctggctatctacccgcgcaacgaactgctgaaagatcagtttattgaaacgttgcggcagacgcgcaaattgaacactgaactggcaaagaaaggtgtgcgcaaagtgcgtatcgccgcattgtttggtatggtgccaactaataaagaggcgatccatcgcgactacatgaaagatgcctggtgcaggcatcgcaatggcatggcttgtctgtacattccctgcccgacagagagttgtcgcggtaaaatggtctggcacaccgccgattatgataaaaaccttgaacgcctgcattgcgacagttgtagccagaccatcgagcctgacgaagtgatcctgacgcgtaagcgtatgaaaatcgaactgcctgacattctattcactagcaccgaaatgctgaataaacagatgggcaacccgtttctggcatcgctgtttggcatcggcaaaaacgtagtcccaccggcgatgatgctgcttgatgaggtgcatacctattccggcgtcagcggtgcacagaacggtatgctgatccgccgctggcggcatctgtccggtgccacaccgcactttgttgggctgtccgcaacgttggagcaggcgacgcgctttatggcttcgttaactgggctggaagagtacctggtggcagaagttagtccgattgaagatgatatggagacagagggagcggagtacatgctggctctacgtggcgacccggcgtctcgttcaagccttttgtccaccactattcaggcctccatgctaaccagacgtatgctcgacaacgccgcagtgccagtcagcaacggtatgtatggcacgcgcagctttatattcacagatgatattgacgtcattaaccgcctctattttcagctgctagatgccgaggggcgttactcgaacggcaatatcaatgccaaaaaagaaccgctggcgatgctgcgcggcgactctccaaatgaagagaaatttacctttggtcagcagtggccgctggccaaaatgattggtcatacgctcgattccgctgaccgtagcaacgttaagcgcacctcttcgcaggatgctggcgttgaccatgctgcggatctgatcgtcgctaccgcgtcacttgaggtcggatttaacgacccgaatgtcggtgccgttatccagcataaagccccgcgcgataacgcccaattcctgcagcgtaaagggcgtgctggacgtcaacgaaccatgcgcccgtggaccgttgttgtgctgtccgactatggtcgtgaccgcatggcatttcagtgctacgaaaacctttttgagccggtactaaaggcacgccaactgccggtcggcaacagctacgtactgcgtatgcaggcggcctttgccactatggactggctctccagccgtaacgagtatcttaatcagtggaatcgcggtatctgggatgacctttccgtcccgcaggacaaaggtaagccatctgaagctcagtcaaagctggccgatctgattgaagaccttctgaacagcctgaaaacccagcaggagtttaactcatggttggctgaagctctggggattaaggacgaaaaacagctgcagtcattgctgtggcaaccaccgcgcgcgattatgaccgcgtttcttcctacggtacttagaagactgcgctccaactggtcgcgccttggcattgagaaggccgataactgccgcaaaagcacgccgatgcctgattttataccttccgcgttatttaacgacctctgtctgccggagttacagattaacctgccaggtgaaaatggccaagagcccaatgcgtacagcatgccgattttgcaggggatgaaagatttcgccccggggcgtattagtaagcgctttgccatcaaaagcattcgcgaatgccactggctagtgccgaaaaaactcgagctgaaagatggttcgcatccattcccgatcgatgattactgcccgccagacaaacgggagtccatgcccgattgtcacattaccactcgcactggcatggaggttatcccctgcttccgcgcctgggaagtgactgccagcacgccgccagatgaccttaaattgagtgaaacctcaaatgcgtttcttaactggcacagcgagatccgtccacctcagaacggcatccctgcggaagtgccatccaacaatgtctggcaggatattttccagcaggtggagttttacagccatcagcagcactgtccgatcgaagccgtgcgctttgctaccggatcacgtgccaatattaaattcagcgaccagcgtgaagacctgcagattgacttcaagtttgaacaccgaaacgaacccgctgcgtttggcttctcactatgggtagatgcggtaaaattccagtgtcggctacctaattttgatttcgctagcatcagcaacaaccgtgaactggtagccggattacgcacggcgcgcttcctgtatgaggtcagccacgacgagaccatctgtgttaatactttccttggcggttggctggcagaaactgtcctggcaggtattggcagcgaagcagtattgaaaaactgcactctggagcaggcatttcgcgcaatggaacgcaacagcgcagggatcgccttgattgacgttcctgcacgaatcttccagacgttgtatgacgtgcagactggtaaagagatagagcaggatctacagcaaaacttgcgtgaactgttggcccaggctccggtgatggcaagaattgccgactgggtggaactgctgtggcaaccgctggataacacttggctggagtggttgaccctcaacttcaccaacacgttgggtgcggcgctgctgcaaaccgctatgcagttgtgcccggatgccgatgacaacgacctaatccttgacctcaacgctgggccggtgcgcactgcgctgctcgcgcctgaccagcgcgaaatctggctgtcggaaaccaccgtgggcggtggcggcatcattgagaagctccaacagatttaccgtgaagatccgcgcagtttcttcgaatcgctagactttaacctcagtccaggcaactacgaaacaatggacaataatgtctggcacctgctgcaaactatggtaaacccggcatcatccctgcctgtgtgtatgaacgaaatgcggcttgccaacgatcatgccagccaggttcaggcgcagcgcaacttgctgggggaattgcagcgcagcggctttatgaccagccacagcttcctgtcggcgatcaacacccgcctattacggccagggaccgatgccagcagcgatgtctttttactgcaattgcaacaggattggcgacagcaggagcagcgactgggtattgaactcccacagcgtgtctatgcctttacctgtagtcagtccagcgcgcttgaccagcaactacaacaagctagccaagggcagcacaacttggagagttggcgtttaaatacctgtaatggcctactatggccacgcggccataccattcgtgatagttggctaacttggaacaacccttacagctttgccgggccaactgagcgcctcctgctggcccatgtggtgcagcacagttgtgctcgggtggagctcagcgaaccagactggatgcggcagtgtcaccagcatctggaaaataatggcaaatgcgagttagtggccaaaccgggcgatgcaataaatggggccatcgcaactatattagtcaccccagtagaaatgtatgggttgttcttctacccgcgcgtcagtgccctgcaccgccacaacagtgacaccttcgccatgattgaaattccggaggcgatccaatga

SEQ ID NO: 241645 - DNA, 543 bp, Klebsiella pneumoniae
atgagtacccgtcgtatctttaaatctaggacctcacgccagagtgaagttcttgatgtactcagctccttgctggtagcggagatcgttcagcccagcgcggaattgtggattgtctcgccgtggatcaccgacctcgacctgctggataatcgcaccggccgtttcgactacctcgaaccggcctggggacagcgtcatgtgcagacctcagaactgctagcgcgtgcggtagccaacggcggtacacttaaagtgatgactaaccaaacccagcataacgcacgctttatccgccagttaaccgaacgcgtcgccaactacggcatactggataacctgtacattggccaaaaagaggtgctgcataccaagggggtccttggagataatttcttcctaagcggttcgatgaatctgacgatcggcgggatcgtgatcaatgatgaacagattaacttgaccacagacaaaaccgccatcgtgcaggcattgttggcgtttaacgacttttaccaaccgacacaaggaggtgtgcaatga

SEQ ID NO: 241646 - DNA, 2256 bp, Klebsiella pneumoniae
atgaacagcgctgatagcgaacagttcctgcgaacctttttccatagagaaaacaatatcatctcttgggaaaaaatcgcgggtggcctgctacaagcatccacccagcagcggttgactccttggcttgacgatgtccgcaacggatgcttcccggtgatcctgccgcgcgtagtgaagggctgcaacgataaagtcacttggtatgcaatggccggtgaggaacgagactatgcggagttgcgtgagttattagacgcgcacgtcggcacctcatggtctgactttaaccgccagcgcacgatgctggatccaagtgaccctgtggaaaaagcgttgatcgactattatagcgatagagtatataaatttagctcgctttctcagtcgagtatcccagagattttcaatggcatagagcgcttgcgccaacaactcgctagccgcccgagtcaccagctcacacttctgcgcccgcgtggccgtattctgcgtgatatccgtgccgccttgcgccgtagtgatgtgccgcagactcgcctctatctgcaggaattacgtgaagctggtggcataggccatattaacgaactgtttatcgaactgcgctgcatggctctggaaggtgatgccaaaagcctgctagattcgactcagttgcggcaggtcttggatatgccgcacccgttggtgttggctgaagaagtgatgacgctcttctatcagcattttctgctgaagtatgagcagttgagcgacctcgccgcccaacgacaagcatttaataatttgttgttgaagaacgtaccgcgcctgttccaagtgacgcagggtataaacacgccatcggcaatcaaaaatattctactgtggttactttctgacacacaaagtgatccggcaagaatgagggaacaggcacaacatgtggttgccggtatgaagggggcaacagacgatgaccggcactggatccgccggttgctggaagcattcccgaccgttgcagtggcctccctaccgacggcgagcatcgatgaattgcttgccagagccgatgaatatcctgaaagcgttctgaaagatttactgttgctaccagtcagcgctcgcggcgcagccattgctttgcaatgtgcctgggtcgtaggcagtgcagaagctgctgtgagtgctgtcagttatctgcaacaactggcacaacaagagcgcgacatgttactggcgaaaccggccttccagcgttattacactgccttacagttgatgctgccatccaaacgaacagaacatgatactgcaggtatcaataattggcaggactggttgaaggaagtgttaaataaccctcaatggtcgggggcaatagaagcggtagaacaggcctgcggccaatggaacgcagcggctttccagcccgaggtatttgtttcgttgctggataaaaccaacaactgcgccagcatggtcttgcgcgatgccattccagtactgctcgagtggctggataaccatcaaacaagtgcttcctggcagtctgtccggttagcattgctgcaacaactggcgctggacgacaatagttctcgcgaagatatctttactgcctgtgatctagcacgcggttatttagagggcgatagtaatgcgcacggttaccgcgaactaatagaaaatctgcagatgatgatcgagagttcaggtaccaccagcgctagcgcctggctggatttgctggaactatttttggtctacccaactgctgaccaacttgccagagaacaattattcaatctggtactcaacatgttttaccgcaacccagcccgctatagtgaattgcagtggagcctattggctcagtttgcttgtgagtgcggacttgtctgtgaaattcccccacaaattttagaggacagtggggagaaaaatgatgaggttcgtgtcggatcaacattgaatgacaaggtagtgggcatttatacattgactgagtcggtagcacagcgtgtgaaaaaacaactactagccgattatcctcgggccgatattcgcctcaacaacgataaaggcggctcaaccatgctgcgttcattggctagagaagcggatgtatttatttttgcctggcttagttctaaacattctgcttattacgcgataaaggaagagcgaggggataaacctttattgcaaccttccggaaaaggcagtaccagtatgctggactgcatacgtagttatcttaaattgtag

SEQ ID NO: 241647 - DNA, 345 bp, Klebsiella pneumoniae
atggaacgcttcttccgcagcctgaaaacagaatgggtgccggcggaaggttatgcatgcaaggacgaggcccgacagcaaattaatggttacatattgaactactacaacagcgtcagacctcaccattataatggtgggttgacgccggaagagtctgagaacaggcaccatttttactgtaaaactgtggccaatattacttgtccactacagaccgctacacctgccacttctgcggcagtaaactgcaataccatcctgaatacatcaccgaacgcccgtggtttgaacactggcccgacgatcttacggagaacgggcgacagcactgcccgtatgtaa

SEQ ID NO: 241648 - DNA, 234 bp, Klebsiella pneumoniae
atgaaagtggaaatcacaattgatcgccaaaaaaaattgccggatggcgctgtgcctgctctggagaaggagctactgcggcgattggatcaaaactttaataactgcagtcttgtgattcgtcgggccagctccgatgggttgaccgtgcttggtggaatggacggagataaaaaacgtatcgaggaaatcctccaagatacctgggaaagcgctgatgactggttctgttaa

SEQ ID NO: 241649 - DNA, 921 bp, Klebsiella pneumoniae
atgacaacgaaattaattaacctgccgcacctggcagatatggtctttggtgtgccgcattacgtgacgcggcaaacaatggactccgtgaaagcggtgctcatcccccgtattcaggggatcaccgaagatgccgtcattcagatggcgctgaatccgggtaaatcacctgcagctgagcaggtccagcccaccggcggggtggcggtgatccccgttcatggcattctcgttccacgccgggggcagattacggcgatgtgctccgagctgaccagctacgagcggatccgcgggcagttgcaggcggcgttaaacgacccctcaatcagcgaaatcgttctggatattaactccggcggcggcgcagcggtggggtgcaaggagctggccgattacatttatcagtctcgtgacacgaaacccatcacggcgattgtgaactacagcgcgtattccgccgcgtatttcatcgcatcggcctgcagcaaaatcatcgtcagccagaccagtggcgtggggtcgattggtgtgatcatggagcacctcgatacgtcgaagatggaagaaaaaatggggctgacgttcaccaccatttaccggggagataacaaaaataacggcacccaacatgaaccactgagtgaagagtcgctgggtatgttccagggcatgatcgacgaaatgtacgagacgtttacggggtcggtggccgaatatcgtggcctgaatcagcaggccgtcattgatacgcaggcggggctgtattttggccctggcgcggtgtctgccggcctggcggatgaagtctctgacccccaggcggcgatcaatactatcgcggcaaagtatcagcaaccccgtcaaaaaacctccattcagatgcaggcagccgcgatggacctgcaaaccaaaatgtaa

SEQ ID NO: 241650 - DNA, 1260 bp, Klebsiella pneumoniae
atgttcctaccccagatgttcaggggccgacaatactcgggtaatagcttctgggaagccatgctgggcggggttcgttcaagccagagcaaaactggcatcataatcacgccggaaaccgctctgggactttcagcggtccgggcctgtgtcaccctcctggcggagtcagtcgcgcagctgccgtgcgaactctaccggcgggataaaaatggcgggcgccagcgtgcgacggaccacccggtttatgacctgattcactcccagcccaacaggaaagacacctcattcgagtattttgagcagcagcaggggttgctggggctggagggaaattgctactcgatcatcgaacgggacggaaaaggctacccgaaagagctgatccccattaacccgaaaaaggtcatagtgctgaaagggccggacggtatgccgtattaccaactcccggaagtcggcgaaattctgccgatgcgcatgatgcaccatgtgaaggtcttttctctggatggctatatcggcagttccccaattcagacgaacgccgatgttctggggctaaatctggcggttgaggagcatgcggccgcgacattccggcgcgggacaacgatgagcggggtgatagagcgtccgaaagaggctgcgaccattaaaagccaggatgctattgatcgcctgctggcgaaatggaccgagcgccattccggtattcacaatatgttctctgtggcattgctgcaggagggcatgagctacaaacaactgtcgcaggataacgaaaaggcgcagctgctacagtcgcggcagtggggcgtggaagacgtctgccggctctataaaatcccgccacatatggtgcagatgctggcgaaagcaaccaacaacaacatcgagcaccagggcctgcagttcgtgatgtatacgctactggcctggctgaaacgccatgagggtgcgctgcagcgcgatctgcttctgcccagcgaacgccgcgatttgtacatcgagttcaatgtttccgggctgctgcgaggcgatcagaaatcacgctatgaatcttatgcgctgggccgccagtggggatggctatccactaacgatatccggcgtatggagaatctgccgccaattgccggcggggataaatacctgacgccgctcaatatggtcgacagcgcgaagatccttcctggcgataaatcgccgacagcaaaacagctggccgaaatcgaaacccttctggccagagcctga

SEQ ID NO: 241651 - DNA, 2139 bp, Klebsiella pneumoniae
atgaacaactacccgtatctcattaaagctaaggcaaaagcaaacgaagcgaaaagcctcttctgctggttctctgctaaatccgattctcgcgccgagcgcaaaatcctggacatcctggaagacgctgaaattaacgttggccgcggcgccagccatcagctgccgatccgcaccaactggctcatcgttgatgacttaccggaagaaggtgtactggatgacacctggtgcgatcgctacgagcttggtggtgaagacgggctgacatggcaaaaaatcgttgtgccggcggctgctgaaccacagccctccagtaaaccagaaaacgatatctctcctgcaaatagtgatgaagaagactattcgaacaatgaagaagcactcttcaacctggcggaaatgtcattccgcacgcagctgcttgcccagtatatggccgacgagcgtcacgtgtatcacattagcattcctcatcgtaaccgcctttcagcgatggaaatggatacggataatcacggtgtgcagaatctgctgctgacggcagaaaatattccggagcttaaaaaatatgatatgcctggcctgtggaaatttaccagtgcatttaagagcgtatttcctgtggggaaacgccatgagctcggcaagcaaattcagttcgccaaattgtggcttgaaacgtcgcacattgaccgcgggatccttacaaaggaatgggctgctggaaactatatcacctcaataaacaaaaccgatgccggcgccaatgctggtggcggtaacaaaactgaccgcaatccggattatcagcattcgctggatactctggatatagagatcgcccttgcgacgatgcctatggattttgatatctataattttccggcatcagtccaccgccgcgcgaaggaaatagtacagaagaaagaaagtccatttaaagaatggtctgcagcattacggagcacaccaggcatccttgattattcccgtgcagcgatttttgcactgatcagggaagcatccagtggaataactccttttccagatcggttgcgtggctacatcaacgcgaatctgactgaacataagcatgataccccgagcgctgaaacgcttgctaaggcgggacatattccatctgctgcagtcactctggatgcaataaaccaagcaatcgccggagaggataacagcgcaaaactggaaacactctcctccgactttaaagcagttggtaccgaactggtaaaagaggctcaaaagcaacgtccagacgctaatcaggttctggccgccgagcgcggcgaatatgttgaagggattagcgaccctactgatccgaagtggataaccgaagaccttaccatgactaggaagcctgaagtttcaaaaattggggacggagtattttccattgaaggtcttgttgacgttacgggcaaggttaaccaaaaagaaaaaacagatgaagttattcatcaaacggatgctgtagatattaaacccggtcatcataataaggaggaagatcagccaattgattatgttcacgttatggttgatctggaaaccatgggtaaaaaacataacgcccctatcgtcgctattggtgcggttgtttttgacccggcaaccggctctattggagaaagtttctataaagtcgtatgccttgaatcctctgtgaactggggcgccgtaatcgatccatctactgttatctggtggctgaagcagtcctccgaagcacgctctgcgatcgtaaatgatgatgctatcccgttgcaggatgcattactccagttcagagaatttgtttctgataatgtcgctggtgggagcaaaaaggcgcaggtatggggtaacggtgcgtcattcgacaactctattctgcgttcttcttacgattgcattgctgaagattatccgtgggaatactggaacgatcgggacgtacgaacaatggtagagctcggccaggccattagcttcgaccccaaaacaacgatcccgtttgaagggtctcgtcacaatgccctcgctgatgctattcatcaggcccgctatgtatcagcgatctggcagcgaataattgccggcaatcaggtactgcaaaaattgatgcaaaactga

SEQ ID NO: 241652 - DNA, 372 bp, Klebsiella pneumoniae
atggccgttacggccggagaagtgattatggaatttggaatgaaacgcgttctggcatctgtccaggccgccgccactttgaataagctctatgacggctcgcccgtttcactgacggccatcagtaaagagtcaaagctgtctacttcataccttgagcagatcttcaaaaagctgcgggcgggtaacctggttatttcacagcgtggcccaggtggtggttatagcccccgcggcgatgacatcaccgttacagaagtgatcactgcggtatctaaactgccagcccataaaacttttgagcctatcctgcgagcgcttgacgacgttcgcgtatcacagctgctgcggggcgattcgccagccccataa

SEQ ID NO: 241653 - DNA, 123 bp, Klebsiella pneumoniae
atgaaggattttgcccgagtacctaccgggaaccaggcgacccgcctgaactggttcgaggtgagactacgtcagctgtgttacttacttgcgcagaaaggaaaccctgaggctgaggcatga

SEQ ID NO: 241654 - DNA, 123 bp, Klebsiella pneumoniae
atgggtaaagcatacgaagactattttgaaaacctctctgaaggtgaagaggcactgagtttcagcgagtttaccgcggcactttcaggtaagccggcagactgcgcctcttctgaaatgtaa

SEQ ID NO: 241655 - DNA, 390 bp, Klebsiella pneumoniae; identical to SEQ ID NO: 218866

SEQ ID NO: 241656 - DNA, 1011 bp, Klebsiella pneumoniae
atgacccgactggttatgtctgtcgccgcaggcgcagggaatctgcaggacgcggcaaaattcgcttcagaagagctgaatgaccagtccgtatcgatggccatttccaccgcagcggcgtccggtggtgtgcttattccgcagaacctccacagtgaggtgatcgagctactgagcgaccgaaccatcgtccgcaagctgggtgcccgtcccgttccgctgcctaacggtaatatgacgctaccacgcgtggccggtggagcaacggcaagctacacaggagaaaacaaagacgccaagacatcagaaacacgctttgatgatgtaaaacttacggcgaaaactctgattgcgatggtgcctatttccaatgcactgattggccgcgccggattcaacgtcgagcaactggtcctgcaggatattctgaccgccatctcagtgcgtgaggataaagcttttatgcgcgatgacggtaccggcgatacaccgattggtatgaaggcgcgcgcgacgcagtggaaccgcctgctgccgtgggaagctgatgcagcgatcaacctgaacacggttgacgagtacctggacaagatcattttgatggcgatggacggcaacagcaatatgatcagcagcggctggggcatgtcgaaccgtacctatatgaagttgtttgggctgcgtgacggcaacggcaacaaagtctatccggaaatggctcagggattacttaaaggatatccggttcagcgtaccagcgcgatccctgcgaatctggggaccgggggtaaggagactgagatttactttgctgacttcaatgatgtggttatcgctgaagacggcaatatgaaagtcgacttctcgaaggaagcctcttacatcgatgccgatggcaccctggtatctgcgttttcccgtaaccagtcgctaatccgtgttgttactgagcatgatattggcttccgtcatccggaaggcctggtgctgggtaccggcgtcctgttctaa

SEQ ID NO: 241657 - DNA, 261 bp, Klebsiella pneumoniae
atggctgcgaaaaataaagcagtggagccggaagaaacaggcacacaggacaaccatgcgaccgtggtcgcacaggcagagcgtaaatccgttgtgttccttgggccgcaccaccgttattcccgtggagatatcgcgtgctttgaaggatcgcgcgccgaagaactggttaagcggcgtatcgcggtatggccggaggatgccgaacgtgcgctgaaaccgaagccgggagacagcgattttgatactgacattggatga

SEQ ID NO: 241658 - DNA, 984 bp, Klebsiella pneumoniae
atggcccgcatcagaacagttaaacctgaattctggacagatgagaaggtggtggaatgttcaattccagcgcgtctcctgtttatcgggttgttcaacttcgccaacgatatgggatgccttgagcgttcgccaaaacggttgaagatgcaaatcttccctgcggacgcgctcgattgcgaaccactaatacaggaactgattactcatggattactcactgagtattcagtgaatgatgtctgctatttgcagattaaaggtttccttaagcatcaaaaaataaacaggccttcggcctcaaaaatacctcttccgccagaattcactgagtctaaggcaggaaaggaagaaaagagagctcctaatcaaggagggctcatggaggactcagtgaatcctcatggaggactcactgacggaaaaggaagggaagggaagggaaaaggatcaaaccccactctctatgcgcacaagggaaatgtttttcaggaacctcagtatctgcctggagtggatattccgatcgggaaattcgccatgcacgacctttggctaccgtcacaggactggccgcgactggctgctacctggggaatagcacttcccgaaccggcatacctgccgacagagctggcagagttcaccgcgtactggaaatccgaggggaaagtgttcactcaggttcagtgggagcagaaatttgcccgcagcgtgataaatgccagagccaaatccaaaccacaaccagcaaccggaggtaacggcaatgcaagaattcaatcagttaacaccgcatcccgggcagtccagcaaattcaggaagccagagagctctgggagaagcaacgcggacttgctggcggcggatacggcatggcggctatggacggtcatgggggagatattctcgaaccggtggacccagaagaacggggcggctccctcggatatgtggattgcccagattggatcgatgagtga

SEQ ID NO: 241659 - DNA, 486 bp, Klebsiella pneumoniae
atgtgccgagacgacgtgatttttgatcttcattactcttattttcttgaaaatatgttttctaccctaatgggtaggatggataaaactatgtctctttttctcatcgtcttgggcggcacagcttttgcaccttttagtaatgcttttatttttggcgtttcggtagcaaccctttcggcagcacaatttattttccagcctggaaagcaggagggtatttcgtctgagcacgcaaaaaaatacctccaactcatcagcatctctgatagtctggatgatgaaacactactgaaacggtttaatgaacttcaatccctggactccaaaccgtggagcgttcttaaaaatgccgcccaacggcgcgccacgatagtactcgatctgcacgacattcaaccagaactaactcggtgggaaagtctgtggtcatggtttgcaggggatttacccgtaaaagagcgatatgagcatcagagccattga

SEQ ID NO: 241660 - DNA, 216 bp, Klebsiella pneumoniae
atgtatcgaatggacaagctaacaacaggtattgcctacggaacgtccgcaggtaacgcggggttctggatgttgcaattgctcgacaaagtatccccatcccagtgggccgctattggtgttctgggaagtctggtatttggcttgctgacatacctgacgaatctgtacttcaaaattaaagaagaccggcgaaaagctgctcgaggtgaataa

SEQ ID NO: 241661 - DNA, 531 bp, Klebsiella pneumoniae
atgttcagagtttggcgacgcgattatcgcgaacatgtaatctggcccccagattatgtcagaacgggaacctggtggttcccgtttttattattagttttcgaacggttaacaaaattttatcaaaacaagttatcaaaacccctcccgaaaaacctcataaggccacttctttccactccttacctcgatcaccaggtgacctatcctttgctattgcgttttatgtacgagcacattgactggtctccccattggttaatacatccgcgatgtgagccacaacattataaattacatgagggcaacccaatgaagacgcaatgctcccataaatcgatcatccctatttttcacgcagttgaagcagtcagttctgccagagacctctgccgcaagcatgcaacttcagtcgacactttgtacacatggttgcacgaggaaggggataaacggggcgcatttaaacctgaagaagaaaagaatcgccggatatttggtggaatattttgtaatccacacaaaaattaa

SEQ ID NO: 241662 - DNA, 1215 bp, Klebsiella pneumoniae
atgagttcaataataaaaaaaattaatatagacggttttaaatccattctcaatgaaactattgaatttgggcagcttaatgtattcataggcactaatggagcaggaaaaagcaacctattagagtcaattgcaatggtatcagcttctattgaaggtggtattgactatgatagactggctagaagaggggctagactttcagcgcctgaaatatttagaagttcttttaaaaataaaaaaagaaaagcattgttccgtattgaagttgaaactaatgaatacaattattctatgggtattagcccgaaagaagggttttcatatcattctgaatccttagttagacgttccgatgaacggtgtgttgcgggccgctctaataaaggtgcaaaaattgatggtatccctcttcctactagagtggataaagaatccagtattatatcactatacaacaccgttcatgctgattttgatgatatggcgggaattaaaaactatgccatatattccccgtcaactcctattttgagaggggtaagcaatgatggtagcaataaagcgccgttaggtttgtatggtggacgtttagcagaagcattgaaggaaatattatctaacacagaaaaaagatctaggcatctagatgaattattgattttctttaagcttatagattggatgcagtctatcaatactacatctgaaattgattcaaagcttgcttctgagcatattagtttaggtcgaaacgtactaaaatacaaagataagtacatgaaaactaacttcaatgatatatatgcatatgatgtaagtgaaggtgctttgtatgtactatttactttgttgctcctcattcatgaagattcgcctgatatcgttgcaattgataatattgatagtgcattaaatcctgggctaattaggacgcttatgtctcaagtgtcagatattattaaaaagaaaaaaaataaacaaatttttatgaccacacataatcctattacgcttgatggcatagatttattcaacgatgatcataggttgttcgtagttgaaagagataaagaaggattgacaagggttaagcgtatctctccaccaccaggaatgaccaaagaacaatgggagaatgaatactacggaatgaaattgtcagaaatatggttgtcaggagcaataggaggtattccttatggttttgcctga

SEQ ID NO: 241663 - DNA, 756 bp, Klebsiella pneumoniae
atggttttgcctgataaaaagatatatcttctggtttgtgaaggcccaacagatatcgctgtgattatggcattagctcaaaaagtacaagagacgattggaaaagatgttgaaattcgagaattaagtcctacacaggacaaaaccacaggtgtatatcccagccaaggttggacagcagtcaaatcttggtgtgaaaaattctcaataaacaaaaacatcgttatacctgatggtttagaggattggaagaaaaaactgctattacaaaagatgagtttaagatgggacacgctcataaaaatatcaggggcagatggtattattcttcaaatagatactgatgttgctgaggaaatgagccatgcagatttctcgaccagtggtttaacaaggaaacaattttcttactcagcggtaaatctttggttgaatgaagcaaataagcctgatgatttttattacgtaatgtcaactttttctactgaaacatggctgttagcgactcatgaacctagtgataatactgctattctaggagacctagcaaccgttggagattacgaaacaattaatgacatcgaggctaggttgattgctttaggatatcctaaacaaaagaaaaaaggtcaggatagacttagaaaggaacccgcaatttacaaaagatatggtgaaaggattgcctcgaaaatagacttggtgaaatcgcgatgcgcagaggctgataatttgatgatttttttagaaagctag

SEQ ID NO: 241664 - DNA, 273 bp, Klebsiella pneumoniae
atgaccgacgcagcgcagaaccgtagggacgtaaacaatatccgctgggccatgaaaaactccattggcccaagcaacttccgtaacctgtttatgtattcgctcaacggcaaaaagaacggcatccagatcatcccgttgcccgaagtcgcggcaaaggatcaatttctgaatattaaaaacttgcgccgggatgacatgatggcggtacaccgagtaccaccgcggagaatgaggattattcctagcaatattggtggattcgggatatga

SEQ ID NO: 241665 - DNA, 846 bp, Klebsiella pneumoniae
atggctatttttttgaaatcggattcatcgccgatcagcagtggggcaaatcccgtgtatcttgagaatgacccgtccattatacgaggcgcaacgctgggactgctcgatttcagcaacgagatttgctacgactcaggcacgcctgtagcggcctatgcaaatctcctcaacctggcgagcggcgggaccaatgcgacaaacggccctaactcgcacccgctggaaacgggtatgctgaaattcaccggcgcggcagaaaatactaatgattacgttctgctgccaaccgatgaattttcattaccagcgggctgtaaacgggctctggcgagcgttgcggtaaaactgcccgcctctggatatggcacaccggcagcaaaccgttcagtaaacctgttcgggagactcaacagcacggctgccgcgaatatcaattttgctatctgggcgctgatcaacacgtcgggaaacctgcagtctgttcagggggcaatgatgggctcggcagctgtttcagcgtcggcgcaattagcgctcctgactgatggaaacgtgcacgtggtgtccgtatatgcggatggagagaccaccccgggcgtgctggtaacgcgcatttacgtcgataatatccaggtggccacggcaacgaataacgcctgggatagtgtggtgcctcagccgaccaacttaccgcggattggtagttaccccgccacgatatacggtccgtggggaaacattaaaattggtcgccctatgctggtaaatctcacagggaaaacaactgttgcaactgatttgatcgcccaggcggtaacgttagctaacgcgtatctcgtttaa

SEQ ID NO: 241666 - DNA, 1794 bp, Klebsiella pneumoniae
atggcctttaacccggagctggggagctcgtcccctgaggtgctgctcgataacgctaagcgactcgatgagctgacgaacgggcctgcagctactgttcccgatcgtgcaggtgagccgctggactcctggcggaaaatgcaggaagacaacgccgctctcgttgatgaaacccgtcagaacctgatccccctcgggcgccagtatatgacgtttgccgatgctcaggctgacatcgctaatatcccggaagggtcgtccacgtattaccgcagcccggatgatctgcgccttgctattgaagtcatgaatgttggcgggacgctggagccaactggccgcgtcatggtgtccaagctttacatcgacgaaattaaaaaccgcacacccaatatcgacaggtcttcatactggggtgggattgtcgctgctgacgggactattggtgtaactttccgcaagagcgacaacgaaccgatattagggaaatatggggcattgtccgcgctgacctcatcgttaacaccctttacggacattgcctccgggatggcaaccgtaaatatcaattccagttttcttgttgtagccaatgggaccgacggtctctctgtaccaactattttcaataaaataacgtcaacaatgtttgtaaaattattcgccgtcacaactgatgagcaggttgcagatattggcaggcggtcgggatactggggtgggattgtcgcgaagaatggcctggtcgggatggtgtttcgtgagtcagataatcgcccgatatttgggggtggcggcgagcgtggaggggatattttttccaggctggaagctatcgaaaatagtggcggtattgttatcaaaaaatcccatactgcaggcgacagtaccggcgccgggacaggcgcccctgcaggttattcgttccccgatcagttagcggcgctgattggcgatggattcgttgcaacaaattacagtattggcgggcaaaaatccggacaggtggcaatgcgcatgggggcgaaacccatttacctgaccgtgaatggagatttaatccctgcatctggcggttcagtcgcgatcacccagattaacggcgttagcgccactgcagagccgcaatatccaagccaggatgttcgcttcctttccaccccatcaaacaccactacctacacgctggatggctggatctcgggcatcaaatgccgggtaacacgcacctcttcaggtggcgttgaaacctacaacctgacagcactgagcggcgctggtttccgctgccttcctggctcgttgtttgtgccagagtatgcgatgcaggatcacactgacagcgagatgtggatttgcgtgggtattaatgattttcggtctggcgccacgacagccgccgattatgacgcagatgtagcagctatcaagaccaatatcgatgcgctggttaaccaggctgaaaaatctggtcgccccatactggtttacggcattaatacctgtaactacccgccagtggagcttctcggtgggatacggtatcagcgcatcctcgaagttaaccagtatttatctcaaaaatacccaggctactacgtcagaggcagtaatggccgggatttgcgcgaggaactggtttcccgatacaacgcgtcaatagcacaggatgtcactgattttggtaacgatatcgttccatcatccttacgcagcgatccccgtcatccaaacgctacagggtatggcgtttacgccgagcttggatatcaaacccgccagagaagaggataa

SEQ ID NO: 241667 - DNA, 732 bp, Klebsiella pneumoniae
atgaaacaaacacaacgtcatgacgccattatcgagctggtaaaaaaacagggttacgtcagcacggaagagctggttgagcagttcgcggtcagcccgcagaccatccgccgcgacctgaacgatttagccgaacagaaaatgatcctccgtcatcacggcggcgcggcgctgccctccagctcggtgaacacctcctggcacgatcgcaaagcgacccagacggcggagaaagagcgtatcgcccggcgggtggccagcgagatcccggacggggcgacgctgtttatcgatatcggcaccacgccggaagcggtggcgcacgccctgctcgatcacaacgatttgcggattgtgaccaataacctgaacgtcgccaacacgctgatggtgaaagaggacttccgcattattctcgccggcggcgaactgcgcagccgcgacggcgggatcatcggggaagccaccctcgactttatctcgcagttccgtctcgacttcggcattctcggcatcagcggcgtcgacagcgatggctcgctgctggagtttgattatcatgaagtgcgcaccaagcgcgcgattattgagaattcacgccacgtgatgctggtggtggatcataccaagtttggccgtaacgcgatggtcaacatgggcagcatcagcatggtcgatgcggtctataccgatgtgctgcccccggcgggcgtgcaaggtcatcaccgataa

SEQ ID NO: 241668 - DNA, 330 bp, Klebsiella pneumoniae
atgactcttgacgatagcgtgcgcgatcgcctgcgcgccattgaagccctgctgcgcgaaacagagcactggcaggagacggcgccggacagcagcgccttcgccagcgataagccgttttgcctggataccctggagccgctggagtggctgcagtgggtcctgatcccgcgtatgtatcagctgctggagagcggccagccgctgccgcaaaatttcgccgttacgccgtattacgaaatggcgctggatcaagcccacccggttcgcgaatccatgctggcgaagctgctgctgctggacgcgctgtttgccggtgagcaggcctga

SEQ ID NO: 241669 - DNA, 783 bp, Klebsiella pneumoniae
atggaaaaaatatatacgattaatggaagaattgccttttttcctcagcgtagcgctctaatacttattgctgacgagacggtttccttaaatatgccggccagccgctgtttattactgcttattcagcatgatggcaatactgttgcccgcgaaaccttttttgaggaagtgtggataaagcatggcgcccaggtaaccagcaacggtttttaccagaatatgtcccttttacgccgggcatttaaagagctgggcatggagggcgatattattattacgttgccaagggttggcgtcaggctggatgcgacaatatcggtaatggaagctgagtcgtgcgagatggcgaaggcgccggagcgagaggtgcccgtacacgaggaggtcgcggctgcgagtttgcctgaaaaaaagcggttaaggccgcgatgctctctgttatgggggcttgcggcgctgctgagctgtctggtgggcggttttgttgcgtggcaaacagaattcgaatcttatttgcaaagttattcgcccataattgctaaattttcgcaacaatgtcacttctttgccaataatgacgtagttgaccatgttcgtcatgtcaattttatcaagcgcagtaaatttgaatgcgaagaatatccatggatttatttgacgctttatcccgggcaagcgcgggtgtcggtgattcgctgccgtcagccatttagtcaatggcgtgataatcaatgcctcaccaaatattacattaaggaggtagtcaatgcgccggcgtga

SEQ ID NO: 241670 - DNA, 246 bp, Klebsiella pneumoniae
gtgaagatcctgcgcgccctggagcgcggcgaaggccagcctggcgatatcgaaacccttgagcaactgtgtcgattcctgggcccgggtaaaaccttctgcgcgcacgcgccgggcgcggttgagccgctgcagagcgcgattaaatatttccgcgaagaattcgaggctggcattaagcagcagttcagcaatacccatgcaatcaacgggattcagccgaacctgcttaagacgcgctggtaa

SEQ ID NO: 241671 - DNA, 1053 bp, Klebsiella pneumoniae
atgaaaaccgtaattcgtactgcggaaacgcatccgctcacctggcgcctgcgcgacgacaagcagccggtctggctggacgagtatcgcagcaaaaatggctatgaaggggcgcgaaaagcgctgaccggcatggcaccggacgagatcgtcacggcggtaaaagacgctggcctgaaagggcgcggcggcgcgggcttctccaccggtctgaagtggagcctgatgccgaaagacgagtccatgaatatccgttacctgctgtgtaacgccgatgaaatggagccgggcacctataaagaccgcctgctgatggagcagctgccgcacctgctggtggaaggcatgctgatctccgcgtttgcgctgaaggcctaccgcggctacatcttcctgcgcggagagtatatcgaagcggcccagcatctgcgccgcgcgattgccgaagccaccgaggcgggcctgctggggaaaaacatcctcggcaccggttttgacttcgagctgtttgtccacaccggggcagggcgctatatctgcggcgaagagacggcgctgattaactccctggaaggtcgccgcgctaacccgcgctccaagccgccgttcccggcgagctccggcgtgtggggtaagccgacctgcgtcaacaacgtggaaaccctgtgcaacgtgccggcgattttggccaacggcgttgagtggtaccagaacatctccaccagtaaagatgccggcaccaagctgatgggcttctccggccgcgtgaagaacccgggcgtctgggagctgccgttcggcaccactgcccgcgagatcctggaagattacgccggcggcatgcgcgatggcctgaagtttaaagcctggcagccgggtggggcagggaccgacttcctcaccgaagcgcacctcgatctgccgatggagttcgaaagcattggtaaagcgggcagccgtctgggcacctcgctggcgatggccgttgaccacgagatcaacatggtctcgctggtgcgcaacctcgaagagttcttcgcccgcgagtcctga

SEQ ID NO: 241672 - DNA, 402 bp, Klebsiella pneumoniae
atgaaaatcagttacgtgatgattttaatcttctctctggttctcaatggttgtggtcgtgtagaaaaatttgatgggacaagtccggagtcgttggaactttcaatgcaaaaagtccgtgaacaactttccaccgacagaaaaaaacaactgcagagtgcgattacagatatcatggattattacgaaacagaggccatatttaataatgatgacaattattgttcagaaaaattacgtctgctcatccttgatggaaaaagcgccgaccaagtgatttccgaagccagaagttatgaggggaaaaagctaaactgttactactgctccaacaagggaaataacaattctgctaagcaggtaaatacatatcccgcaggttatttaagcctctttccctaa

SEQ ID NO: 241673 - DNA, 690 bp, Klebsiella pneumoniae
atgaagctcatgcaacgttacatcaacctggccagtttgctatgcctgctgactgcctgtgccaccatgcaactggcccacatgaaacaattgcaaaacaacgggcagtacgaagcaatcattgcggaaacaccagcgacttcctgcgacgctccctctcagagtagtgaagtctgtcggcagttctacgcaattcggggccatgcctacctcaaactcgcaatgaatgagtctcaggcgggggctcgctgtccaataccgaccccatcggcccgggccaatatggaccatgcggtaaacgattatgcgcttgcatcttctgccgccgccaggggcagtgaagatgagacccatctgatagagaaccaggtccttgctttgacctgctcagccccctttaagcaacccgctgaggcggtggcaatgacacgtgaagccgtggcaaaactggaccagttaccgacgaatccatcccgcgcgctgaccaccagtaatgcattcctcagtctggctcagcgtaccgacctgcctcaggccgagcgctgtcaggccgccagtgatgcccgaaaacgcgcccaggacggtctgaacgggcaaccgccagccacaggcgagatagcaatacgtctccagcagaccgtcaatgccactgccatcggtggcccaggtcttccctccacctgtgtataa

SEQ ID NO: 241674 - DNA, 645 bp, Klebsiella pneumoniae
atgaattggcaagtaaattatgcgattaaatatattaatgatgatctgggtgattcaggggctgcagtacatgtgaatggagatgctatcagagtttctattcgcaatagacctgatgtattagcagtaatttcagcttcagaagaaattagcttggaaattgctcagaaataccatcaagatttcccggatgtggattttatatgtgggtatagaaaagagtgcgtatggactggagaggcgataagctatcttacatcagctaacataggatggggtaatgctggaaccttttacagcgcactgtctgatgacactctcaatactgcctcccataaagactactttttctcgtatcggctcataacgcagatgagagtagtaaaggaaatagagagacagtttgatcgtgtttttattattactttagcaaatactcgaaagttaagagtaggtatgttaaccgaatacgaaccgactgccgattctgtgcgcactttctgggaaagatttggccatgttgatattttgtggaatataaatcccaatggaagtcctgctcgaaatgcctatgaggcaggaagtgaacttggctgtgaggtaatgaaatggccggagttaaaagcgttgatcactcaaaaataa

SEQ ID NO: 241675 - DNA, 696 bp, Klebsiella pneumoniae
atgatggcaccccgtaaaagcatcccaaatgaaattaaattacaattgttttctgcatctgcagggcattgtcagcatcctgattgtcataaaccactgtttcctcaggagatgggaggttacaaacatatcggagaaatggcacatgtcatcccccatggtgataaggggcctcggcatgaggagagaccagaagaggaatttgaagcagactcttttgaaaaccttcttttactatgccctaattgccacactatcatcgacaaggctcctgaggcgtatccccgaagcctccttctagagtggaagacaaaccaccttgtcgctttggcaaatcggcaaggcattgttcgctatgaaaacagagagcaagccagagaggctgttttagccgctatggatgaaaataaagcactttgggcaaaatttgcgcctagtgaaggagagtgttttacctatgatcctgagtctgaaacggcggagttatggtctcaaagaatgcgtagtgtcatattacctaatcattatcgaattcaagctattttaggcctgaacagatgtcatatgacacctgatgagagaggtatttttgcgcagtaccttgagcacgttcgtgggcttacagaacgtcatgtctgtggcgtttctggtaaagccataaggtatccaagagaaatggatggaatattagcatga

SEQ ID NO: 241676 - DNA, 132 bp, Klebsiella pneumoniae
atgagcgaagccctgccccagacgggcataattgttcttcatggcattaaccttttcgaattgtttagtgagctgtcgcgacaaacttattttgagtgctctacatcgcaagagcacgcaagttattcatga

SEQ ID NO: 241677 - DNA, 627 bp, Klebsiella pneumoniae
atgaaatcaaataatggccttaacggtcagggcttccctcaccctgaaaactgtaatgatgatatttccgttatcaattttgaggggctaaaagttcgcattgttaagctcaatggtgaaccgtggttcgttgcaaaggatgtttgcgcggcgctggaattatccaattcgcgtatggcgttgcaggctctggatgaagacgagagaaataccgtaactttaacttacggtattcgtggaaacccaaatcatagtgctgtctctgaatctggtttctacaagctgatcgcccgtagccgcaaagctactacggcaggcacattcgcccatcgtttcagtaattgggtgtttcgcgaggtgattccctcaatccgcaaaactggctcttatggcgtgccattcgtgttcctgaacgattttagccggcgtatggcagcctatcagcaggaggccagtaaacgcggttataagttgcagcaatgtaagggggctaaagaggctcttgagcgcgaggagattcaactatggcgtaagtatcagcctgagctgttaggtgaagatgttcacgagccgttaactgaagttcgctcagctacggatggaaacaaaaatcgagttcatgaataa

SEQ ID NO: 241678 - DNA, 651 bp, Klebsiella pneumoniae
atggcgaaactgttgagttcaaatgttttcgagagacttgcgtctcaacgactcattacgatcaatgaagttgttcatgcactttatggattaaatcctaatactaaaacagcagatcttcctaaggaagtcgcagaggaagctcaagatattaaaaaaaccatatcacgaaatctgagaagtgcggggtttcgagtctatagtgttaccacagagatggaagcagatctcgtgtttgccgcttgcattgattatataaatgaagagattacgccacctgcaattatcaataaggttaaggaagcagtaagcgaattcgtttatacaaacgaatgggaaaagtacatgtttgcttttggcgggcgaacgcttctagaagatgttgcgaaaataagaaaaacaggaagaggccagcatcgtaaagttgatgaagaaaatggaacattaaagatgatggggctgttaattaaattgttagcagataagcaccctactaaaaaatatggaagtcgagaaaagcccactatatctgaaatttataaagatatttgtatgcttatcgaactagaaaaggcaacaacaaaaggaattggtaaatcgactttttcagccaaagctgctgcggcgttacaatcgattcataactcttaa

SEQ ID NO: 241679 - DNA, 1254 bp, Klebsiella pneumoniae
atgccaaaacttaccgatatgcagatccgatcgtggatcaagagtggcgaacgattcgaaggtaggtccgatggcgacggactctatctccgctttcgcaaagaggacaaaactccattctggcgttttcgatacaaacttgccggcaagccccgtaccttgatgattggttcttattctattattccgctcgctaaagcaagggagattgctagagaacttgcagcccgtgttgctctaggccatgacgtggctgcagagaagcaacaacgcaaggctgaggctatagcaaaaattgaagctgaaaagaacgctatccacatttcagaacttgcagcggagtattactctcgtcagatcgagccaacgtacaaacatccagagcttttcctcgctagccttcaaaagaatattgtggccttaattggaaaaatgaaggtcgaagaagttcgtccacgccacgttgatagtgttcttcaagacgttcttaagcgtgggtcgcccacagtcgctaatgatgttcttcgtatgctcaagcgcctgtttgacttcgcggtcgttagaggcatgattgatgttaatcctgctatatcattcggctcaaaagatgcgggtggaaaggagaagggaagaaagcgggcattgagtcgtgatgagttagtaatgttctttaaagcgctgcgtagtgggcaaggaatcagcagggaaaatgagctagtttttaaacttattttggcgctgggtgtgcgcaaaatggagttatgcgctgctgaatggtctgaattcgatctcgaaaacgaggtttggcatcttcccggtactagagccaagaatggtgatgacattgatataccattggcgcagccggttatcgaatggataaaagagcttagactttttgccggtgagagtcggtggtttataccggctaggagagccagaaacacagctcacgttagtcgtgcaacccttaacatggtcatgccgtctgtactgaaagaaatgcaggatattgagccattcagtatccatgatttgcgtcgtactatgcgcactcaaatggctgcgttaggtattgatcctataatagctgaacgctgtttaaaccataaaatccctggtattgagggtatatacaacagacacgaatacttcgaagaacgcaaagttgctttggctcgatgggctgacctcttaatggacgttgaggctgctggtctgtcaaaggaaatcatatcaaaaaggaatgattga

SEQ ID NO: 241680 - DNA, 837 bp, Klebsiella pneumoniae
atggcggaagcgtggattctggagaacgcgcatctgcggatgtgcgtctcttctctgggcggcaaagtgcaaagtttattctcgcggcactatcaggcgccggtgctatatgaaaatcccgccggcggcatgtttccgatgctgccgatggccaatcgcgttgccggaaatcgctttatttttcagggacgcgagatagtcctgccacgtcaccacgccgacgcgcatttttttctccacggcgacggttggctgcagcgttgggatatcattgcgcgcgggggcgatttttgcgtgttacagctacgtcggcagcatgtctgcggtttcgattacctggcgcagatccgctatcagttgcagggtaaccaactgatagcgtcgctgatgcttacccactgcggtagtacgcctatgccctacggcggcggttttcatccctttttctcctttgataagcgcagcacggcgcagtttgccgccagtggctactggccggaaggggaacagcacctgccgctggactggcaaagccatcttcccggctatgccgatttcagccacccgcagtacggtgaggatcgctggctaaacgtcggctattccggctggagcgggcgggcgagggtgattagtgatgtgatggatgtcacaattctttcgcaaactccgtggttgatgcttttcagaatgcaggatgaaccgttcctttgcctcgagccgcaaactcacccggtaaacgcccataacatggacggccaaccggggctgcgggttttgcgcactggagatacgctgaacttttcgctaacaatagacgttcaggggcgcggatag

SEQ ID NO: 241681 - DNA, 1020 bp, Klebsiella pneumoniae
atgaaaaaatttattattttaataggtatattattttcaagctttcaggctaacgcctcttgctcttatagcagtacgtctagcggtgctatcacggtgagttttggtacacctgctgtcctggccgatccaacgttacctgttgggacaatcttatccactgcagtccgtgggaatattgttccaaaaacattttcaaattgtgaccctggagacatatttgttgtcagaacaaacccaaccgtaaatcaatctagtgtaaataaaattaacgggcaggtcgtttacgagacaggaattccaggtattggttttcaaatatctgatatattaaagcctaaagggcgatttattcctgcggtgattgatcaaacagagtcagcaacaagccgatacatttcttcgtcagatatatcaaaacaagtcatggtatggctagtaaaaactgggccgataacccaaacaaagttaaccaattatattacagtatactatatggcaggaactcctgcccaaacgagttctggtgctaataataattcgtctttgtatagaattaacatagacctgacgaacattaaatttaaagaaacaacatgtgaaatttcgcccagagacggaaataccgtgaggttacaacctattgatttatcagagcttgcttcactttctgcaggcaaggctgctggtaaacctaaaaactttaccgtcgacataacctgtccaaccacagaaataaacaaaaattatctttattggtttaaccctgtttctttaaattcaacttcagctgatggtgttttacttaattcacttacagatggagcaacaaacgtaggtatcattattaagaaaggctctagtgcaataaaattcaacgatttgagttatacttttaccacggcaaagaaccaaagccagaccttttccgccgattattacaagatagcaaatccagtaactctaggggttactggagatgttaaagtagacttcgaaattgttcttcaggaaagatag

SEQ ID NO: 241682 - DNA, 366 bp, Klebsiella pneumoniae
atgaagcaattaactattgttgaaatgaatgacgtatctggtgcaggtatccagcagattattgatggtagccagaatgttctgtttggactgttggatgcagcaatcggtgctgtattgttaggtttcggcgcatctggtgctggtggtctgcagggcggtgtaaccggtaacggttcaggtggcggtattctgggcttcggtgttatcactatcggtatcggctcaatttggggagctatccagggtgctgtaactggcgcagtctggggtgcttatgttggcgccgataccagcgttgaatacatcaagaaaggtgtcgacgcctggttcgcaggcaccattggtggctggactccaaactga

SEQ ID NO: 241683 - DNA, 552 bp, Klebsiella pneumoniae
atgaggattaaagactgcggaacagggggctgcgtactggctagccttttgctgctctccgcttccgggttggcttacgagagcagcagcacggtcaattttaaggttacgggcacgatcgaagcgccctcctgtgaggtggccgtggatccgtcgaatcgtattgatttaggcaccgttccctatcagacgttctccggaaaagcgggatcgagcagcgccagcgtgccggttaagctgctcttttcccactgttcggcctatgcgtcggcggtgacgatcgcattcgatggggcccgtttcgatgaagcccacgcttcgatctataaaagctataggacaggcaataacggggccagcggcattggtttgcaactgctcagcatggccgaccagcagcctctgggccccggagaccagtatctctacacctttgatagcgaaacggacatccacacgttcaacatggtggcacggatgtactcaccctatggccaggtgagtcccggtattgtcggttttaccgccacgtttgaagtgacctataaataa

SEQ ID NO: 241684 - DNA, 1107 bp, Klebsiella pneumoniae
gtggcgcttcgcttacccggcctacaaagtcatctacctatcagaaggttactcaacaccccaggtccggcaagcgccgcgccgccgggcaaggacagcgggcgcgatgccgcttgtgtgccgggtggcgcttcgcttacccggcctacaacgccatttacctatcagaaggttactcaacaccccagacccgccaagcgccgccgggcaaggacagcgggcgcggtgccgcttgtgtgccgggtggcgcttcgcttacccggcctacaaagtcatttacctatcagaaggctactcaacaccccaggtccggcaagcgccgccgggcaaggacagcgggcgcggagccgcttgtgtgccgggtggcgcttcgcttacccggcctacaacgccatttacctatcagaaggctactcaacaccccaggcccgccaagcgccgccgggcaaggacagcgggcgcggtgccgcttgtgtgccgggtggcgcttcgcttacccggcctacaaagtcatttacctatcagaaggctactcaacaccccaggtccggcaagcgccgccgggcaaggacagcgggcgcggagccgcttgtgtgccgggtggcgcttcgcttacccggcctacaacgccatttacctatcagaaggttactcaacaccccagacccgccaagcgccgccgggcaaggacagcgggcgcggtgccgcttgtgtgccgggtggcgcttcgcttacccggcctacaaagtcatttacctatcagaaggctactcaacaccccaggtccggcaagcgccgccgggcaaggacagcgggctcggtgccgcttgtgtgccgggtggcgcttcgcttacccggcctacaacgccatttacctatcagaaggctactcaacaccccagacccggcaagcgccgcgccgccgggcaagcgcagcaggcgcggagccgcttctgtgccgggtggcgctacgcttacccggcctacagttcgtgcgacctgtcgttaatttattcaccagccttgctgaaactgccggtgctggcggcctcaaaatcgctgagacgttcccggaaggccggggcagcccgcatggatgcgggctga

SEQ ID NO: 241685 - DNA, 1185 bp, Klebsiella pneumoniae
atgacacgctttcttctctgcagctttgccctggttctgctctatccctccggcatcgatatgtatctcgtcggcctgccgcgtattgctcaggatctgggagccagcgaggcgcaattacatatcgccttctcggtctatctggccggaatggcctccgcgatgctgtttgctggccgtatcgccgaccgctcggggcgcaagcctgtcgccattgtgggcgcggcgatctttgttatcgcctccctgctctgcgcgcaggcgcacaccagcagccacttccttaccggacgctttatccagggaatcggcgccggctgctgctacgtggtggctttcgctattctgcgcgatacgctggacgaccgtcggcgggccaaagtgctgtcgttgctcaacggcattacctgcatcatccccgttcttgcgccggtgctcggccacctgatcatgctgaaattcccgtggcagagtctgttctacaccatgatcggcatgggggtaacggtgggtttactggcggtatttatcctgcgcgagacgcgtccgacggcgcctccgcagacggctatgccgcagcatggcgcggatgaatcgctgttgaatcgctttttcctcagccgcattctcatcaccaccctcagcgtaacggcgatcctcacctacgtgaacgtctcgccggtactgatgatggaggagatggggttcgatcgcggcacctattccatgacgatggcgctgatggcgatggtcagcatggcggtctccttctcgacgccgttcgccctgtcgctgtttaaaccgcgcaccctgatgataacctcgcagctgctgttcctggcggcaggcgtggcgctgagcctcgccacccaccaggccgtcaccctggtcgggctgggcatgatttgcgccggcttctccgtcggcttcggcgtcgcgatgagccaggccctggggccattcacgctgcgcgccggtgtcgccagctcggtcctcggcatcgcgcaggtgtgcggttcgtcgctgtggatttggctcgccgctatcatcgggctcagcgcaatgaatatgctgatcgggatactcattgcctgtagcatagtgagtcttgttctgctactggtcgccaccccgccgtgggttgcgcaacacgatgaagaagccgctttcgagtctcgatcttaa

SEQ ID NO: 241686 - DNA, 390 bp, Klebsiella pneumoniae
atgattcaggctttcgtcgttttcgtcgccgaatttcagcgcgcctcttgttcctcctgcatacactgcatgaatacccgcattgccggactgattgccttcccggcgtggtgggcgcagagcgcatggatcgtcagcggcgtctcgctgaacggcagctcgaccattgagctcctcctctatcgcaaagcgcggcagaaagctcacccccagattgcccgccacgcactgcttgatactctcaatactccacagttcgatagtgttctccatggtaatgccgcgctggcgcaggatgctttcaaaaatctgccggaacacgccctggggctcgttgatgataaagctcagcgggataggctgccgcggggctggcgtgcggcggcatga

SEQ ID NO: 241687 - DNA, 564 bp, Klebsiella pneumoniae
atgcaccacccggatattaatttgatcctggcaacgggtggaccaggtatggttaaagcggcttacagttctggtaaaccagctattggtgtgggtgcaggcaacactcctgtggtgagcgacgaaactgccgacattaaacgcgccgtagcttccgtgctaatgtccaaaaccttcgacaacggagtcatctgcgcttccgaacaatccattgtcgtggttgattccgtgtatgacgcggtacgtcaacgtttcgccactcatggtggctattttctacgcggtaaagagttaaaagcagtttctgcattaatccttaaaaacggtgcgctgaatgccgctatcgttggtcaatctgcctgtaagattgctgaactggctggtttcagcctacctgccagcaccaaaatcctgattggcgaagtcagcgtggttgctgactctgagccatttgcgcatgaaaaattatccccaactctggcgatgaaccgggccaaagattttaacaatagacataaaccctgcacttcctgcgatagaggtggatcctgcaggctatcataa

SEQ ID NO: 241688 - DNA, 891 bp, Klebsiella pneumoniae
atgaacctactggaaaagataccgctgacatctcttaaagtatttgaagttgctgggcgaacctgctcgtttactgccgctgctggcgaactgaaactgacagccagtgccgtaagccattccataagaaaaatggagaaaatgttagatgtccgcttgtttcatcgtaatacacgggagatgtcgttaacccgagaaggtgaagttttacttaggtgtatacagaaagggtttcaggagatcgaggggggatttaaatccttatcgttaagaaaaaatcgtcccctacgtatccataccgcaccaagttttgcaaatcaatggcttttgccaagactctcttctttcattagcgtttttcctgatgtggaactaaaattttcggcggataccgaccccgtccgattcgaagatgatgaatttgatgtggatatcatttatggtgaaaccgctaagcctggctgtcatcaaatcccactctccgttgaacaactcacgccgctctgtagcccgaagatagctcaacgtattaaaaaaccagaagatttgtatcaatgtttattaattcaatgcgatattcagctttatcagtggcgtggatggtttgaagaaaataatctcgccccgccggaacgttatggtttaagctttgatcggagttttatggcgatcaaagcggcatctgatggtctcggcgtggttctggagtcaatgctgctcgctgaacaagagcttaagcatggcattctggtttgccctttaatgaaaacgacaaaagaaatacattacattggccactatctatgctacccaaaatttaatcagcactcgcatcttcaggtatttcaggactggattttaaaggagctcaatattgcacatcatcgttga

SEQ ID NO: 241689 - DNA, 1389 bp, Klebsiella pneumoniae
atgaccacaaataatattgagtcattaaaacagaaaaagactcagcggaagagccagtatcgctggtttgttatggcccttatctttattatattcgtcgttgcccaggcagacagggccaacattggttttgctatcccgtatatccaggacgagtttaaactcagtaatactgatattggggtaattatcagtttgttttttgccggctacgcgctatgccagatcccttccggctacctggtcagaaaaaaaggtgtgcgattttcctatgctttagggatggcgctgacctcaatttttactttttttatgggaagagtcgactctttcgtcgtccttaaagttttacgggcgctggttggcatcagtgaagccccggtcgtaattagctccaccgccacgatcaataactggtttcccagtaaagagaagggcaccgccaccggtatttttctcgcgggttccaaattcggaccttttttagtgccgccgatttgcgcatggattctgattcattatgactggcgacatatcttttattttttcgccgtcccgggcatgatattgtcaatcgtgtggtatgtgctggtaagaaacaaacccgccgaaagtccgtttgtcaataaggaagaagcagactatatcaatgatcaatttcaggatgaaactgaacacgcaacggagaatcaaaagcgatttaaggccaggccatttaagtacggagtgatcgaccgtttcatcagaacaacggcgctgtcgccgcttaaaacatcgcgtgagatcttcagcagctgggatatttatggcgccgcaatgggctacatgtgcatggtgggcattgtggatggcgtactcatgtcgtggctgccaaaatatttactgcagaagcatgggtttaatattatcaattccgccattctggcttccacaccgttcgcaggcaacgtttttggtaatctgctgggaggatggttgtcagataatgtgtttggtaaaagacgaaaaccattaatgctgttcagcgcattctgtaccatcatcatgatgggatttatgctcaccggcccgcagggcaagctggcgctgggggttattttgttcagtattggcttcttactgtcgctgggctactcggcctactctgtgtatgccatgggccgggcgtcaaaagactgctatccggttgcctattcaatcatcaataccggcggtcaaattggcgcagtgtgtatgccgctgatcgtggggatattactggataaatatgactggaacgccgtctttataagcctgtctgtcgctgcattagtctgcctccttgtggtgcttaccattaaagaaccattgcctgttggcgcatccatgcctgaacatcggcaaaagtaa

SEQ ID NO: 241690 - DNA, 1002 bp, Klebsiella pneumoniae
atgagccagccaaatcagactaaaactcgcttaaaaacgtctgccatgatcgcgtctatcgctgatgaaggccaggcgacggtttccgcccccttcggcactgcgttgtcgaaactggcggcagaacgcccggacattgtcggcatgaccgctgacctgtcgaaatataccgacctgcatatttttgcccaggcctatcctgaacgcttcttccagatgggaatggccgagcaactactaatgggtgcggcaggcggaatagcaaaagagggcttcacccccttcgtcaccacctacgcggtattcgcaacccgccgcgcttatgacttcattcaccaggtcattgccgaagaacacttgaatgtgaaaatttgcgctgccctgccgggcctgaccacaggctacggccccagccaccaggcgactgaagatctggcgatcatgcgcggcattccgggactgaccatcatcgatccgtgcgatgcactggaaattgaacaggccgtgccagcaattgccgaccataaaggcccggtgtatatgcgcctgctgcgcggcaaggtgccgctgatactggacaaatatggctacaagtttgaactgggcaaagcgaagctgctagaagagggtaacgatgtactgcttatctcttccggcctgatgaccatgcgcgccctggaagcggcggaaaagctgcgtagggacaacgtgagcgtggcagtgctgcacgtgccgaccatcaagccgctggatgaagaaactatcctcgcgcaggcagcaaaaccgggtcgtctggtcatcacgacagaaaaccatacctgcgtgggcggcctgagcgaagcggttgccgcgctgctgatgcgcaaaggcgtgaattgtgaatttgacgtggtttctctcccggatgaattcctgcatgccggtgcgctgcccacgctgcacgatcgctacggtatttcaaccactgcactggtggaaaaaatcaaaaaccgtatcaactaa

SEQ ID NO: 241691 - DNA, 846 bp, Klebsiella pneumoniae
atggcacaaactgaattacagaaagtcgcggccgccgcatggcgcatccgtcgctatgcccttcgtatgggggaagttcaggggcaaggttatatcggtcaggctctgggctatgccgatgtgttagcaacggcctttgcgcacatgatgaatttccgtccggcagagccggagtgggaaggacgcgaccgtttcctgctatcacacggtcactatgctatcgcctattacgcggcgctgcttgaagctggaattatcccggaagaggagctggaaacttacggctctgatgacagccgcctgccgatgtccggcatggccacttacaccccggcgatggaaatatccggcggttcgttaggccaggggctgagcatcgccatcgggatggcgctgggtctgcgccagaagaaaaatccggcgctggtcatcaactccatgtcggatggcgaactggatgaaggttcaacctgggaagcggccatgtctgccgcacactacgggctaactaaccttatcaacatcgtagacgtgaacaagcagcaggccgatggcgactcgcgtaagattttgggctttgagccgctccatgagaagtgggcatcgtttggctggtacgttcagcgcatagatggcaatgacgtatctgccgttatcaaagcgtttgaaaacgcgaaaagctggccggaaaaccaaccgcgcgtgatcctctgcgacacgctaatgggcaaaggcgtgccgttcctggaaacccgcgacaaaaaccactttatccgcgtcgatgccgatgaatggcagaaagcgatcgccgtgctggatgccaataaaccggaaggagtgctgtaa

SEQ ID NO: 241692 - DNA, 852 bp, Klebsiella pneumoniae
atgaacgttgtatttgtgggtgtgggggctatcggcttgccgatggcgaaacaaatccagctggcggggcattccgtaactggcgttgatctggctgaaagctctattgccagggcggctgaacagaatattcacgtcgtaaaaaaccttaagtcagtcccggacgcagagatagtggttgtgatggtggcaacgccaaaacagctggagcagctggttgcagaggcaggcgattatctggctgggcagacatgggtgattatgtccaccgtggggccggatgctgctcgtcttgccgcccgcgaactcaaccgcgctggcgccagagtcattgacgcgccggtcaccggggggacggcgcgggcatcaacgggagagctggtgattttcgcgtccggcgttgagcatgaaattgaggctgtcggcccggtattacaggccatgggcagtgtgcgttttgtcggcaaaaacatcggcgacgggcaggccattaaagtgattaaccagcatctgtgttccattcatattgttgcggccgccgaggcattaaatcttgcccgccaactggggctcgatccaaaagacgtattaccgttaatagaaaaaggcgcggcaggatcctggatgttatccgaccgcgggccccgaatgttaaaaggtaccgatgttgaggtgaccagtaccattaatatttttgtcaaagacagtggattagtttcagtcgcggcgcaacgttgtcacgctcaggttcctatgcttgaggttgctcatcaacgttatcttgctgcattaaatgccggacttggcctgaaagatgatagccgcgttattgaaacgtggaatatccaataa

SEQ ID NO: 241693 - DNA, 1752 bp, Klebsiella pneumoniae
atgaaatacgaaatgctcgttaatatattagataaaatacgcatggaagcaccggcaaatctagagaagacctataagcctgatccaaacgaaatggaaaaagttaatgctgcaagagcacgagcatttattcatttatttctaaaggtgaattttggcttgatggagtttaaagaaagagaaaaaaacataactgattcaagctatgacggtggaattgacggttattacattgacaaagaagatagattggtttatttaatacagtcgaaattcagaaccacaaaaacaaactttgaaagcaaagatatttcttatgatgaaattctctgcatggatgtcgagagaatattaaaaggggaatcacatgatgaagcaggtaatgaatacaatgggaaaattaaacaacttcagagagagctaagcgagaccgacaacataaccaagtttaattacaagataataatacttgcgaatttaaaagacatccaaccagcaaggcttagaaaattaactgatgggtataacgctgatgtttttgattacaccaggacttacaatgaattagtattccctgtaatttcagggacgctttttactgctcacgatatttgtatccctatagatttatcagctaaaaatgcagggagtaaaataagctacactgttaaaacaaaagcgagtacttgtgaaataacggttttatttgtacctgtattagaaattgcaaaaatcatgagcaaatacaaaaactcaattcttaaatacaatccgcgcagctatttagaattccaagggcaagcagttaatgcctctataagaaaaacagttatagataataacacaaatgaatttgccctttacaataatggcataacgatgatatctgatgatacaagcatcaacgaacgaatcgggcaaaaaaataaggcccagttgagtataaaaaatccacaaattataaatggcggtcaaacctcatatatattgagtaggatttatgaagagacaccagtagaaaaactagaagatacatttaatgagaaagaggtactacttaaaataataacattaattgataacgacaacgacaaaaataaacttgaacttattgaagccgtgtctgaggccactaataaacaaaccccagtgattaatgcagataaatttgcgaatgagcctattcatcaacaaatccagagaagtctttttgaccattttggaatgttatatgaacgtaaaagaggcgagttcgctgatggtttaaacttcgggtatataacatctaatcaagtcatcgagcgtaactttttcctaagaatatatttcgctgcgaatggtgacatcaacttaggctcacaaaagaaattattccaaaaaaacccagaaagaaagctcaaaattgatgatgaaaaaattcgcaaattttatattggacactatctatttgatgagctcacaaaaaaattaaggacaagaaaacaacatctcaacataaagagaatagataagtcttactatggtaaaattcatctttacaatgtattattccctgaatcaacaattcatgacattaagaataatataaacatacttgagaatgcttgggttgatttcatgagatttgcattaaaagaaaatgaggggatcaagaaactgtggattggtaatcagaatttcaatgaagacaaatactataactctgagcgactagaaaaagacctgcatttttatattaagaatgttttataa

SEQ ID NO: 241694 - DNA, 1341 bp, Klebsiella pneumoniae
atggctaaatataaggcgtatccggagtataaggattctggggttgagtggctgggggcgattcctgaggattggtctgtcactaaattaaagtacatcgcagatttgctaaccgcaaaatctaccaattcagatgacttatttgttggattggaaaatatatcgagtggcgatggaaagtatatatcaaaagaagaaaacatagcagatggtgcatcagtgtcgtttgaaaagaatgacgttcttttcgggaagttacggccttatcttgccaaatcttggttagctactttctccggggtatgctcatctgagtttctggtacttcgcacagctaaactgcatccaaaatatttgaattatttttcattaacaaatgaatttattgatcaggttaattcctcaacttatggctcaaaaatgccacgagcaagttgggagtttattggtctgttacctgtaccaacctgttcttattctttatcagagaaggtagctgagtttctcgattacgaaaccgcaaaaatcgataacctgatcgagaagcaacagcaactgattgaacttctgaaagaaaaacgtcaggcagtgattagccatgccgtcaccaaagggctaaaccctgatgtgccgatgaaagattctggtgttgagtggttgggggaagtgccgggacactggaaaattaagcgttgtaaaaatctttttaactttgtgacgagcggatctcgtggttgggctgggttttattctgatgagggggatttattctttagaattgcaaatcttacacgagatagtattaaccctaaacttgattcaatccaatatgtcacccctccaaaaggaagtgagggagagcgctcgaaaattaaagaaaacgatttattaatttcgattaccgctgacttaggttctgtttgtgcagcagatgaatcaatttctggaggatatgttagtcagcatgtttcactatgtagacctggtagagcagtcgcatcttcgcgttggttagcttattttgtgctctcagacactgcgaaagaacaactccaaggcgctggctacggaggtactaaaattcaattaagcttagaggatattcgagacctttttgttgcttatccacccaaaagtgaacagataaaaatagcatcttatttagatgagagattatctgatttagatggtttggatcatcgtgcgcacaatttaatagaacttttaagggaacgccgcactgcccttatctccgccgccgtcaccggaaaaatcgacgtccgcgattgggttgctccggacacgcagaacattgaggagacacaggaggctaccgcatga

SEQ ID NO: 241695 - DNA, 696 bp, Klebsiella pneumoniae
atgccgccatccggcactaccgccggtacggcgcctcaccgcccggcggcgctgcgcttgccgggcctacgaggggatcccgcaggcctcctcaggaacgtaggccggataaggtatttatgccaccatccggcactaccgcgggtgcggcggcagaccgcccggcggcgctgcgcttgccgggcctgggggagatatcccgtagtcctcttcagaaacgtaggccggataaggcatttatgccgccatccggcactaccgcgggtgcggcgcctgaccgcccggcggcgctgcgcttgccgggcctgggggagatatcccgtagtcctcttcagaaacgtaggccggataaggcatttatgccgccatccggcactaccgcgggtgcggcgcctgaccgcccggcggcgctgcgcttgccgggcctgggggagatatcccgtagtcctcttcagaaacgtaggccggataaggcatttatgccgccatccggcactaccgcgggtgcggcgcctgaccgcccggcggcgctgcgcttgccgggcctgggggagatatcccgtagtcctcttcaggaacgtaggccggataaggtatttatgccaccatccggcactaccgcgggtgcggcgcctgaccgcccggcggcgctgcgcttgccgggcctacagggggagcccgcaggaaggaacgtag

SEQ ID NO: 241696 - DNA, 474 bp, Klebsiella pneumoniae
gtgtcggatagcctgtttaacggacgacgtttccgggcgctgactgtagtggataattttagtcggaagtgtgtggcgatctgtgtcggaaagtcgctgaaaggtgaggatgtggtcggtgtgatggaaaggttgcgggtgctgggcaagcgcctaccggtacgtattcagacagataacggcagcgagtttattacgaaaggtgtggagaaatgggcgtatgagcactgtgtcacaatggacttctcccaccccggaaaagcaatagataacccgtttattgaatcatttaacggcagtctgcgggatgaatacaagaacattcactggttcctgtcgctggaagatgcgcaggacaaactcaacaactggcgcagggaatataatcatgagaggacacattcatcattaaatgacatgactccgactgaattcatccgaagtctccgggaaagacgaagatttatgatttag

SEQ ID NO: 241697 - DNA, 252 bp, Klebsiella pneumoniae
atgcagagcagaaccgtttaccacagacagaaccggcgggatgatcgggcgataaccctgtgtatccggaaaatagcggaaacccggatccgctacggttgcccgcgtattcatattcagctgcggcggaaaagcaggcctgttaaccacaagaaaacacaccggatttactgtctggaaggcctcaacctgcgaaaaaagcgcccgcgaggcatgtcagtgcagtatatcgtcagcaacgtccgctcctga

SEQ ID NO: 241698 - DNA, 150 bp, Klebsiella pneumoniae
atgaaaaagacctgctataccgaagaacagattgcgtttgcgctgaaacaagccgaaaccggcacccgtgtcggggaagtctgccgaaagatgggcatttctgaagccactttttacatatatggaccacctccgttttgcaagtactga

SEQ ID NO: 241699 - DNA, 513 bp, Klebsiella pneumoniae
atgactaaagtaactgtcgattacccttcgactatctcccgtcgtaaactttctaatcttttcaatcattctccatttatgctgtctcttgttcatgacatgtgtgactctcaagcgatagttcttgctgccatgtgtgaaggtaagagcgttaccagcgccgggaatcggattgaagctgattatgaagtaactaagctggctgcggtcattgatgtcttagagaataagttttacttgccagtgtctcgtgtgaagattcccaccgcttcagatacgggcgggggtaccattcaggctaaatatcacattacggaaaatgatctgagtctgctactcgaagatccagagtcagtggttttgatgcgagaacgattggctcttgctaagttaaagagtcgagatgagcgttgtttgaagcgcttggtggctgttcatggctatgatgaggttttccggtcactaaaagctttagatgcagctaatgattcttttgatcgagattgtggttaa

SEQ ID NO: 241700 - DNA, 171 bp, Klebsiella pneumoniae
atgctccgttggcaaataaccttaatcttcttcacggaccgcaaggtcaaggtgctaaaaatgtgtaatacaatctcgaaccctcatcatgagggggagcactatatctccgccactcgcctcaaggctgtgtatgctatttttggtggtatggaggtgaatcatgactaa

SEQ ID NO: 241701 - DNA, 966 bp, Klebsiella pneumoniae
atgtccgctgaattaacattgatcttgaaaaactggacgttgagtttattacttacacttggaggagtctctctacttcccgattttgatttgagttttaatattttcactcaatggtatttagtagtaagtattggttttttttgttgccgttcattaataaggttaggcgctggtatactgagaaattttggttataataccaggcgtgttgcagttgttggttctttacctgcgggaataaatcttttaaaaggttttttagaagaaccttggttaggatttattgtgaaaggtatatatgacgatatagacgcaaaagattatgagggagttccttacgctggtaatgtgtctcaacttattgcagatgcgcgggatggaaaattagatcgcatttatattgcattaagaatgaaagatgagtctaaaattaaagatattgttagtcaacttactgacagtacgtgttctgtattattgatacctgacatatttacattcaatatactacagtccaggacagaggaaattaatggcgtaccagttgtcccgttatttgatacacctcttaacggtatcaatatggtctttaaaagattagaggatattattgtatctacgattatattacttcttatttcaccggttttgttagtaattgcatgtgctgtaaaatttacatcacctggtccagtaatatttcggcagatacgatatggaatggatggaaaacctatcaaagtttggaagttccgttcaatgtcagttatggagaatgatgaaaatgtcattcaggcaactaaaaatgatgcgcgaattacgaaggttggaaagttcctacgtagtacgtcgttagatgaattacctcaattttttaatgtgttatttggacaaatgtcagttgtaggtccacgacctcatgctgttgcacacaacgaacaataccggtctcttattgaatga

SEQ ID NO: 241702 - DNA, 777 bp, Klebsiella pneumoniae
atgtcaaaatgtcttgatataggaattgtcgctgattggcttgtcacctatgcaggtgctgagcgtgttattaaggagtttttagacctttatcctgactcagagctatattctgttgtagattttctatctgatgagtctagacaactttttcataataaaagagccaacacaacatttattcaaaagttcccttcagcggcaaaaaaatatcaaaaatatttaccttttatgccattggcaattgaacagttagatgtttcgtcacacgatataattctttctagtagccatgcagttgccaaaggtatattgactggaccggatcagttgcatataagttatgtgcactctccaatacgttatgcatgggaccttcaacatcaatatttgcgagaggccaagatagataaaggacttaaagggctaattgcaaaatggatattacataaaataaggttgtgggattatcgcacagcgaatggcgtagatcactttgtcgcaaattcaaagtttattgcaagaagaattaagaaagtatatggccgcgaagcagatgttatttacccaccagttgatgtcaaacgatttagcttatgtaagcaaaaggatgattactactttacagcatcaagattagtaccttacaagcgtattgatataatcgttgaagcctttagtcatatgccagataagaaattagtagttataggtgatggcagtgaaatgacgaaaatcaaatcaaaggcaaggaagattttggaattactcctgtag

SEQ ID NO: 241703 - DNA, 177 bp, Klebsiella pneumoniae; identical to SEQ ID NO: 27698

SEQ ID NO: 241704 - DNA, 2466 bp, Klebsiella pneumoniae
atgaaggtttggcttatttctcaaaagtggttctggaaattaagaacagatcttgtgaggattagatttattttagaacgtgcgtcatacatacatcgtacgtctgtttttaaagctaagtctaacgctcatgtttttatgtcttttgcgttggtaggtttaaaaaatttgttatgggtcatattaacgttatttgcactgggttttgttgaagattatattcggaataatacgattttgcttcatcctcttagctatgatgaaaaaaaatttaatattgatcaacttaggttgtacgcacagatacttaccgctatattttcaatatactttgctacaataggtatcattctaagtgcaggatataccagacttcggcgagatattatacaaatgcttactaccgagcaggtaggtaatgtgtattcgcggactttagtgctttctgcggtgttttgtcttagtgcaactgctctccacttgttcggggttgaacccggtcttttcgtttatgcaatgggaacattgctgacacttgttagttccttagctctgttcccattaggtcaaagattattcaatttttttgacctaaatcagttagcccgaagtgaaatactcccacgaattgcacgacacatcgaaggtgcgtctaatcccaagaattcagtatctttagctaatcatcactctaaagccgcacatttggcctttgagcagttaaactacattgatgatcgcctgatatgtgaaaaagtaggactcggagataatttacctgctctcagtaatgtttattcggcattacttcttcattaccttaatcagaaacacagaattgattatcaaagttactggttccctagacgaataaaacataagcaatggttcttagctggcgacagtgtaacatccattgctttaaaaacaaggagccaattaacggttgaagaagaaccaaattatctttggttagagaatgaaattatcaataggttggtaggccatattgaacttgcattcaaagccggtgatttcaagctcgggttggatctcatcagtctattctcatctcgtatattaacttatgcacaacagtttcagttcgatattggtatacgtgaacttcggaaaatgaagacgatcattgaaaaagcctttacaccgtctgatgtcgttaattattttgaggaaaaggtgataaaagttggaattgcggatgcatgggctgcattaggcagcaatctttgccttgaaatgttacgccgcatgattacttttgagaaagaattggagcagttctttaaagatgatatctggacagagacctctctacacactttgcctgcttttctgcaggttgaattggcttttatcgtagaacgtatcgaattcgaaaaagagattgaaggacagagattatccaaaccaaagtacgtccagcagttggcggttcagaagttattacaacaatattctaaaattctgccagaagtatgcgattttcacgtaaacatggttccagatttcgttaactcactgataaacatgaagatgccggaagccgcaacgcaagtcgttctcgctagcctacataatcatttgaagtttccccattggtttaatgaactttctctgctcttggagagatacagaaagtacgagcactactctgaaaagctatacgcattaccagaaattaatattgctgaaatgctcaaacagtttgtcgttacacaggatgaagctatagctattcttggtagggaggaaattgtgggacatatcattgaacaagagcaagatgatgaactaccggatcattttggacagatatattttgagttggctgaggaatgtatacatgcgcttgaacagaatgatgaaaataaactgagcaaggtattccctatgttcatggttctctcattgctggcatcagataccaaatttgtagatccgaaactcgatataaacaacgagtttcgactgcatctcctttcatccgcgatcaacgatctgatgtcagttctaggttttgctatcctttacagtgcttatttcgataatgcaaaactatctaaaacagtacttgataggtttaagtcttggctcgagtctgttcccaacaaacagcagtatttgaagagaatgatgattctttcaaatccgcgcaatttcagcttgtgcgcatcaccgagagatatgattcgtcttaactggaaaatggaatttgagcgccgcgcaagacatgatggctttagcgatcaaatgggaatgaatcgagggaaatctcatacgaacaaagttgtcagagagttcttaaactcccattcagatgcatcgcatctcttttgtgctctcgaaattttcccgcaactcgagcaaattgacttcaagatcgattaccatgttagtgagttggctcgtcgttttggcgtggaatacgataaggattttgaatga

SEQ ID NO: 241705 - DNA, 993 bp, Klebsiella pneumoniae
atgaaaattatcaagaatatacccctttacggttatagcgtcgatcctgagcaattaagttttgttgatagactattgaccaagtctaagaatgaacgaccaggtttctatcaaaggatgttttatgaggattttgctagagtttttaattttgtaaatcacggtgataccaatttgtttcaagtcgaaactaacgacgaagaactcatacgtaaaatgtttggaaatttacaagctagatataggaaatactcggtagatgaaacaatacgtgaattggtggaggcagtagcgcaatcgttgatttggcaaggaacggcatactattttgttcaaaacgttcctgagcaagaaaaaatacatattactcctctcgtttctgataatatattttgttttttttcagtgtattttcagtatgtgccgaaacggtatgaaagatatttagaacgggatcatgagatgcttccaagagaattaagaatcttggataaaaacaaactaatgcgtttcgaaattcctaggtccttaaggcggatgttgtctgaacaaaatcggactttaaagatcattgacaagcatcaatttggtgttactaatttttatcctcaagcaacatacgaaaatcctaacccgaaaagtcactttgattatagcatttggaaaaatacgcaagagcaagcattattccgagctacgaggaaaaccgggtggaatggtagaaattatgattcatcaaaatgttctgatttcttccattactatcgtcttattcgatttagacggaatcaacttattttacgtgattatatattgttgcaattaggtaaagagctcacaagggtaggtcaccgatataatgaggactttaatgttgtgatttcaccaacaagtgttttgcctcaaatcgataaactagatgagatggaatcattactttctagtgaggaaatagattttactgaggtgtcggattactattacgaacgttga

SEQ ID NO: 241706 - DNA, 1944 bp, Klebsiella pneumoniae; identical to SEQ ID NO: 162953

SEQ ID NO: 241707 - DNA, 642 bp, Klebsiella pneumoniae; identical to SEQ ID NO: 162952

SEQ ID NO: 241708 - DNA, 309 bp, Klebsiella pneumoniae; identical to SEQ ID NO: 162951

SEQ ID NO: 241709 - DNA, 894 bp, Klebsiella pneumoniae; identical to SEQ ID NO: 162950

SEQ ID NO: 241710 - DNA, 597 bp, Klebsiella pneumoniae; identical to SEQ ID NO: 162949

SEQ ID NO: 241711 - DNA, 213 bp, Klebsiella pneumoniae; identical to SEQ ID NO: 162948

SEQ ID NO: 241712 - DNA, 195 bp, Klebsiella pneumoniae; identical to SEQ ID NO: 162947

SEQ ID NO: 241713 - DNA, 228 bp, Klebsiella pneumoniae; identical to SEQ ID NO: 162946

SEQ ID NO: 241714 - DNA, 273 bp, Klebsiella pneumoniae; identical to SEQ ID NO: 162945

SEQ ID NO: 241715 - DNA, 339 bp, Klebsiella pneumoniae; identical to SEQ ID NO: 162944

SEQ ID NO: 241716 - DNA, 480 bp, Klebsiella pneumoniae; identical to SEQ ID NO: 162943

SEQ ID NO: 241717 - DNA, 2496 bp, Klebsiella pneumoniae; identical to SEQ ID NO: 162942

SEQ ID NO: 241718 - DNA, 357 bp, Klebsiella pneumoniae; identical to SEQ ID NO: 162941

SEQ ID NO: 241719 - DNA, 1428 bp, Klebsiella pneumoniae; identical to SEQ ID NO: 162940

SEQ ID NO: 241720 - DNA, 399 bp, Klebsiella pneumoniae; identical to SEQ ID NO: 162939

SEQ ID NO: 241721 - DNA, 3147 bp, Klebsiella pneumoniae
atgttcaagtggcttctcgaaaatagcttacgaaaccggctcctggtcatcatcggggcgctggtgctgatggcgtatggcgcgttcaccctgacgcgcacgccggtagatgtctttcccgatctcaacaagccgaccgtcactctcatgacggaggctggcggcatggctgccgaagaagtcgagcaactcatcacgttcccgctcgaaacggccatgaacggcctgcccagcgtcgaaagcgtgcgctcggtctccagcgccgggctttccttcatctacgtgacatttgactggaagaccgacatcttccgggcgcgccagatggtctccgaacgcctgacgtccatggaggaagggctagccccgggcgtgacgcccactatggggccaatcagctcagtgatgggcgagatcatgcagattgcaatccccatcggtgccaagccctcagggcagaagaacgcagccccgccgctgtcggccatggacactcgcgagtacgcggactgggtgctacgcccccggctgatggccatacctggtgttgcccaagtcatcccgatcggaggcgaggtccgtcagttccaggtccagcccaacaccacgcgaatgtcagagctgggcgtgactgcgtccgatctggatgcggctctcaagggcttctccgcgaacacttccggcggcttcctggagatcaatggccgcgagtacctgatccgcaacctgggccgcacgtcccgactcgacgacctgcgtaacctgcctctcgcggtgcgtgcgggccaacccatcctgctccaccaggtcgccgatgttcagtttgcgccagccatcaagcgcggcgatgcgggcttcgagggcctgccagccgtgatcctgggcatccaaaagcagcccacggccgatacgattgcactgacccgctcgatcgagtcagcgttggcggacatgaagggctcactgccggctggcatggccgagccacaggtgaccttccgacaagccaacttcatcgaggcgtccatcagcacgctgcaaggcaagctcatcggcgcatcggtcttcgtggcggtgatcctgttcttcttcctgggcactttgcgccccctggtgatcgcgttgaccgcgattcctgcctcgatcttcgtgaccgggctggtgttccactatttcggcctatcaatcaacaccatgacgctcggtgggctggcgatcgccatcggcggtctcgtggacgatgctgtggtcgatgtggagaacatcatgcggcggctcaaggaggaccgcacccgccaccctgagaaccggctgacgcccctggtcatcgttgccagggcctcgatggaggttcgctcggcgattctctacgccacgatgatcattgtgctggtgttcctgcccctgttcgcgctgccggggatggaggggcgcttgttcgtgccgctgggcatcgccttcatcgtctccacgctggcctcgctgctggtctctgtgacggtcactccggtgctttcgtactacctgctgcccaagatgaggacgctggaccatggcgacactcggcttctagcctggttgaagacgcgctatcagggcggcctgcagcgggtcttgcagcggccgcgtgccgcccttggcatggccgctgtggctgtcacactggctgtcgccgcggtgccattcttcccgaccacgttcctgcccccgttcaatgaaggaacgttgctggtgggcctgcgcctgaatcccggtgtgacgctggccgaatcttcggcgcttgcccagcaagccgagctgctggtcgcgcaggtgccagaggtgcagcacgtgggccggcgcagcggacgggccgagctggacgagcatgccgaaggcgtgcatgtcagcgagctggacgtgggcctgctgcccgcctcggagctaaagcgctccatggaggagatcaccgccgacatccgttcgcgtctggctcacttgcccggctccatcggcattggccagccgatctcgcaccgcatcgaccacatgttgtcgggggtgcgctcgcagatcgccatcaaggtgttcggcgaggacctggacgtcctgcgcgggcaggcggatctgctgcgcgccaagctggccggaattccggggcttgctgacctggagatcgaaaagcaggtcctagcgccgcagatcaaaatccgcgtggattatgcggcggcgggacgctacggcgtggccgcaccgcaaattctgtccacgctgcaaagcctggtcgaaggcgaaaagatcaccgaggtcatcgagggcaaccgccgcttcgcgctggtggttcgcctgcccgagcaggcgcggtcgattgagggcttgagccgcatcctcatcgacacgcccatgggtcgggtcccgttgtcgcgccttgccaccatcgaagacagcgacggccccaaccaggtcagccgcgacgatggccgtcgacgcatagttttgtcggccaacgctcagggacggccgctgtccgaagtagtggccgacatacgcagcgtcgtccaagaagtgcgcttgcccgaaggctacttcatcacgctgggcggccagttccaggcacaagaggaagcctcgcgactggtgggcctgctgtccatcgtctccctgacgctcatgttcgtggtgttgtacacgcgctacaagtcggtcgtcctatcagcgctcatcatggtgaacattccattggccctggtcggcgccgtgttggggctgtggctgtctggccagccgttgtccgtggccgccctggtcggcttcatcacgctcgcgggtatttctgtgcgcaacggcatcctgaaggtgagccactacctcaacctcatgcgcatggagggcgaggacttcgaccagaagatgatcgtgcgtggctcgctcgaacggctttccccggttctgatgaccgcgctggtcacggccttcgcgctggccccgctgctgttcgaggcgtcccgacccggtactgagatcctgcaccccgtcgcggtggtgatcttctcggggctggtcagctccacgctgctagacaccttccttacacccgccatgttctggctgttcggccgcaagcctgccgaacgcctgctggacgaccgcgacgcggaggcattctga

SEQ ID NO: 241722 - DNA, 1116 bp, Klebsiella pneumoniae
atgaagcgcaacttccgtttcctaatgacgacggccatggcggctgcattggctctggctgctcccgcgttcgctcacgacggccatgaccacggcgacgaagcgccggctgcgtcttccaatggcccccagcgccagcctgatggcagcgtgtttcttccgaaaccgtcgcaacgtcagatcggtgtacgcacccagctgatcaagcaggagcccttggcccgcagccatgaactggctggcaaagtaatcatggacccgacgacaggcggcaaggtccaggcaatggtaatgggccggctggtgcccgggccggatggtctgccgcagatcggccaatccgtgcgcaagggccaggtgctggcttacatcgaaccggccagcggtgtgctggagcgctcaggccagatggcccaggttgccgagctgcgtgcgggccaagcgctcgcgcagaagcgcttggcccggctgcgcgagctgtcggagaccgtgccccgcaaggagatcgaagcagccgaaagcgaagtgaacagcctgaccgaacgcgcccgcgccttgagcgggggcctcgccggcagggacgtactgaaggccccagtcagcggcgtcatcgcatccagccccgcagttgccgggcaggtcgtggatgcgcgcgaactggtgtttgaggtggtcgatccgacccaactgcgcatcgaggcgcttgcctacgatccggcaatggcacagaacctggccggtgctgcactcgcagtaggcggtcagaaggtgccgctgagcttcgtcggtgccgccagcagcctgcgcgagcaggccctgcccatgctgttcaagggcaccagcgaaagcctctcgcgcttggcggtcggtatgccggtggtggtcttcgtgcaagaggcgacgacggtacctggctaccgcgtgccttccggtgcgctgatgaagaaccctgccaaccagaacatcgtctgggtcaaagaccaggccgagcgcttcgagccgcgtgtcgtgaacatcactcctttggatggtgcatccatcgctgtcacttcgggcctggcggacggcgaccgcgtggttgtcgagggcgcgtccctgatcaatcaagttcgttga

SEQ ID NO: 241723 - DNA, 552 bp, Klebsiella pneumoniae
atgtcgcaatcctctttctggcgtgcagctgccttgtccagcctcctgcttggcagtagcgcaacgtgggccggcgacggccatgaccatggcgaagccgctcctgcccccgcagcggccgcgcttccgcgctttgccgcagtttccgatgacttcgaactggtgggtgtgctgaacggccagcgtctcacactctacctcgaccatgctgccgacaaccggccggtgaccgatggcgagctgaccctcgagctgggtggtcaacaggtaaaggtcagctcacacggggttggagagttcgaggccgatctgactgagccgctatccgatggcgagacctcaatcatggccactattactgcgcagggccaatcggacctgttgacgggcgttctcgatgttcatagcgcagacgccgaacacgagcatgccgtcgcatccggccgtgtggtcgtactaggtggcggtgccgcagtcctcggcgtcggtgtcctagcgtgggcgctgcgcagacgtacacgcaccaacggtgcactgcgaggtgcagcatga

SEQ ID NO: 241724 - DNA, 1329 bp, Klebsiella pneumoniae
atgcttcgcaaagacatacgcaagggatggatatgggcggtatccacgctttgggccggcaccgtgctagcccagccagtagccgcccctcacgtcccatccagaccagacagccacatggtcgcccaattgtgggagtcagcttggcagcggcagccagaagccgctggagaaggcgcctggcagcaggccgcccaagcacgccaagagacggccggcagttgggtggcaggtccgatggcgctggaagcctccaccaaaactgatcggttcaacaaccgcaacggacagcgcgaatatgaagtcggggtggctattcccctttggatgcctggtgagcgcgcctcgtcggcacgctgggcggacgcggaaagcctcgcgctatccagccggatgctggccgccaagctacgcacggccggacaggttcgccaggcatggtgggcatggcagcgtgcccaggccgaattggtggcggcgcaggatcgcacccgcagcgcggacgagttggcgcaagatgtggctcgccgggttcgcgcgggcgacctggcgcaagccgacagaaaccaggccgatggcgccttggcgtcggctcgtagtgccctggccattgctcaggccgaagaaatcacgcagcgcgaggcgttgttggcactgaccggcatcgagagtatcccgtcgcaggccgattccgcgcagccggagcagtcaggtgtccgagttcaaccggcatcggcacagccgtccggcgcgttgttgggtaaccaccctgcgctgctggaactgcagcacaaggcgctggcggcccgccgctctgcggaactggtgtcccatcagaagtacgccaaccccgaactgaccctggcgaccacgcgggatcggggcggctacggcgaacgctacaaccagacgatcacggtgggtgtgcgcattcccttcggtacgggtagccgtcataccgagcaattgtccagcgccaatgcgcaggcactggaggctgagtcggcactcgcggcccagcgcacccggctactctcggaaattcgaactgcccaatcgcgcgaactggcaaccagcacccagatgcaggccgcttcggagcgccagcgactagcccaacaaacgcgcaccttctaccaaaagtcgttcgcgatgggcgagacggacatgccgacacgccttcgcatcgagcaggaggccaccgaggccgagcgcgcggcgctgctcgccaaggtggagcatgccgcggccatctcgtccctgttgcaggcacaaggcacgctgccgcagccgaccgagactttcactgacatctccggcacgcgctga

SEQ ID NO: 241725 - DNA, 258 bp, Klebsiella pneumoniae
atgaaagagatgcacaagcacaccagccacccagatctcgtgaaacggctcaagcgcgccgagggtcatctgcgacacgtcatcgggatgatcgaaggagaagaaacctgcctggacatcgctcgccagctcgctgcggtggagagcgccgtcacagcggccaagcgcgtcctgatccatgaccacatcgaccactgcctatctcatgatgaggactccgttctagccgaaatgaaggcgctaaccagactgctctga

SEQ ID NO: 241726 - DNA, 1311 bp, Klebsiella pneumoniae; identical to SEQ ID NO: 162933

SEQ ID NO: 241727 - DNA, 1023 bp, Klebsiella pneumoniae; identical to SEQ ID NO: 162932

SEQ ID NO: 241728 - DNA, 378 bp, Klebsiella pneumoniae
atgacatcccgcaaaaccaccagcgccgctattgtgcaatgttcgacctctaaccacggcacgaccactgatgtcctcgcactatcgcaaagtgacgtcgctgttctggcagagaccttccgcctgctgggcgaccaatcgcgattgaaaatcctgttgcagtgcatgcgcggatcggtcgcagtgggcgacattgctggctcgctagacctgtcgcagtccttggtcagccatcacctgcgcctgttgcgcggcgcgcgcctcgtgcgcggcgagcgccaagccaagcacatcttctacggcattgccgaccagcacgtcagccaggtactccaggacatggcggttcacatttcggaggacggacacgacgattga

SEQ ID NO: 241729 - DNA, 570 bp, Klebsiella pneumoniae; identical to SEQ ID NO: 162930

SEQ ID NO: 241730 - DNA, 2715 bp, Klebsiella pneumoniae; identical to SEQ ID NO: 162929

SEQ ID NO: 241731 - DNA, 1239 bp, Klebsiella pneumoniae
atgcgtaaaaaaatcagaatcgttgtggtggcaggcgtcatcgcagccgtcgggggcatagcgattgccgcccgcgacgccaaggacgagggcaaggccgcggcgcccccggcgggcgcgccgatggcgccgcaggtgcccgtggccgaggtcatcacccgcacggtcgcgccatcggccgagtacaccggcttcctggccgcgcccaagaccgtcgagctgcgctcgcgggtcggcggcgccgtcgatgctgtgagcgtccccgagggcagcctggtgcgcaagggacaactgctgttccagatcgacccccgaccgttccaggtcacgctcgacacggctgcggcgcaactgcaacaggccgaggtgctggccagtcaggcccaggccgacttcgaccgcgccgagcgcctggtggcgaccggcgctgtcgcgcgcaagacctacgacgatgccgtctccgcgcgcagtgcgcgccaggcccaggtgcaagcggccaaggccgccgtcgctgcggcgcggctggatctgtcctacgcccgcgtcacggcgcccatcgccgggcgcgttgaccgcgtgctcgtgaccgagggcaacctggtcagcggcggtgtcgccggcgcggccacgctgctgaccacgatcgtgtccatcgacccgctgcacgtgtacttcgacatcgacgaagccacgtacctcaacgtcgtgagccgctcgcggcccgctgcgggcgccggcggcaaggcctcgctgcccgtgcaggtcgggctgaccacggacaagggtttcccgcacaggggcgcgctcgacttcgtgggcaacaccattgaccgaagcaccggcacgatccgcgcgcgcgccgttgtgcccaacccggatgggcgcatggcacccggcatgttcgcccgggtcaagctgtccaccggcgcggcgcgcgaggccgtcctgatcgacgatcaggccgtgggcaccgaccaagggcgcaactacgtgctggtcgtgggcgagaacaaccaggcccagtaccggcccatcgaactggggccggtggtggacgggctgcgcgtcatcaacggcagcctgcaggccggtgagaagatcatcatcaagggcctcgtgcgccccggcatggcggtcacgccgcgcatggtgcccatgcagccgcccgcggcaccggccgccggcgcggaccccgccaaggctgacggcgcggccggctcggcggaggcccgcaaatga

SEQ ID NO: 241732 - DNA, 3177 bp, Klebsiella pneumoniae
atgaatttcccccgcttcttcatcaaccggcccatcttcgccatcgtcctgtcggtgctgatgctgatcgcgggcgcgatcagctacttccagctgccgctgagcgaatacccgcaggtcacgcctcccacggtgcaggtcaccgctagctatcccggtgccaacccgcaagtgatcgccgataccgtggcatcaccgctggagcaggcggtcaacggcgtggaaggcatgatgtacatgcagtctcagatgtccaccgacgggaaaatggtgctcaccgtctccttcgagcagcatatcaacgccgacattgcgcagatccaggtgcaaaaccgggtctcgcgggcgttgccgcgcctaccgcctgaagttcagcgcatcggtgttgtcaccgagaaaacgtcgccggacgttctcatggtggtgcatttgctttcgcctggaggtcgatatgatccgctgtacgtctccaactacgccacacttcatgtgaaggatgagctggctcgtacgccaggcgtcggcgatgtcctagtctggggcgccggggagtattcgatgcgggtctggctcgaacccgccaaggtcgctgctcgtgggctgatcgcgagcgacgtggttgccgccatccgcgagcagaacatacaggttgccgctggttcggttggtcagcagccggatgcctcggcggcgttccaggtcacggtcaacactctgggccgactgtcgagcgaggagcaattcggcgagatcgtcgtgaagacgggcgccgacggccaggtaactcgcctgcgggatgtcgcccgcatctcgatgggggccgattcctactctttgcgcagcctgctcaatggcgagccggcggtggggatacagatcatccagagcccgggcgcgaacgcgctggatgtgtctagcgcggtgcgcgcggcaatggaccgacttcaagctaagttccccgacggcattgagtataggatcgcctacgaccccacggtcttcgtgcgcgcctcgctccagtccgtcgccgtcacgctgctggaggccatcttcctggtggtgatcgtggtggtgctgttcctgcaatcctggcgcgcgtcgatcatcccgctgatcgccgtgccggtctcgctggtcggcacgttcgcggtgatgcacatgttcggtttctcgctgaacacactgtcgctgttcggactggtgctgtccatcggcatcgtggtggatgacgccatcgtggtggtggagaacgtggagcgccacatagcgctgggcgaatcacccaaggacgcggcgcgcaaggcgatggatgaagtgactggcccgatcctggccatcacctcggtgctggcagcggtcttcatcccctcggcgttcctgtcggggctgcagggcgagttctatcgccagttcgcgctaaccatcgcgttctcgaccatcctgtcggcgatcaactcgcttacgctgtcgccagcgctggccgccatcctgctcaagccgcaccacggcgcggccaagcccgatcgcgtcacgcgcatcatcgacggcgtgttcggcggcttcttccgccgcttcaaccgcttcttcgaccgcgcctcgaattcctacgtcgggggcgtgcgccgcgcggtgcgcggcagcgccatcgtgctgctgctctacgtcggcttcctgggcctgacctggctgggcttccacaaggtgcctgcgggcttcgtgcccgcccaggacaagtactacctcgtgggcatcgcccagcttccgaccggcgcctcgctggatcgcaccgaggcggtcgtcaaggagatgaccaagatcgcactggctgagccgggcgtcgagagcgtggtggccttcccgggcctgtcggtcaatggaccggtgaaccagccgaacaccgcgctgatgttcgccatgctcaagcccttcgatgagcgcaaggacccgtcgctgtcggccttcgccatccagggcaagctcatgggcaagttcagccagatcccggacggcttcgtcggcatcttcccgccgccgccggtgccgggcctgggttctatgggcggctttaagctgcagatcgaggaccgggcgggcctgggtcccgaggcgcttgcacaagcacagggccagatcatgggcaaggccatgcaggcgcccgagctggcgaacatgctcgccagcttccagaccaatgcgccgcagttgcaggtggacatcgaccgggtgaaggccaagtcgcagggcgtgtcgctgaccgaggtgttcgacaccctgcaggtcaaccttggctcgctctacgtcaacgacttcaaccgcttcggtcgcacctaccgggtaatggcccaagccgatgcgcagttccgcatgcaggctgaggacataggcatgctcaaggtgcgcaatgcagcgggcgacatgatcccgctgagcgcgttcgcgaccatcgagcgcagttccggccccgaccgggtgatgcattacaacggcttcccctcggcggacatcagcggcgggccagcgccgggctactcatccggccaggccaccgccgcgattgagaagatcgtgagcgaatcgctgcctgacggtatgacctacgaatggacggacctgactttccaggaaaagcgagttggcaatactgctatctatatcttcgcgctggcggtgctgctcgccttcctgttcctggcggcccagtacaacagttggtcgctgccgttcgctgtgctgctgattgcacccatggcgctgctctcggcgatcgccggcgtctggctctctgggggggacaacaacatcttcacgcagatcggtttcgtggtgctgatcggcctggccgccaagaacgcgatcctgatcgtggagttcgcccgcgcgaaggaaagcgaaggggccgatccgctggcagccgtgctcgaagccgcgcgcttgcggctgcgcccgatcctgatgacgtcgttcgccttcatcgctggcgtggtgccgctggtgctggccagcggtgcgggcgccgagatgcgccacgccatgggcatcgcggtgttcgccggcatgctgggcgtgacggtattcggcctggtgctgacgccggtgttctacgtcgtggtgcgcaagctggcgctgcgccgcgaagcgcgccatgcccgtgtcggcatgaccgaccagcacgcatga

SEQ ID NO: 241733 - DNA, 1506 bp, Klebsiella pneumoniae; identical to SEQ ID NO: 82581

SEQ ID NO: 241734 - DNA, 387 bp, Klebsiella pneumoniae; identical to SEQ ID NO: 162924

SEQ ID NO: 241735 - DNA, 1182 bp, Klebsiella pneumoniae; identical to SEQ ID NO: 162923

SEQ ID NO: 241736 - DNA, 585 bp, Klebsiella pneumoniae; identical to SEQ ID NO: 162922

SEQ ID NO: 241737 - DNA, 1455 bp, Klebsiella pneumoniae; identical to SEQ ID NO: 162921

SEQ ID NO: 241738 - DNA, 846 bp, Klebsiella pneumoniae; identical to SEQ ID NO: 162920

SEQ ID NO: 241739 - DNA, 504 bp, Klebsiella pneumoniae; identical to SEQ ID NO: 162919

SEQ ID NO: 241740 - DNA, 543 bp, Klebsiella pneumoniae
atgaacaacatgcagcacgccctgtcattcaggccccttcgttcttcagacggcttgcgctgccgtccggtgcaggctttgggagcgatattcctcgggctggcttcactcgcctatagcgtcacgtcgcaggcggcagatgagccagagaacgtgaaggtggtccggcaataccttgacgcctggaatggcgggcgaaccgacgcgatggaaaaagtgctcgattccaacgtcgtctatttcaataccagcaatgaagcgtcccgcactgggcctcaagccattaccgaagtctcgcagtttctgatgaaaatcctgcccgaccgaaaaatgaaaatccgttcgcagccggttgcctccggcgatggtgtggcgatcgagtgggaattcaccgccaccaagaacagcaatggcgggacgtcgccctccagttcgaccatcagttatttcggcgcgagcttcttccgtgtttcgaacggaaagattgtctatgccagcgactactacaaccacaacaccatgcagaagcagcttcagcagtaa

SEQ ID NO: 241741 - DNA, 696 bp, Klebsiella pneumoniae
atgaataaccgcttcacactcccacaggcgccgcggcgttcgctcgtcgattcgacgattgagctgatccgcggccagatcgagggaggcgcctggaaggtcggcgagcgcatccccagggagcaggaactggccgagatgctggaggttggccgcaacacggtgcgggaagccattcgcgtgctctcgcacggccaggtcctggaagtccgccagggtgatggcacctacgtgcgaaccaatatcgatccggccgaggtcatgcgccgtgtcgggcgttccggcttgcgagagcacttcgcgttgcgctgcatgctggaaaccgaggcggccaggttggccgcggtgcatcggtccaaggcggacgttgggctgctgcgccgactgttgaaggcccgcggcgagcaggagcaacacgcatcgagcgcggcctttgccgaggccgatacggctttccactgcgcgatcgccgggatgtgcggcaacggcgcgctggctgagctgtaccgctacttcgcgaactcggtccgcatgaacacgctgactgcgctgaaggacaaggaactgcccgagccgggtctcgcgacccatgaggcgatcgtggatgctatcgagcgccaggatggagaagcagctgcggcggctgtgcggaacgtggtcgctccgctgattgcggcacttgagaaatcgggttga

SEQ ID NO: 241742 - DNA, 411 bp, Klebsiella pneumoniae
atgtcccagcaaccgaaagttcacgacaccagcgatttccccatcgtccgcttcgacggcgcaagcatctacaacggatacagcagcgcctggtgcgcggaaatggatgaactcgtcgcctgcggaaagcccttcgtgcttatctacgtcgcgggagggccagaagagactctcgacgatcgcgctcagcgcggcgtctggctgaagactcacaaggagacgcttggcggcacattgctcgcgctcatccacgtcgaaccggattcggataagcgagcccagttggaggccatgctgccaaagctcgtccaggctttcggtacaccgcagtccacccgggccacccacgccgatgccgaggcgctggcccggtatgtcctggcgggtggtcgcgtcgaagattcgatatga

SEQ ID NO: 241743 - DNA, 702 bp, Klebsiella pneumoniae
atgaaggtcaacaagttcagcctcttgttcattgcgggcgccgtcgtggtcgccgccggcctgatggccgtccagaagaaggtggtcgtcccgtcgggtgaagcgatgcaggccagtgcgggcggaggtcaccaagggcacgcgatgccctccagcgcctcggccaatgacagtccttccacgaccgcgtatcgcgccgtgaacgaccagatgcacgccgggatgggagcgcagttcactggcaacgccgacgtcgatttcatgcgtggcatgatcccgcaccaccagggcgcgatcgacatggccaaggtggcgctgcagtacggcaaggacccggaggttcacaagctggcccaggaggtcatcaccgtgcaggaaggcgagatcgccatgatgaacaagtggctgggcgacaacggccagcaggcggcggccggcagctcgggcgatgcctcgacggccgcctaccgtgccggcaacgaccgcatgcatgcggacatgatgatcgacttcagcggcgacgccgatgtggacttcatgcgcggcatgatcccgcaccaccagggtgcgatcgacatggccaaggtggcgctgcagtacggcaagaacccggaggtccgcaagttggctcaggaggtcatctccgcgcaggaaggcgagatcgccatgatgaagagttggcttgtcgctcggggcaagtga

SEQ ID NO: 241744 - DNA, 258 bp, Klebsiella pneumoniae
atgaaccaagccaacaccccgcgcatcctcatctatagcactccaacttgcccggactgccgggcactaaaggagtggttgtcccagcagggcatcgcgtttgaagagcgcgacctgaccgacccgaagatttccgcggaggccaagtcacgaaccggcgtgcgcgtggccccgatcacgatcgtcggcgacgaggtcttctatggcaccttcgcgagccagaagccgaggctgatgaaggcgctcggtcttcagtga

SEQ ID NO: 241745 - DNA, 873 bp, Klebsiella pneumoniae
atgcgatcgacatcatcagccacctccctgcacgtcgccatttccgagggcatcacagtcgccaacgacctgccgttcgtgctgttcggcggcatcaacgtcatcgaggatctcgatacgaccctggctgcggctgagcacttcgcggaggtgacgcgcaagctggggatacccttcgttttcaaggcgtcgttcgacaaggccaatcgctcgtcgatccattctttccgaggtgtcggcctggaggaagggctgcgggtcctcgatgcggtcaagtcgcggttcggatgcccagtcttgaccgacgtgcatgaggttgagcaggccatgcaggtcgctgccgttgccgacgtactgcaagttccggccttcctggcccggcagaccgatctggtggccgccattgcccgcaccggtcgggtagtgaatgtcaagaagccgcagttcctcagcccgggccagatcaggcatgtcgtccacaaactgcacgaggctggcaacccgcgcgtcctgctgtgcgagcgtggcacgcagttcggctacgacaatctcgtcgtggacatgttgggcttccgcgaaatgagcgttgccagcagtggcctgccactggtgttcgacgtaacccatagcctgcagcggcgagaagcggatgcgttggcttcgggtgggcgtcgccaacagttgcccgaactcgcgcgggccggcatggcggtcggcattggcggtttgttcctcgaagcacacgccgacccggcgcatgcacgttgtgacggacccagcgctctgccactggacacgctcgaaccgctgctgcggcaggtcaaggcggtggaccaactcgtcaagtcgttcgagcctcttcggatcgactga

SEQ ID NO: 241746 - DNA, 1872 bp, Klebsiella pneumoniae
atgctctccctgttccagcgaaaacggcccccggtcgctgccgcgccgtcgccagcacccgccaccgacctcccgaaagggttgatgcggccggagtcggccgcatcgttgctcgccaccccgcgccggcagaagctgctggaacacatctggcagcgcacctcgctttcgcgcaagcagttcgcctccctgtaccgcgcgccgctggagcgctacgccgagctggtccaggccttcccggcttccgaagcgcatcaccatgcctacccgggcggcatgctcgaccatggcctcgaaatcgtcgcctacagcctaaagctgcggcagtcccatctgctgcccatcggggccagccccgaagaccaggcggcgcaggccgaagcctggactgcggccgtcgcctatgccgcactgctccatgacatcggcaaggtggccgtcgatctgcacgtcgagctggccgacggcagcacctggcacccatggcacggcccgctgcgccaaccgtaccgcttccgctaccgcgacgaccgcgagtaccggcttcatagcgccgcgacaggcttgctgtaccagcaattgctcaatcgcgatctgctggactggctcagtggctatccatccttgtgggcgccgctgctctacgtcttggctgggcagtacgagcacgccggggttctgggcgagcttgtcgtgcaggccgaccgcgcctccgtcgcccaggagctgggcggcgatcccgcgcgcgccatggccgcgcccaagcactcgctccaacgcaagctggtcaacgggctgcgctacctgctcaaggaagagctgaaactgaaccagccggaggcctccgatggctggctcaccgaggacgcgctgtggctggtgagcaagacagtctcggacaagctgcgcgcgcacctgctgtcccagggggtcgatggcatccccgcgaacaacacggccgtgttcaacgtgctacaggatcatgccatgttgcagcccaccgcctccggcaaggccatctggcgcgcaactattaccagtgagagtggctggtcccatgccttcacgctcctgcgcctggccccggcgctgatctgggagccctcggagcgacccagcccatttgcgggaaccgtgaccgtggacaacgccggcgaggccgaggacgggccgcgcccgtccgcacccgacgctgcattgctacctggagcagcggtggcaacggagaaggagcccgcagcaagcagccgtccagatcagtcgggcggaagtcacgccatacctcccagcacgcagcgcaatccggccgacccactggaaagcatgctggcgatgttcgagacaacgcctgagccggagcagtccgtcgaagccccgccagagggtgccgacgatgcagcggtgccgctcgaccctcccgcatcggccccaggtccttcggcgccgaccgccgcgcctgcgccgcacgatttcgcctcatttaccgggcggccatcgggcgagcatttcatggcctggctgaaacaggccgtccagacccgcaagctcatcatcaatgacgccaaggccctggtacataccgtgtccgacacggtttacctgatcagccctggtgttttccagcgctacgcacaagagcatccaaccattgggccgcttgcgaaggacgcggccctgcaggactggcagtgggtgcagaagcgctttgaaaaactcggactccacaggaaacagccatcgggtctgaacatcaggacgtgcgaggtcatgggaccgcgcaaaacgcgccaggtgcatggctatttgctcgaagacccatcgcacatattcgatgccgttccaccgaacaatccttatctgtcgctcaaatag

SEQ ID NO: 241747 - DNA, 627 bp, Klebsiella pneumoniae
atgcccactgcgatcgaattcattgccgaccggctgccgcgagtcacggtggaggatgtgcgacgcttcgccgataccgtcgaaatccgggatgcaccggcgttcgcggctgagttgcaggcgttcatccacgagcgcgtggaggcggtgacgctgcccgccaacctggaaggtgaaacggtggcgcaggccttgcagcgcaaggcggccgcgttgcgctccgacacgcgctggacaccggctgaaaccgatgtccagcgaggccgcgccttgctgctggaagccttcaaccagccggacaacctgccgcctgccgagttcgccaagctggcggacaagtcgcgccagcaaatctacaaggacatcctcgcccgtcggctgctggcgctgaacgtggggccgcgcggccagaagctgcccgactggcagctcgacccggtgaagcagcagttgacccaaaccgtgctccaggaggtcgagggcatcgaccactggacgatctaccgcgcgctgtccgaacccctcgaaggcctgggtggtcgctcgcccgtggatgcggtgacgcatggcacgatcgatgacgtggccgaggccgtgttcaacgtgctgggcgtccaggtgcattga

SEQ ID NO: 241748 - DNA, 633 bp, Klebsiella pneumoniae
atgagccacgagctgccttcgttcctgatcgatgccggtgaactgctccagcatgtgagccgcgtcgtctatcggggcagcccgctgtactatggccgcagcagcacgaatcgctacgatgacccagcgggggcctacggcgtgctctacctggggcgcgacctgcccacggcgctgatggagtcggtgtttcacaagcaccagtggcttgcggacacgcaacgctcgatcgcgctgaaagaagtccaagcccggatggtgcgcgcagtaggcgtgatggacgacgtgtttctggccgatctcacggcgcagggcgtcatggcgggctacttcggcctgaacctggagcagttggccagccgcgactacacgcacacgcagcgggtgtccgcccaggtgcatgcgatgctcggagatgatggccaggcgctgttcgacggggtgctctatccgtcgcgcaacaactatcccgccaagagcatcgccctgttcgagcgtgcgggagcgaaggttggcgtcatcgaggacatcgacctggtggaccatgtggactggccgcgtttcgttgttacctaccgcatcggcgttgaacccgaccccggcccggtggggccggatgacgaagcgtcctga

SEQ ID NO: 241749 - DNA, 366 bp, Klebsiella pneumoniae
atgaacacgacgacccgcaccagcaccgcagaacgcctcggccgcgcctttggccgcggatggcgtgcctatgcgcgacgcgaacggcgggcgtcgaactggttggtgtccaagggcatgccgcgagctggcgctaccgcgctcgtgtgggtagccaagctggctgtactgggggtgctgctctacgttgcgttttggtttgcactcgtgatgctgggcgttgcggcggcgggatgggctgctgctgcaaatacttcggatgaggacgagtggcctttcaccgacctcaccgagctgcgcaagacgccgggctacgatcccaacctgtacaacgacacgtcgcacgagttgtacaccgacgactga

SEQ ID NO: 241750 - DNA, 1521 bp, Klebsiella pneumoniae
atgacgctcttcacgaccgactatctggagtactacctcaccctcgtgtcctggatcgtcaacaacggtatctgggccgtgctggtgtccagcggggtgttcgcgctgcctttcgtcgccatcgtcgtgcaggagtggctgaaggcccgcgcggaaggcgctgacgagggcaacaaaggcgttctgagtgccgcccgtatcgagaaccgggtgttcgtcgcgatcgtggtggtgatgttcgcgggcattccgttcatcgacgtggacctcagcaccatccagtacgacagctcgcgctcggcgcagtgccaggtcagcgtgccgcagcccacggaaaccggctggtcgcagtccttcagcaccatcaacaaccagtcggcgaaggtgccggtctggtgggctttcatgcacgcgctctcgcgcgccgtcacgagcgcctcggtagcggcgatcccgtgcggtacggacctgcggcagatgaggatggagatcgacgcgacccgcattgacgacccggtactggctcaggaggtcgcggacttctcgcgggattgctatgggcctgcgcgggccaaattgttcatgcagcgcccggatctcgatgagcagcagatgcacgacgtaacctggatcggctcgcgctttttcacggacacgggtggctactacgacagctaccgctccagcacggcgcgcgaggcatggccctatgacgacacccgcgatgcaggcctcgcgcaggttgccaatggtggcggctacccgacctgcaggcagtggtggtcagacggcagcaacggcctgcgcgcgcggctgctggggcaagtggacccgaccctgctgaatcgcctggcgggctgggccgggttcctcagccgggccgaggtggacgattcggtgatccgcgccatcgcgtcaccgcggcagcagaaactgaaccagggcagcgtctatacggactacggcggccagatcgacaagaccctgccgaacatcgtgacgcgcgccacgggcgacgtggggatggcagtcggcgcgattgccgcgtttcctgccatggatgtcgtgcgccaatccctgcccatgatcctcgccttactgaagatggcgctggtcatctgcatcccgctcgtgctggttgtgggcacctacgacctgaagacggtcgtcaccgtcagcgtcgtgcagttcgcgctgttcttcacggacttctggttccagctcgcacgctggatcgattcaacgattctggacgcgctttatggctggggctttggctggaaccggccgcacaccaactttgacccgctggtagggttgaacaacgccttcggcgacatgctcctgatgttcgtcatgggcacgatgttcctggttctgccgggattctggctggcgagccttacctgggttgggattcgggccgggcacgtcatccagggactttccgatggcagcaagagcgccggccaagctggcggcaagggtgccggggcgctcaccggaggaaaactgaaatag

SEQ ID NO: 241751 - DNA, 372 bp, Klebsiella pneumoniae
atgagcccggcgcgcatggcctggcggccgctgcgctggttgttcagccggcgcgcggcgaagacgctgctgtggctggtgcttatcgttgccgccgcagtgggggcgaacgtcgcgggcatcaacctggtcggcagcgttgcaggctgggaacggtggctggcggcctccgcagggtatttcttcatctggcggctgtgcgtgtacgcggcaacggcctatggatggttctggatgcgccgccgggtgctggcccgcgaagaccaaagcgggacagatgggcaggcgcggcgccggctgatccgtaccgaggtcgccggcgtcgtcgccatcgtcgcgctggaagccagcctgttgatgcaggccgcttga

SEQ ID NO: 241752 - DNA, 1398 bp, Klebsiella pneumoniae
atgaagttccgtcctgcattcaatccgttctcccgccgggtacgtcgcacggagatcgtcctggcactggccggcgcgctcgcgctgggcagcggcgtggcctggggtcaactgggataccagaccagcggcagcgtcatcggcgatgacgtcatgtactcgatcggtggcggcaacgccgtgtcgatgggacgtgcagccggcatgcgctccatcggtgtcggcgtgggttggaacagcaacttgatctgcggcgacatgagcatccagaccacgttgaagaaccaacttaacggcattaccaacggcttccagcaaatcatgtcgtcggtgatccagagtgccaccagtgcggtggcatcgttgcccgcactgatcatccagcgggccgatcccggtctgtacaacctgctcaccaatggcgtgctgcaggcgcggctggatttcgaccgcagcaagctgacgtgccgtgccatggccgagaagatggccgaaacggcgggcggccaactcggctggagccagatggccgaagggctggcgctgcgcgatgccgtgtcgagcacggatgcggtctcggccatcgagcaggccgagacgcgccgcggcaatgacggcgtgccgtgggtcgggggcagcaacgcgggcggctccggccagcccgcgatcaaggtcgtcggcgatgtcacccgcgctggctacaacctggtcaacggccgcggcgtgaccgacacctcgtccattgcgccggccagttgcagcagtctctcgtgccagacctggacctcgccgcaggctgccgtcgagtgggccacgcgcgtgctcggcgagaaggagcagcgcacgtgcgatgcctgcaccaagaccgagacgacgccgggcgtcgggctcacgccgctgatccaggaggagtacgacgccaagctgcaggcgctccaggacctggtaaccaaggccaagaacacgacgccggagaacctgcgcgaagctggcagtgcgtcgctgccgatcacgcgcggcgtgatcgaggcgctgcgcgacgagcccgaccagcacctgctgtcgcagcgcctcgcgtccgaggtcgcgctggcatccgtgctggagaaagcgctgctgctgcagcgcacgctgctcacgggcaagaaggagcccaacgtcgcggcgaacgaacttgccgtggaggcggtgaaccacgagagcgacacgctcgaccgtgagattcgcaacctcaagaccgaactggagctgcggcgcgaactggcgaacaactcgcccatggcgatcatccagcgccacggcgcgcgcgcggccggttcgcgcggcatctacgagggcgatcctgtgccggaccgtctcgaccagctccagaagggcaatccggggagtcggccatga

SEQ ID NO: 241753 - DNA, 948 bp, Klebsiella pneumoniae
gtgacccgaccattcgacctgatgcgccgcctgcgcgctggcgtggcttcgttgctgctgctcagcgccacgggcagctacgccctcaatacagcgaccatcatcggctcggtggcatcgcccgattgcctcgaataccgcgtcgtcggcatctgctactggctctactgcacatggacgggctgcaccgtgcgcacgtcgatcaaggtgcgccactacatccccgatgcagtggtgtcgtcgtactcgaataccggagaaaacccctgggtcgaagtccaggcaatgagcacgcccaacccgtccgcccaagctggcggcgacggaacgacgaacgaggatcacgaaaacagcctcgccaaattcaagaacgcggatgtcatcggtcaccccggcgcagaggtgttcaaccagttcgtctcttcgtcaggctacttctgtgagggcgcgggcacggcgtttatgccgtacttgctcagcaccctggatacgctggcctggcgctacaacgtgcccgagatggcctacccggaagcgctgattccgggccggcgcgaagtcggtgcccgtaccacgatgaatctctggggcaacgtgtatccccgtggcggcttcctgcaccagaccgacgacttcaaggccggcgcagtggtggcccagcgtgcgggcgatgtggtcacgcgccgcgggcagatccacgtctatcagccgttgcttgccaactcccgtgacggctactggccggccggcgcgctgatggagggcgatgcctcgaccggcaagtggcaagaactcacgcccgtcctgtcctcgtcctgcacggtcttcccgcgcagcggcttccttacccaggcccagcaaggcgactacgcatgggcgctgtggcggccgtatgcctgctgcgagcgccggggccaggtgttcctgggcagcgtcgatttcctctga

SEQ ID NO: 241754 - DNA, 447 bp, Klebsiella pneumoniae
atgacagcatccctttccaggttcgcgccgggctggcgaaccctcggccgggccgtggcgctgccggcagccctggccgttttcagcccggccaccttcgccgccgacgtggtggtcgtcaccgacagccgccacccggtcaagaccatgggcggcgagcggctgatcgagctggacgaagcccacaggattgaagcggagctttccgcgggactgcccaccgaccccgaacaggcgacggccatcgtcaagcgccggctgaatggcggcggtgccgatctgcagcgacgcatcgcttccgcataccaaggcgttaccgacgcatggagcctcggcatcaccagcctcccggccgtggtggtggacaggcgctatgtggtctatggcgagccggatgtggctcgcgctgtcgcgcgcatcgagcagcaccggaggacccagccgtga

SEQ ID NO: 241755 - DNA, 495 bp, Klebsiella pneumoniae
atgtctctcgtcgccaacgactcctgcgtggagccacgttttgcccccatgtcccaatccgatgactggatcatccggcaagccatcgcgctgctggagcagcgggtcttcaagaaggggccatccctggagaggcctgccgccgtcaaggactacctgcgcctgaaactggccgccgagcccaatgaagtcttcgccatcgtgttcctcaacagcatgcacgaggtgctggcctacgagccgatgttcagaggcacgatccattcgacctcggtgcatgcgcgtccgatcgtgcagcgtgccttggaactgaatgcggcagcggtcattttttctcaccaacacccttcgggctgcacggagccgtcgagcgcggaccgtgcgttgacccaaacgctgagggccgcgttgtcgctgatcgacgtgagggtgctggatcacctcatcgtcggccagggcacgccgtactcgttcgcggaatccggcctgctgtag

SEQ ID NO: 241756 - DNA, 786 bp, Klebsiella pneumoniae
atggaacagaaacgtccttccattccgatgcaggtccaggcgttccgccgtcgccgctggcggcctcgctggccctgggtattggctgctgcgctggtcgcgctgctgctgatctggctggtgtcccggacgcccggcgaatcctcagcgccgtcgcgcgcgccggtcagcacggcgcaggtcgctgggccaccctggcagatgggcaacccggaaggccgtttcacgctgacgctctatgccgacctggaatgcccgttctgccgggagtatttcccgcagctcaagcgctgggtcggcaacaacaccgacgtggcgctgcaatggcatcaccagccgctggccgcgcacgagcctgccgcgtcggccgaggcacgtctggccgagtgcgccgccgaagcgggcgggcatgcggcgttctggcaggcggtcgaatgggtctatgcccacacgcgcagcgacggccagggcttgcccgatggcttgcgttaccccgaaacaacgtcagccatcgaacagtgcatggctagcgagcgccccaacgtggccatccgcgcgcaggccgcggaagccaccaagagcggcgtgaccgccacgccgtcgctgcgactgctcgatcgccagacgggccaggccatcctgttgcaggggccgatcgagggcgatgccttgctctcggccatggacctgctggcggccggggaaatggccagcgacgcgccgggttcgcccgccacccccacatccgaaatgcctgccgacgttgtcggcgacatgcccaggtag

SEQ ID NO: 241757 - DNA, 441 bp, Klebsiella pneumoniae
atgcgctcgaactcgattaagggcctcgcgctggccgcggccgtcgccgtgctcagcggttgcgccaccagcaaggaagaactgctgacccatagcgaccgcaccatgatggacatctggcagcaggaaacgggtggcggcggcagtggcaccggccaggtcgcgcgccggcagttgctcgacgcgcgccagagcctgcgccggccgctgaccgacgccgatgtgcaggctgcgcccgtcgagcagatgcgctacacgcgcacggcgcgcaacgaggtttatcgccagttccagcgcctgcccaaccccgatctcgtcatgtatgtgtacccgcacctggcgggcacggaccccgtgccggttccgggctacacgacggtcttccccctgtaccagcgcgtgcagtacgccatgcccggtgaacggctggaggactattga

SEQ ID NO: 241758 - DNA, 1419 bp, Klebsiella pneumoniae
atgcgcagtaacggcttgctcaagtggctgatgatcccggtcgccttgctggtgctgttcgttgccatccggctgttctccggtggaagcacgtcggcaccgcccgccgcggatgctggctccaagctcacgcccgaggaaatgaaggcgttgggcatcgaaggcgataccccgcgcgataccgtggcaacgctcgtcgcccaggtgaaacagttgcgcaccgagcttcagaccgcgctgaccgacaacaagtcgcagcgcgaggaaaaccagcggctgcgccagcgggagaactccattgatcagcgcatcaattcggccctcgaatccgagcgctccaacctgcgccgcgaccaggaacaggcggccagcgcgcgccagcagaccgaggggctgctcgccgacctgcagcggcgcctggacagcattggcgggcgcggcggcggtcacgctgatctgccggtgggcctggggctgcgcggcggcgacgaggccggcatggaaggcggcatgcgctgggtcgaaccggacgacgcgaagaaggccgagggccgcaatggcagtcgtggcgcaggcagcggcatgagcttcccgacgagcttcggcccggcacaaagcacactggaaaccaccgcggaaaccgtggcgaacgccggcgcaggtgcggcaggcgtcaagagcgccaagccggtctataccgtgccgaccaactcgacactgatgggctccgtggcgatgacggcgctgattgggcgcgtgccgatcgacgggacggtgaacgatccgtaccccttcaaggtgctggtcgggccggacaatctgactgccaacggcatcgacattcccgacgtggccggcgcggtgttctccggaaccgcatcgggcgactggacgctctcgtgcgtgcgcggccaggttcgcagcatcaccttcgtcttcaacgacggcacgatccgcacgattcccgaagaccgcgaaggcaaccagcagaacaaccagcagcgcgacggcctgggctggatcagcgacccgcacggcatcccgtgcgtcagcggcgaacggcgcagcaacgcccagcagtacctcgggtcgcaagctctgatcaccgcggccggagccggcgtggcctcgctcatcgagagcgacagcggccgcatgtcctacgtcggctcggacggcgccatcggcaccgtgggcatcagcggcaaggaagcagtcggccagatcctcgcgggcggcgtccgggacatgtcgacctgggtcaacaagctctacggacaggctttcgccgccgtctatgtgcagccaggcgccaaggtcgccgtccacctcgaaaagccgctggccatcgatcacgaccccgaaggccggcgcgtcgatcaccgtgcaggagaaagccatgcgctcgaactcgattaa

SEQ ID NO: 241759 - DNA, 918 bp, Klebsiella pneumoniae
atgaagcatcctgtactcgtgctgctggggctgctggccgtggccgcggcacccgtctcccatgctgtggagattctgcggtgggaacgcatgccgctggcggtgccgctgaaggtcggccaggagcgcatcgtgttcatcgaccggaacgtccgcgtgggcgtgcccgcaggcgtgggcgaacgcctgcgcgtgcagagcgcaggtggcgcggtgtacctgcgcgccagcgagccgatcgagcccacgcggctgcaattgcaggacgccgacacgggcgcgctgatcctgctcgacattgcggccgagccgcccaaagacggcgaagccgagctggagccggtgcgcatcgtcgagggcagcagcacccctgcgcgctacggcgatcagccaggcggtgccgatgaggccccggcacgcgcccaggaccaagcaggtacgcgggcgacccggcgcgaaaccccggttccggtcgtcctgacgcgcttcgccgcgcagaacctctacgcgccgctgcgcactgtggagtcgctgcctggcgtcatgcgggtgaacctgcgccgtgacctcgacctcggcacgctgatgccgacgctgccggtgcgcgcggtcgcgctcgcgtcgtggcgtctggaagaccagtgggtcacggccgtgcgcctgaccaacagcagcagcggctgggtcacgctcgacccgcgcgtgctgcaaggcgatttcctcaccgccaccttccagcacgaagcgctcggaccgcgcgggacgcccgaggacacgaccgtcctgtacctggtgacgcgcgggcacggcctcgcgcaatcgctgctgccggcgatccaccgcttcgacccggccgtgcatctgccgcagcgggaagctgaagccgacgatggcaaggaggcccgccatgcgcagtaa

SEQ ID NO: 241760 - DNA, 693 bp, Klebsiella pneumoniae
atgagccgcttcaagaacgagatcacccacctgcaggcgcacatcaagacgcttcgcctgggtgctggtgcgctggtcatcgtcgccctggtcatgggcggtggctggtggagcgcgccgcgcgacctgaccatccacgtcccgcccgacctgcgctcgggcagtacccgcaagtggtgggaagtgccgcccgaatcggtctatgcgttcacgttctacgtgttccagaccctcaaccgctggccgacgaacggcgaagaggactatccgcgcaacctccacacgctctcgccgtaccttaccccgtcctgccaggccttcctgcgcgcggactacgactaccgccgttccacgggcgagctgcgccagcgcgtgcgcgggatttatgagatccccggccgcggctacggcgacgaccccacggcgcgcgtgcgcgtggtctccgaccgcgactgggtggtgacgctcgacatcaccgccgacgagtactacggcgccgagcaggtcaagcgcgcgctcgtgcgctacccggtgaaggtcacgcgggtggacgtcgatcccgcccgcaaccccttcggcctggcgctggactgctacgacggcgcgccccagcgcatcagcgcaccggagccgactcgcccggcacctggcggcctgtctccgcaagcgccccaaggaggaaacaccccatga

SEQ ID NO: 241761 - DNA, 411 bp, Klebsiella pneumoniae
atgtccgagcagcagcacgtccgtgcggacgggacggtcacgttccttccgcatcggctcaaccgccaccctgttgtcgtgcgcggcctcaccgccgacgaactgtggatctgctgcggcctgtccggcgccgccggcctgctggtcggcgcgccgctgtcctgggtgttccgcacgatcgccatcgcgccgacgttcgtcgtcctgggcgtggccctgggcgtcttcatcggcggcggcatcctgcgccggctcaagcgcgggcgccccgacacctggctgtaccggcaactgcaatggcgcatcgccacgcgccatccactgatggcgggatgggtaggcggccacgtgctgatctcgcgctccggcttctggtccacccgaaggtccgttgcaaggggggcacgatga

SEQ ID NO: 241762 - DNA, 360 bp, Klebsiella pneumoniae
atgcaaaaccgcatcctccattcccgccttgcccagcgcgccgctgtggcactgggctccgccgcgctgcccgcgctgtcgttcgcgcaaggcttgccgcagttggaaaacccgacccgcggcaccggcaacggcatcatggaaacgatcaggaactacggctacgacatcatcatgctcgtagccctcctggtcgtggcgtcgatgttcatcggcgtctgctaccacgcctacggcacctacgcggaaatccacaccggccgcaagacctggggccagtttggcctcaccgtcgcgatcggtgccgtgctgctcgtgatcggcatctggctgctcaccgaagccaccggcatcctgtaa

SEQ ID NO: 241763 - DNA, 234 bp, Klebsiella pneumoniae
atgaacggcgcccaggtctcggcatttcaagccaacagcggcatcgcgccttcggcgatggcgaccgtcctggtcggcgccgtgttcgcggtgctcctcgtctggggcgtctgggccatccgaacggcctacgtggggtggtccgagagccgcctcaaccagcgccagttcctcggcgtctgcatccgcttcgtcgcgatgtacctcgtcctgagcttcttcctcctctcctga

SEQ ID NO: 241764 - DNA, 381 bp, Klebsiella pneumoniae
atgttggctccgatctggcagcgcgccgcgcatcgcggcgtgcccatttttctcgtgacggccctgctgctgggtcagtccccgatggcgttggccgagtcccccgcacagcgccaggagctggtcgccgcgctgcgccaactcgacgcgctggagcgcaccgtcgccgacagcgccgcgcgtgcccccatccagccgggcgagcgctaccacttcgattacccgcggttgctggctgacttggcgcgcgtgcgcgccggcatccaggcccatctcacaccgtcgcgtgcccagccgcgcgacccctccgaactggccagcgactaccgcaccgagcggtccgcttcgccatcgccgacgactacggaagccaagccatga

SEQ ID NO: 241765 - DNA, 930 bp, Klebsiella pneumoniae
atgcaaggactgacctttagaactgatcaagattttgaggaaatttgctgctacctcatgagggactgggtcgcgcggaatatgaggtatgacgtgcaattcagaagatacggcggaaatgggcaaaggcagcatggcattgacatttttcctgccgttggcggctactcagtgtttgggcaggcaaaatttgttaatcaactaaactctacagacgttacggctgagttgagtaagaccgattccttccctgagccgattggttgttatgtgattttcacaacggcaaatcgccataccagcataaatcatcatcagttccatggcactcaacacaaaaggctggatggatcgatttttccggttcacgtggtctattggggtgaaatttctgatattagttttatcccacaagatgtctgtaagagaattttcccatcagcatttcaagttgccaggagcgcattaacgcctcagcagatggcggattccatagccacacttcaaaatattgttccttcatatttcaggtctgactttctcgactggctcgaaacatgggacttttcatgtggttacattccatctgtgcattatgacgccgtggacaatctttacattgagttggatcgggtaggatggggaatgaagggtgtcaatgattttttatatgcccaaggtcgcattgacttatctcgtgcgcttccggctggcgatgccttcttttatgctctcactgaatttcgagattcaatatataactacatagcttttgtacgcggacaggatgggcagggctacgttacattgcaaggaatggatgggcgcggcgcaacagatttcccaaagattacagagcagtggagcatgagggcgcgccatttggccaatatgtatcgcgagaaaatccttggtcagcaaattcaataa

SEQ ID NO: 241766 - DNA, 762 bp, Klebsiella pneumoniae
atgaaggacgccgcctcgactgcacaacgggagcagaaccagcgccagggcctgatcgtcggcaccatcaccttgccgttccggctgctcggggtgctgatcggctcgctgctgttctcgatcgtcgtggagtgcgtcggcatgcacctgttctggaaggaccagggctggcggcactcgcagcagatgttgcagtacgaactggggcacctgtccagccacttcacgcgcagcgtcgtcgtgcaggagccggggcgcaccgcgcacgaactggtggataccggctacgaatgggtattcgttcgctccgggctgctggagcgcatgagccagaccgccgagcgcgcccgcgcgccgagccacgggaggatccaggacggggggcgcaactttcgctactacatcagccaggtctatgtctggaccgagaactacctgattgccgcggccttcaccaccctcacgtttctggtgcgcctgctggttctggtgctcacgttgccgctgatctgcaccgcggcgttcgtcggcctgatcgacggtcttgtgcggcgggacgtgcgccggttcggcgcaggccgggaatccggcttcatctaccaccgcgcgaaggcgagcctgatgccgctggccgtgctgccgtgggtcacgtacctggccttgccgatctctgtgcatccactgctgatcctgctgcccagcgcagccttgctgggactggccgtgagcctgactgcgggcagcttcaaaaaatacttgtga

SEQ ID NO: 241767 - DNA, 2193 bp, Klebsiella pneumoniae
atgtcggggaaacagccggtcgaggtactgcttcgcccagcggtggagctatacaccgttgccgcatgcgcgggcgccgcgtttctgtccctggtggccccatggtcgctcgcgctgagcccgtccatgggcgtcggcagcgcgctggcgttcggcgcctacggtgccatccgctaccgcgatgcccgcgtcatcctgcgctaccggcgcaacatccgccgcctgccgcgctacgtgatgaccagcaaggacgtgccggtcagccagcagcggctgttcgtggggcgcgggttcctgtgggagcagaagcacacccataggctcatgcaaacgtaccggccggagttccgccgctacgtcgagcccacaccagcctaccggctggcgcgacggctggaagaacggctggagtacgcgccgttcccgctgtcccggctgtcgaaactcaccggctgggacgtacctttcaacccggtgcggccgttgccgcctgtgggcggcctgccgcgcctgcacggcatcgaacccgaggagatggacgtcagcctgccgctgggcgagcgcgtcggccactcgctggtgctgggcacgacgcgcgtcggcaagacccggctggccgaactattcgtgacccaggacatccggcgcgtgaacgccgcgggcgagcacgaggtggtgatcgtcattgaccccaagggcgatgccgatctcctgaagcggatgtacgtcgaggctaagcgcgccggccgcgaaggcgagttctacgtcttccacctgggatggccggacatctccgcgcgctacaacgccgtggggcgattcgggcgtatatcggaagtcgccacccgcgttgcggggcagctttccggtgaaggcaactcggccgccttccgagagtttgcgtggcggttcgtcaacatcattgcccgcgccctggtggagctgggacagcggcccgactacatgctgatccaacggcacgtcatcaacatcgacgcgctgttcatcgagtacgcccagcattacttcgccaagaccgagcccagggcctgggaggtgatcgtccagatcgaggccaagctcaacgagaagaacatcccgcgcaacatgatcgggcgcgagaagcgcgtggtggcgctggagcagtacctctcgcaggcgcgcaactacgacccggtgctggatggcctgcgctcggcggttcgctacgacaagacgtacttcgacaagatcgtcgcatcgctgctgccgctgctggagaagctcactagcggcaagatcgcgcagctcctggccccgaactactccgacctggccgacccgcgcccgatcttcgactggatgcagatcatccgtaagagggccatcgtctatgtgggcctggatgcgctctccgacgccgaggtcgccaccgcggtcggcaactcgatgttcagcgatctcgtgtcggtcgccgggcatatctacaagcatgggatcgacgatggcctgccgggcgcatcggccggtgcgcgcgtgccgatcaacgtccatgccgacgagttcaacgaattgatgggcgacgagttcatcccgctgatcaacaagggcggcggtgccggcctgcaagtcactgcgtacacgcagaccctgtcggacatcgaggcccgcatcggcaaccgcgcgaaggcaggccaggtgatcgggaatttcaacaacctgttcatgctgcgcgtgcgcgagaccgcgaccgccgaactgctgacccggcaattgccgaaggtcgaggtctatacgaccaccatcgtcagcggcgcgaccgacagctcggacattcgcggggcgacggatttcacgtcgaacactcaggaccgcatcagcatgtccagcgtgccgatgatcgagccgtcgcacgtcgtcggcctgccgaaaggccagtgcttcgcgttgctgcagggcggccagctttggaaagtgcgcatgccgctgccggcgccggacccggacgaagtgatgccggcagacttgcagcaactggccgggtacatgcgccagagctacagcgaagcgacgcagtggtgggagttcaccagttcccccgccttgcaggacacgggcctgcccgacgacctgctggatgacgccgctgcggccgaacctcccgcggtggccattgccaccgacgaggacaccggcaacaaggcctcgccatga

SEQ ID NO: 241768 - DNA, 540 bp, Klebsiella pneumoniae
atgacgacatcccatctggccttgcgtggcctgctcgtactgctggcgggtctgccgctggcctcgcttgccggcgagccgctgatcgtggtcgaagaccgcggcggcgcgtcggcgctgccgtactacgaagccctgaacctccagccgcgcaccaacgcaccggcccggccgccgatcccgacgccccaggttcccgccacgccggcggacgaggccgcgatgctgccggtgcgcagcgccaagctcacccccggcaccgtcccgcggcgtgtcatcgaggctccgggtctgcggcctttcgttgtcgtcggcgacgacgaggcatctcgggcctggctgcgcagccaggcagccgcgctgcgcgagcgcggcgcggtcggtctggtggtcaacgtcgagaccgtgcagggcctggcgcggctgcgcaccctggtgcccggcgtacccctcgcgcccatgtccggcgacgacctggccgagcgcctgggcctgcggcactacccggtgctgatcacagccaccggcatcgagcaatga

SEQ ID NO: 241769 - DNA, 591 bp, Klebsiella pneumoniae
atggcagcgccagccatagccgcccccctgcgcacactggtgctcgccgctggcctatgcgcctgcgtcgcccaagcccaggaggttccgccaccggcctaccagctcgccgcgcagcgcgcaggcatcccctcgacggtgctctacgccgtggccttgcaggagagtggcatccgccgtaacggacgcatcgtcccgtggccgtggtccctcaacgtcgccggccaatcacgccgctatgcgacccgcgccgatgcctgcgcgggtttgcagcaggcgatgcgctccacgccgcacacgcgcatcgacgcgggcctgggccagatcaacctcggctaccaccagcagcgctacgccagcgcctgcgacctgctcgacccgtaccggaatctcgccatcgctgccgagatcctgcgcgagcaacacgcccccggcgaggactggttgctggcgatgggccgctaccaccgccccgcgggtggcgagcccgccgcccgctaccggcgcagcgtgtcgcgccacctcgcccgggtgcagggcgcacgcccaaccgccgcggttctcgccgcacgcaaggagacatccccatga

SEQ ID NO: 241770 - DNA, 726 bp, Klebsiella pneumoniae
atgaagccgtcgatcatcctttccgcgcttctgctggcgtccacccagttgcccgcgtgggcgcagcaatccgccacggctcccgcccgcaatgcgcagagtcaggaacgcccgctggtcgcccgcattctggacgaccgggtggcgagcgactggggccttcaacctcaggagtgggcgcgctatcgcgaactgatggacggtccactgggcatctattcgcccaacctggacccgctgtcggccctgggcatcgaggcgcgtaccgaagaggaacggcgacgctacgccgagctgcaggtgcaggtcgaagcgcgccgcgtggagaaactgctcgcttatcagcgggcctatgacgaggcctggcagcgcctgaaccccgggatgcagcgggtgaacctgccggacgacaagccggtcgccggggccacgcgcggctccggccgcacggcagtgttcgtgaaagataactgcgtggcctgcggccagctcgtgcagcgcctgcaatcctcgggcgccgaattcgacctgtacatggtcggcagccgccaggacgacgcgcgcatccgcgattgggccaagcgcgcgaacgtcgatccggcgcgcgtgcgcagcggcagcatcacgctcaaccacgacggcggccgctggttgaccttgggggtacccggcgacctgccggcggtcgtgcgcgaggtgaacggccaatggcagcgccagccatag

SEQ ID NO: 241771 - DNA, 642 bp, Klebsiella pneumoniae
atgaacgccccgcagcccgcccatcgttcaacggccgccgtggtggtgcagagcctgatgtggctctggctgatcggcctcagtgtcctcgttgccctcggctaccagacgatgaacgaccaggccgaccaggagcgcctcgattcccgcctgcaacgcctcgaagcgcaggcaacaggcctggccgagaccgtcgaggccatccagcagcgtccagccgtcgccacggcggcagacctcaaagacacccgccaaatcctggaagcacgcgcggcccaggtcgagaaatcgctgagcgcctatgcctccgccgacgaccttcaggcactgcgcgccgaagtcgagcaaatcaaggcgcggcagaccgctgcgcgcgccgctgcacccgcccagccgcgcaccaggaacaagcccaccgccaagcccgaaccgacgccgctcccgttccgcatcgtcggtgccgaactgcgtgccggcgagcgcagcgtgtccgtcgcgccgagcaatggcgacttcacgcccgaccagcttcaggtgctgctacccggcgatgcggtcggcccgtggcgcttgcaggccgtcgagggcagcactgcggtgttccaggccggcgaccagacccgccacgtggcgatcccctga

SEQ ID NO: 241772 - DNA, 600 bp, Klebsiella pneumoniae
atgtgcccctctccaccttggtttcaccatcccgaacgccgtctgctggcgggttttctcggcctgctttggtcggtgctggctggcggctgcgcgacgacgagcgcgccggtcgcgcccgacaccatcgaggaagtctcggccgcacccgtacccgaggcgcccgaatacatccccgttgtgcgctacggccgctacaccctcgtggaactggcaccgacagcagcgcagcgcgacctgctgttgcagaccatcgacgtgtcgatgcccgaggatgcacgcgctacggtcggcgacgggctacggcatgtgctcaagcgcagcggttacggcttgtgccagacgacgcacgcggtgatcgagctgtacgcactgccgctgccggcggcccacctgcacctcggccccatgaccctgcgggatgcgctgctcaccctggctggttcggcctgggaactgcacgcggatgaccgcgcgcggcaaatctgcttcgagcggcccggcgacagcatgaccgccgacaacgtacccgcgccgcctgccaccgaggcggtgcagacgttcccgctggcgcccgcggcatcgggaggccagccatga

SEQ ID NO: 241773 - DNA, 870 bp, Klebsiella pneumoniae
atgaacacccatacccaatccacgcccgaaaacgtgaaggcccgcctgacgctggacgtgacctgtttgctcaacggcgaggccgcgtcggaaatactggcacggctgcaacgcatgtgggtccgcgccatcggcgagaggttgctaatcgatgagaccgccgcgaaggtggatgtttggtcgatcgaggtgaccgagttgccctcggcgactaacagcgatgcgctcgaagccgagatcgccgccttcatgcagcaacgcatcggggacggcaacctctgtgcagaggacattcccttgcgcctggcgagctatggcctgatggcccccgaggatttcatcgacgaaatgcgcgagcgcatgggcatggaagacgacgcccccacgggccgagccgtcatcccctcgaccgaacctgccgacggcggtgagatcgagatgcaagtcgcggtcgtctgcatcggtgcctccggtagccccaacgtgccggtcttcaaggtcaggatcacccaggaggaatacgacctgggtatccactacgacaaggccagggacctggccgaagaggcccggtacgaagggccgttcatctgcttcgacgccgccgaatatggccccatcctgtcggccgcccgcgaacttggcctcgttccgcaggtcgtcgtggtcgatatgaccgacggccagatccactccatccgctgcgacagcggcgagatcaaggtcatctgctacgacaccagcgacactgacgagtattcggcggcggtggcgaaccggccgctcggcgagaacgggcagttcgtgcgctgctggtcgcacacccaactggcacgggtcgatcccggcctgaagctggctcgggattga

SEQ ID NO: 241774 - DNA, 2280 bp, Klebsiella pneumoniae
atgtccctcgatctcgaaaccactgccgctgaagccgcgcccgtacagggcgaactgctcgatgcggaatcttcccctctgaccctgagccttcaggatttcgtcggcgagttcggcgacgaactgctcgacgccctcaacagcgcgaacccgccggtctataacggccagccgcaggcgcaccggcaactcgtcgtcgccagcctcaagcgcaagctgtttccggcccaggccgaagtcgtccacgccgccgccgagctgctgatcgaccgtggcgaacgcgccgcgatcgtcaatggcgaaatgggctgcggcaagacgaccgtcggcatcgccacggccgccgtgctcaacgccgaaggctatcgccgcaccctggttctttcgccgccgcaccttgtttacaagtggcggcgcgagatccaggagacggtggcaggcgccaaggtgtgggtgctcaacgggccggacacgctcatcaagctcatcaagctgcgcgagcagttgaatgtccagcccacgggccaggagttcttcgtcttgggccgggtcaggatgcggatggggttccactggaagcccgtcttcacccagcggcgcacccgtcacggcaacgtggcggcgtgcccggactgcggcacggtcatcaccgacctcgacggcgagccggtcaatccggtcgcgctccaagccgaggaataccgcaggaagtgcagccattgcgccgcccccctgtggacgctgatccgcccgcgcagcctgtccggcagcgaccagtcctcggccgtgctgaaagccctcaagcgcatcccgacgatcggggaagtcaccgcgcagaagctgatgcagaagttcggcgaaggcttcctcgcgtcgatgctgggcgacaacatccatgagttcatcaacctcatggacggcaacggcgaactggtcttctctgaccgccaggcgcatcgcatggaaagagcgatggcgaacatggagttcggcttcggcgaaggcggctaccagccgtccgagttcatcaagcgctacctgcctcaaggcacgttcgacctgtgcatcgcggacgaggcccacgagtacaagaacggtggcagtgcccagggccaggccatgggcgtgctggcggcgaaggctcgcaagaccttgctgctgacaggcacgctgatgggcggctacggggacgacctgttctacctgctgttccgagccctgcctgggcggatgatcgaagacggctaccgcccgaccacgagcggcagcatgacctcggcggccatggcgttcatgagggaccacggggtcctcaaggacatctactccgaaagcaccggcacggcgcacaagacggccaggggcaccaaggtatcggtgcgcacggtcaaggctcccggcttcgggccgaaaggggtcttgcggtgcatcctgccgttcacgatcttcctcaagctcaaggacatcggcggcaacgtcctgccgccgtatgacgaggagttccgtgaagtcgcaatggacacggcgcaagccgcggcctaccgcgacctggcgggtcggctgaccgcggagctgaaacaggctctggcgcgacgcgatacgacgctgctgggtgtggtgctcaacgtgctgctggcctggccggactgctgcttccggtcggaaaccgtggtgcatccgcgcacgcgcaacaccttggcgttcgtcccggctcagttcaacgagtttgaggtgacgccgaaagagcgcgagctgatcgacatctgcaaagaagagaaggcgcagggccgcaaggtcctggcctacacggtctataccggcacgcgcgacaccacgtcgcgcttgaaggtgctgctggagcaggaaggttttcgggtggcggtgctgcgcgcaagcgtggacgccagccgccgcgaggactggatcgccgagcaactggaccgtggcatcgacgtgctcatcaccaaccccgagctggtcaagacgggcttggacctgttggacttcccgacgatcgttttcatgcagtcgggctacaacgtgtactcgctccagcaggcggcacgccgctcctggcgcatcggacagaaacagccggtgcgcgtgatctacctcggctacgccggttcctcgcagatgacctgcctggagctgatggccaagaagatcatggtctcgcagtccacctcgggcgacgtgcccgaatcgggcctggatgtgctcaaccaggacggtgattccgtcgaggtcgcgctggcccggcaactggtcgccgcctga

SEQ ID NO: 241775 - DNA, 312 bp, Klebsiella pneumoniae
atggcagcccaagcacttcccatcggccaagcatcgagccggcgcttcttccctggcgagaccgtcgtgacctgtggcgttgacgccctggtccagcagggccggctcaacccggtgccgtatctgcaccgccacctcaatggcgactggggcgacctcgacgactacgacaagcggcagaacgatgccgcgctggagtccggcgaggaccgccttttctcttcctaccaggtcgcacccggcctgcagctttggattatcaccgaatgggatcgcagcgtgaccacgctgctactgcccagcgagtactga

SEQ ID NO: 241776 - DNA, 1110 bp, Klebsiella pneumoniae
atggccctcatgttcccgcggctcgcccgcaatttctccaagaacgggtactacccgaccgacgaacccacgctcgaaagagccctcaacgcactgatgcccagcgatggcccgatgtgcatcctcgatccctgcgccggcgaaggcgtggcgatcgccgaagccgctcatgctctcgggcgcgagcaagccaaggcgttcgccgtcgagttcgacgcggagcgggcacgccatgcccgcggcctggtcgatcattgcctgcacgcggacctgatggacacgatgatctcaaagcagtcgttcgggctgctctggctcaacccaccgtatggcgatctgtccaaggacgtcaacggcaacatcggctatcagggccagggccgtgcccgcttcgagaagctcttctatcagcgcagcctctcgctattgcagtatggcggcgtgctggtcttcatcgtccctggctacgtgctcgacgccgagctggtcggctggctgacacgccactacacggacctacgcatctaccgagcggtggaaacgcagttcaagcaggtggtgatcttcggccgcagggtgcgccagcgcgagctggcacccgatggtctcaaggccgtgcgcaatctgctgctgcagatcgggcttggtgaagtcgaagccgaggaactgccgagcgaatggccgttcctgccgtacatcgtccccgccagtccggccgagccggagcatttcttccgcgtgacgatggagccagagcagttcgccgatgaagtcggccggctgcaaggcctctggccgtcgcaggacacgcacctgggggccgcgcagcagtcgctgcgtccaccggcgcgtgccttgtcccactggcatctcgccctggctctggccgcgggcgcgatctcgggggttgtgcgctccaagaccgggcgcgtgctcgtcgtcaaaggtgacacccacaaggacaagacgctccagcgggaattcaccgaacgcgaagacggctccatcgccgagacccgcatcctcaccgacaagttcgtgcccgtcatccgcgcgtgggacatgacgcccggctccgccacgcggggcgaggtgttgaccatccgctga

SEQ ID NO: 241777 - DNA, 651 bp, Klebsiella pneumoniae
atgcccgaaaacacttcttccaccacgctgtatcgcatcgacgaatgctccgacgtgatggccgatgcttgcgtcggcgatgaccagggcaatctgatcttcctgtcgatctgggcgcgcgacaccgccgtccagcagttcctcgctcgtctgaccctcgggcgcgacgaacagggcctggaccagttccacgtcatcaccgaccagggcggcagcgtcccggtgttcgtcagcaacgtcgatcgtctggaaaagcgcatgacccgcgcctaccggcgaacgctgttcggttcgctgtccaacgtgtggctgttcgaccgccgctgcgtcaagcccgacaaggccaacgccagcgcactggcattgctgcccaagggcagcgcccaccggcttgaccgcctgtggatgctggtgcgggacacctgcccactgccgctgctcgaccactggcgcgaaaccgtgctggagctgctacagacccgcgagatgctggcccgtcttccgttcgccctcgggtcgctggaaggccatcggctcgccatcgacgtgccggcgctgaccctggcgctgggctccctgatccgcagtgacgtgctcaccgcctatccgtatccggccaagatttggacgccggaagcggtagcggcttga

SEQ ID NO: 241778 - DNA, 261 bp, Klebsiella pneumoniae
atggacccgatcctggctgcgcttccgccctcgctgttgaagctcgttgaagggagtttgtccaacgacgaagtttcttccgacgaggaaatgctggagtacttcatcagcaacggcctcaccgaggcacaggcacggcaggcactgacccaccgcgaccagtacctcaacaacatctacctggagggcttcacgccaatcacttcggtagatgaggcgcttcacttcaacccgcacacccggcagttcgagccggactga

SEQ ID NO: 241779 - DNA, 408 bp, Klebsiella pneumoniae
atgggctggtatttctccccccaatcgcggtctgaactgatcgcggaactgatcgcaccgcaagagaccgagcgcgccagcgtcaaggtcatcgcccacgcgctgcgcggcaacgtcctgtggtccgtcacggaagtgacggccaaggtcgaaggcgtgcatcgtcatctggcgccaggccaatccctgcgctacatccgctgcgatcttctcgaacgcagcggcgaccagtggggctacaagccactggacgagtccatgcacccgtactactacacgtgcccgctgtcctatctggacctcgcaccagagcagtccgccgactggcgtgcaggcgttcgcgcctaccacgcgcggcggcgcacacccacggcacctgcggcacccaccgcagcgctgatggcctga

SEQ ID NO: 241780 - DNA, 324 bp, Klebsiella pneumoniae
atgtccaccatcgcttgcgatgcacctcattgcacgctggacgaacccgcgtggcgcgctgtctgcaagacggccgccgagcacgcccagcgtggttgcggcctgtcctgggatcactgggtcacgcttttcagttcggagatcgacgcgcaagccagtcggttgccggaaacccagcgggctcaggccctggaaatcgcgacccaggaatgggactacgcaacccctgccgaacggcaggaaacgcaggagtggaacgctgcgaacggctactgctcccatggcatcgaactgggctactgcccagccggttgcggctcctag

SEQ ID NO: 241781 - DNA, 690 bp, Klebsiella pneumoniae
atggcagtcacatcggcgcccgaccaatcgggttcgcccatcaccgtcccaggccaactcacgctgcgcacgatccgcggaagaaacggccctttcaacgtcggccgacttgtcacccccatcggcaagttcgcggtgaaggatgcggagctggagcagtaccccgaaggcaagtacgacggggagttcgtcatccgctacatcttcccgaagtcctatcccgtcggcgacggcatgcggttcgagatccgtgccaacctggacgggatgacgctcaacggcatcgacaaactgagccgtgacgaggcacgcagcttcaccacccaggaagtcgatccgctcgatgaagaactgggcgcgcagcctgcgtcaacgccggccaagcccgccaaggcatccagacccgccaagcccgcatccgtgcaggcgtccgcggacccgctgatcgataccacgccttttggtgtggatgccccgccgcccgctgcggctgctgcccccggcagcaccgaagatggcgacgccgcgctgttcgggctgctctggccgctgggagagtccgtgaaactggattcgaccatcgaccgccgcaccctgcgcgcgcagatcgcccgcctgggtgaactgggctacgcgctggacttcaagacgcaggagtggagccgccaggccgaactgcaacctgcgtga

SEQ ID NO: 241782 - DNA, 918 bp, Klebsiella pneumoniae
atgagcaccacgtccaacgagaaatcgtatttcgacctccacacctcgggcatcggctacatccagcgtgtccgcgaggttcccgtccggggcggccgccgtgcgcagcccttcctggcatgcaccatcgccgcgctggtcggctccgccaaggaccccagctaccgctacttcgacgtcaaggtctcgggtgccgaggccaagaaactggtcgagcgctacatcggcgttgacgatcccaagcagcggccgctggtgcgcttccgcctcggcgacctctggggcgatgcgtacatccgcgacaagggtgagcacaagggccaggccgccgcgtctctgaaggcgcgactgctgaaggccgagccgcttgaccgggccgaactggcttcgatcaagctgcacgagctgatcacccgcggcatcggctacctcagccgcccgaaggacgtctcccccaaggatggcgatccgttcctgtcgtgctgcgtcgcggcgctggccggacctgtcggtgaaccggaatatcggtacttcgacaccatcgtcgccacccctgaagccgagcacctggttcgccggtgcgtgcaggccatcgaaggggaccgcaaggtgctgatcgccttccgtctgaacgacatgaagatcgatccgtacatccgcaccaagggcgagcgcgccggggaaccgggagcgagcctggaatcgacgctggtccacatcggtctcatcaagatcgacggcacccaggtctatccgacgagccaggcgcaagccgaggcgccgcaagccgaggacgcacccgcgcccgaagccgaggttgccgccgacaccgctgccgaccagcctgtcgagcccgccgtgcgcgagcccgcaggtgaagtcgaggagcaggagccggcattggctgcttcgttctga

SEQ ID NO: 241783 - DNA, 354 bp, Klebsiella pneumoniae
atgtcactgcgattcaaaggttccgacctgcgccccgtgctggccgaggccgttgccaaccaatgccgcgtcgtcctcgccaaggaccagggcgtgtacttcctcgccgagcagggagagcgccgtcccgatggccgcgtgaagctgctggcctatgccgtcggctgcaacccggataccgacccgtttgacggctggtgggaactggcgcgtgccgagctgggtggcgacgacttcggcgagttcttcgatccgaaggaaggcgtcttcgcccgcatcctgcgcggcatggacgatctgatgctatccgccaccacgacgcacctgtcgctggaggtggtgccatcgatgtag

SEQ ID NO: 241784 - DNA, 804 bp, Klebsiella pneumoniae
atggaccgttccctcatcaaatccatgatgccttcgcttgtcgcaggccatgtgccccgcaacgtgcggtcgttcaagtatcgcgtgttcgatgatcagccgcagtcctcgacgctgggcttcgccatcgacccccagcccttcgacggcaaggtggtcgcggccagcgacgacgccatcgtcgtcaagctcaagcccagcgagttcgcggtgctcgacccccacctggtgaccacccttcccagcgaaggcgccaaggtgcatgtccaaccgtatgcccgccgccgcttcgacggcctgcgcgcggacaccccggaagtaatcaccgagaagaccgcggacggtgttccctacaccatcaccaggcacatcctcggctccgcgcctgccaagctgcccatccccgagccgcagtgcatggaactgggacagctcatccagcagttggaggaaatgccggctcccgatgggttccggcgcatcacccacatgctggtcgatgcgggtgcccgcgacttcacctgggtcgatccgaagccgtccaagatcatcgagacacccccggcgatcagcttctcggtttcgacctcgaagttcgagggccaggtgacgatcctctacgaccgcggcggcgacacctacgcggtggaactgagccgcgacggcgaactggtcgatcggcacgacgaggtgtatttcgacatgctcggtgaagtgctggagcggcttatcgacgacgggcactggcgtctgatcgacgtgagcgtcatcgacgccaaggcaaccaagcggcgctacggctga

SEQ ID NO: 241785 - DNA, 279 bp, Klebsiella pneumoniae
atgttccccaacctcatttcgcgcgcaccggacttcgagcaccagctcggagcctgcgtcaacgccatgagccaggacgacgccatcggccagatcctggtattcgagcgcacgcacggcacgctgcacatgcgccatatcgccggcgccgacttggtggacaccgacattgacgactacgagatggtcgtcttcgacggtggcaacaccggcggcgacacgtggaagcatgtgttcttcccgcgtcagcgcgaacactacttcgtgtaccaagcctga

SEQ ID NO: 241786 - DNA, 738 bp, Klebsiella pneumoniae
atgtcccagaaacccaatccctttcaccgtggctactggaatctgaaaatcgtccgcacgctgtgcatcagctacgaggacggaagcccgcatgtctggcgcaacatccacgcgagccagcaacacctctccgacgaggaactggtttcatcgtcctgcatcgtcgccaacgatttcgccgtggtcagcgatggccgcgaagccgtgaacgccgaggtactggccgaatgcgatgccggtgaaggcgtcagcggcgaaggtgtgatcggtgccgtggtctatgccatccatggcgaggacttcgacggccgcccagtccacgtcggtgacgcctattcggccgaggccgcgcgggaagcgatgcagcgcctgagtttcgagaccggctactacagccggtgctgggaaatcagccgtgagcacatcacggtcgatagctggcactacctcgccggcctggcggacatcgccacgccggaggccatgttgttcatcgccttccgtgtgccgtacagcccggcgatcggcgtcaagctgatttccacgccctggacggaccagaacctggagcacgccgagggcatcaccgccgagcagcttcgacaggagcaccggaacaagggcatgccggacgacctggcgaacatccttgaactggctggccaggccgatgtgcgcatcctcatcctcgatgcagacgcacccgcgttgctgggcctgccgctggccgagggctag

SEQ ID NO: 241787 - DNA, 1296 bp, Klebsiella pneumoniae
atgggcattgccgtagaagctctgttcaccagcgcgctgggcttgcagccgccgtgggtcgtcgatgacgtcaggctcgacaccgccaagcggcgtatcgacttcgagatcggctgccacaccagcaggctcgcctgcccggcatgcggtgcggccacgcaaccggtgcacgaccggctgcgccgatcctggcggcacctggacttcttccagttcgaggcctggctgcactgcgacgtgccgcgcgtggcctgcggtgcctgcggcaagaccacgcaggtggccgtgccctgggcgcgtccgggctcgggcttcaccgcggcgttcgaagcgctggcgctgaccttgtgcctggacctgccggtgcgccaggccgccgagttgctgcgctgcaaggacaagcggctgtggcggcgcatcgagttctacgtcgcgcaggcgcgtgcgctggaagacttctccggcgtgcgcacggtgggcatcgacgagaccagcctgcggcgcgggcagcactacatcaccgtcgtgcacgacctggatcgcaagcggctgctgttcgccaccgaggggcgcgagcaccgcacggtggtggagttcgccgaggatctgaaggcccatggcggcgatcccgcccaggtgcggcacgtgtgcatggacatgagcgcggcctacgccaagggcgtggcgctggcgctgcccgaggcgcagatcagctacgaccgctttcacgtcgtctcgatggccatcgaggcgatggaccaggtgcgccgcgcggagatggccaccgacgcgcaggcggtgcgagccgcgctgggcgctggcggccgcaagacgctcaggcagctgctgtggggcatgcggcgcaaccccagcagctggagcgcccgccagatccaggcgatgcactggctgcagcgctcgacgctcaaaagcgcgcgggcgtggcggctgaagatggcgctgcgcgaggtgtacgcacgggccacagcgcacaacagcatcgaacaggccgcatccgacctcagggcctggctgagctgggcgcggcgctgccggctcgagccgttcaagaagctggccgccacgctcaaggagcggttcgacgcggtggtgcgcggcatggtcgatcaccgcagcaacgccttcgtcgaggcgatgaacgggctgctgcagcaggccaagcgcgccgcgcgcggcttcaggacgagccagaacttcatcgccatcgcctacctgcgcatgtccaagctcaagcacctgccggccagtccgttcgcgccagccatgccgacatga

SEQ ID NO: 241788 - DNA, 687 bp, Klebsiella pneumoniae
atggcgaacaactactacgaaggcacgggcgttctcgtgctggagcgtgtcacccccgtcatcaaggcgctgttcggcgccttcgcgctgaacgaaggccatcccggcaacgggcaggcctacatcgcccagatcgccgagaccaatgatccgcgctggacggatgtgctggacggcctggaagacctggccgcacaactcggcatccccatgcccgacgacgaagagttgtcgattccacctctgctcgaacggctggccgcgcacttcggtgccgagcaggacgcggagctggagaacctgatcgagcaccacaagttcgaggacagcgccgacctggaagccttgcttctgatcgcttcctgcttcgatgacggccatcgcctgaccgccatccagttcgaaggctgctggcattgcagcaggccgaggctgttcgagttcggcggcaacggctgctacctgagccgcgaggtccaggtcttcagaacgtcctcgcaggcgctccaactcggcgaccaactgcgcaagacgatcctgtccgccgacatcgaagaggcctcggcattgatcgcgctggaggccgccaacctgctcgcaggcatcaacgacgagcagttccgcctgaatgtgcgccgtcgcgtcgccgaccgactggcccagatgccaacgatcagcgccgcctga

SEQ ID NO: 241789 - DNA, 393 bp, Klebsiella pneumoniae
atgaaccagctactgccgcgggaagtcgtcgatcagatcatgcgggaagaacagcatttcgccgccgcgcctcaagcctttttcgaggcatggaagcgtggcgtcgagattgctggccccgagtggttcggcgacggcacccgtgaaggtctgaaccaggccaagagcaagtgggatctgcgtcccaacatgctgcggctcaacgacgccctcggcgtcctgagcagcggcgaacgcatgttcctgtctgccatggtcagcttctacaacgcgcgtgagggcggtgccatgctcaagcgctgccacttccacgggctgtcggacttcgacggtctcgacctgcaacgccgcaaggtcatcgccgacctgctcgtgaactacaacggttggtga

SEQ ID NO: 241790 - DNA, 225 bp, Klebsiella pneumoniae
atgtcccagcaagcctctttcggccaaaccttcgggcaattggcctcgacctactgcggcaagttcctgccgctcgaagtcctgcaaagcgccgccggccactacatcggcacgcgcgataccgaaggccccgtttcgcgggaatcccgcgagtacttccgcagctatgccgcggctcaacgtgccctcgaaagaggcggctggtcccagctcgccgttccttga

SEQ ID NO: 241791 - DNA, 558 bp, Klebsiella pneumoniae
atggacaacatcaccaagcaagaccgcattacgctgaagaacctcaaggtggccgacttcgccagcgaggaaacactgtgcttcaacgcaaccgtcgtgttcgacggtactcccatcgccgaggcccgcaacgacggccacggtggctcgacgttcctccacgcgctcaacggcaaggcggggctactggcgcaggccgaagccttcgccaagggcctgccgcctgcgccgcttgacctcggccacgagagtgaagaccctcactacatcgacatgacgctcgacttcctggtcgatgagctggccgacgccatgcacgcggaacgcaaggtgcgagccgcattcaaccgcgacatcggcaacaaggtgctgttcatcaaggaaggcaaactgctgtttatcaagggcatcaagctcaaggccatcgccgaccggaaggcgtacttcgcttcgctgcgcgcccggcaggcccagcccatcgtcatcctggccgagcttccacccgagcaggcattcgatttgtggaagcagtatgtcctgggcgacaagcccgactga

SEQ ID NO: 241792 - DNA, 1599 bp, Klebsiella pneumoniae
atgaacccgcaacctcgccccccacgcggtgtgccccaaaccgcgccactgctgtacggcagcgtgtgcagcggcattgaggccgtgagcctcgcctggcaacctctcggcctcgaagccgcatggttcgccgagatcgagccgttcccgagcgccgtgctcgcccaccgttacccccgcgtgcccaatctgggcgacatgaccgcgatcgcccgccaggtgcgtgccggcactgtgccagcgcccgacatcctggtcggcggcacgccgtgccagtcgttcagcgttgcaggtagccgtcgcgggctggatgacccgcgcggtgccctttcccttgcctatgtggagcttgccaatgccatcgaccaaacccgccaacaagacagccgcccggcggccacgctcgtctgggaaaacgtcccaggcgtactcaacgaccgcagcaatgccttcgggcatttcctgggcgcactggccggagaaagccgtgcgctccagccgccaggggaaaaatgggcgtacgctggttgtgtgtctggaccccgccgccgcatcgcctggcgcgtgctcgatgctcaatatttcggtgtcgcccaacgccgcaagcgtgtgtttcttgtggcaagtggtggagatgacctcgatcccgcagaagtactttttgagcgcgcaggcctgctcggggattcttgtgcgggcagcgcgccgtggcaagaagctgcctgcactgctgaacctagtgttgacccagcagacggatatgcaggactgaagcagccctgcggcaaggtcacgacgacgtttgggttcagcaatgggcgtggcccgaccgatcttgcagccagtttgatggctggcggcccgaagcacgacatctgcaccgagacctacttggtgcaatccgtcgcaggcaacatcagccacaccctcgacaccgccaacaacggcaagggcagcagcgaggacggcaccggcaagggtgttccgatcatcgccttcatcgcgcagggcagcggcgccgatgccacgctcgacctgacaccgacgttgcgcgctggcggccattgcaacagccatgcgaacgccggggtcgtgcccgccatcgcgttcgcgcagaacaaccgcggtgaagtgcgcttcgagtcgggccatggccaggtcgcttgcaccgtgctgtccaacggcaagccgggctacggcgtacctatggtggcctgcgtgtctctgcacggccgcgagcagggtcttgccgccgagctgggcggcagcgtagcgggcgcactgcgcaccagcggcggcggcgcggacaagccctatgtcctggctcccgacttcgaggcgcatttccgctacgactggaacgaccctggccccggcgactggtcgcattggcgggtgcggcggctgatgcccgtggagtgcgagcggctgcaaggcatgcccgacgactacacgctgatcccgtaccgcggcaagcccgctgcagatgctccgcgctacaaggcgatcggcaactccatggccgtcccgtgcatggcgtggctgggccagcgcctggtgcagtacctgcacaagacgggctcgaccgcttcggattga

SEQ ID NO: 241793 - DNA, 1842 bp, Klebsiella pneumoniae
atgcggctgttcttgtgcgagaagccctcccagggcaaagacattggccggattctcggcgcgacgcagcgcggtgaaggctgtctcagcggctccggcgtcaccgtcacctggtgcattggccatctcgtagaagcagcagctcccgaggtctatgacgcggcgctcaagcgctggtcgctggagcagttgcccatcgttccccagcagtggcgggtcgaggtcaaaccgaagaccgccacgcaattcaaggtcgtcaaagcgcttctggcgaaggcgacccatttggtcatcgccaccgatgccgaccgcgagggagagctgatcgcccgcgagatcatcgacctgtgcggttaccgcggccccatcgaacggctgtggttgtcggcgctcaacgatgcgtcgatccgcaccgcgctcggcaagttgcggccctcatccgacacgctgccgatgtactactcggcgcttgcgcgctcacgcgccgactggctcgtgggcatgaacctcagccggttgttcacggtgctcgggcgtcaggccggctacgacggcgtgctgtccgtcgggcgcgtgcagacgccgaccctgaagctcgtcgtggaccgcgaccgcgagatcgcggccttcaagtcggtgccgttctgggccatcgacgtgtccctgtctgcgggtggacaggctttcagcgcgcagtgggttccgcccgatggctgcaccgacgacgctggccgctgcctgcaacagccggttgcccagcaagccgcgcaacagatccgcgctgcgggtagcgctcaggtggtgtttgtcgagaccgaacacatgcgtgaaggcccgccgctgctgttcgacctgggcaccttgcaggaggtctgttccaaacagcttgggctggatgttcaagaaaccctggagatcgcccagtccctgtacgagacccacaaggccactacgtacccgcgttccgattcaggctacctgcccgaaagcatgtttgccgaggtgcccactgttctggacagcctgctcaagaccgatccctcgctgcgcccgatcatgggccagctcgaccgctcccagcgctcgcgcgcctggaacgacggcaaagtgacggcgcaccatggcatcattcccaccttggaacccgcgaacctctcggccatgagcgagaaggaactggcggtgtaccggctgatccgcgcgcactacctggcgcagttcctccctcaccacgagttcgaccgcactgtcgccaagctgtcctgcgaccagcagaagctggtggccaccggaaaacaggtgatcgtcaagggctggcgcctggtgctggccgagccgcaagcggacgaggacggtgaagccacggcacgcagccaggtactccccgtgctgcgcgaaggcatggcgtgtcaggtgaccgaggccgagatcaaggcgctcaagacgatgccgcccaagccttacacgcagggcgagctggtcaaatccatgaagggggtcgccaagctggtgacggacccgcgcctgaagcagaagctcaaggatacggtcggcatcggcacagaggccacgcgggccaacatcatcagcgggttgatcgcccgcagctaccttgtgaagaaaggacgctccattcgcgcatcggatgcagcgttcaccctgatcgacgccgtacccgcggcgattgcagaccccggcacgacggcagtgtgggaacaggcgctcgacatgatcgaggctggtcagctcaccctggatgtgtttatcggcaagcaggccgcatggatttcgcaactgatcgcgcagtacggcagcacctcgctgtccatcaaggttccctag

SEQ ID NO: 241794 - DNA, 453 bp, Klebsiella pneumoniae
atgagtacgcatttttctggcgagggcaacatcggctcgccccccgagtaccgggagttccccaacggcaacgacgagcccagccgccttctgcgcctgaacgtctatttcgacaaccccattcccaagaaggatggcaccttcgaggatcgcggcggcttctgggcgccggtggaaatctggcaccgcgacgccgcgcactggaaggacctctaccagaagggcatgcgcgtgctggtcgtcggccggatggagcgcgaaccttggacggacaacgaggatcagccgcgcgagacctggcagatcaacgcgcgcagcgtcggcatcctgccgttccgcatcgagtccgtagccctcagccccaggcagcaagaggccgcgcaggatgcgcagccgaaacccccggccgcccaggaaccgaccgcgccgaaggagccgaagcgcaggaagtga

SEQ ID NO: 241795 - DNA, 528 bp, Klebsiella pneumoniae
atgagcgacccaaaccgcgacacccgctacttccgccctctgcaacagacagccttcatgcagttggaacacgcagcctctcaaaaaggccttttaaagccctttaagggtaaaggggacttggaggcctgggccagccagtgcttcgccatgcgcgacgagttgattggcttggcgcagcgacaggtgctgcaacaagccctcgggcatcccttccacctgctccccatcgaactggcccagcagacaactggcgcaggcacggcgtttcttcgctggcgcaagcacgaccgctcggccatgggcgtggcactgtggcaggagctgatggcgagtaccagcacgccggtcaacctgctggccgacttgcacgccatcgagctgcagcgcatcacgctgaacatgcagatcagcctgttgcacaccttgggcaggctggcccaggagtgtgccagcaaggccaccgaggcggaagacgcttacctgcgtcggctcaagtccatcccacccgcactgcgcgatcagtga

SEQ ID NO: 241796 - DNA, 774 bp, Klebsiella pneumoniae
atggcaaccaccaacgaacccctgcaactgaatctcggctccttgcgcagcgcgatgtcgctgacgctgcacacgcaccacgcctcgcgcatctggcacggccgcgccgccgccgaagggcgaccgggcatcgtcggcctgaacggctacatcgcccagatgaacaagatgcggcgcggctcggagcaggacgacccgtacagcgacttctggatgctccgcatcgaggacaagctcgaccagaccaaggccacgctgcaatcgctgcgcgaacaggtggaccaggccctggcgagcgtgccgccggcactcaccctgggcgaaaacctcaacgtccagccggtcaagctgccgctgttcgtcaatgcgcagctcggctttgccgccgtgtacctgctcgccgactacgacgatatcgcccgcaagctgatcctcgcgcaccacaccgcgctgatcgatcgctcgacgctcgaacgctggctcaacgaaggcgcgcatgcactgcgcagcctgttctcgctggcccagcagtaccgctactcgggctgcacccgcgacgacttcgccgccaagaatgccgcagcgcgggcggcgttggaaaagttcggcgagatgccgccggacgtgctggagggcacgcgccgctcgaagttcgcgccgcccatcatgcgccgtggcctgcagcagcgcggtgacggtcctgccgcagccgcatcgcccagcgacgaggccgccgcccccgaagcgacggccggcgaggacgcgcaggcatga

SEQ ID NO: 241797 - DNA, 1263 bp, Klebsiella pneumoniae
atggccgtggacgacaccgcaccacgtcgtggccccatcgcactcgcagacctgttcgacgctgcgctgaaagaccttgtgcccaagcccaacgccgacgcgcccccgcccacacctacacctgtcgcgatgcccactggtccggcgtctggcgatgccttcctgttcagcggcaaccggcacgagaccgtaccgcgacggctgttcctcgaccgccgcctgacgccgctggagcgcaatgcctggcaggtcttccggctgatgctcaacgacgatggcgtgacggcgttcccgacgtatgaacagcttcggccctggctggcgtcgatgccctgcgccgggcaagcctcgcacgaaaccgtggcgcgagcactgacgctgctgcggctgactcgatggctgagcctggtgcggcgacggcgcgacgccaagaccggccgcatcctcggcaacctctatgtcctgcacgacgagccgctgaccccctttgaagcgatgcagctcgacccggactacctgcaactcgtcagccaagcgctcggccattcggccaaagccgtgcagatcgtaggcctgcacaccctcaaggaaatcggcgaagacccgatgctggccgggcgcaccctgccatcgaggctgcaagtcctggccgaacgcctcgccagccagggcgtcggggcgcacgaaagttatccacaggaggacgccacgcacgaatccgaagaaggggcgacgagccttcttcggaatcctgacgatcccacttcggaatccgaagcagggtcgaaacccgcgccagacgcctctcttcggaatccgaagcaggcccgtacagtacgtagtagtcgtattaatgaagtacgtactaccgcgcaggcacaagcgcatgcgcgcgcgctgggcgacctgcaatggcccaaacgcttcgcggaactgaaggcagagcagcagacaggtgcgagggtggcactacagcaggtcgatgctgcgctgaggcaggccgtgctggacgaatgggctgcacgatgcagcaaccatggcatccgcaatcctgcagggtatctgttcggcatcatccagcgggccatccatggcgagttcaacgcctgggccaagaaggacgcgccatcggcgcccgttgcgccgaacgagcggccgccaccaccagcaccgccaccatcccagccgcagggcaagcctgtgccgccagaagtcgccaggcagcacatcgagcggctgcgcaacctgctcgccagcaagtga

SEQ ID NO: 241798 - DNA, 561 bp, Klebsiella pneumoniae
atgtccgcaccacacccactcaaccaggccgtcatcgcccaggccctctatgacctgcgcaatgggcaactgcgccgctgcaagctgatggggtttggcgaggaagagctggacgccctcaagcatcccgcgctgatcagcgtgctggccaacgccaacgtctcgtggtgctcggtgacggtcaaccgcgaagtgctccggcgtctgctcaggcaggcgcaggatgtggagaaggagatcgccacggtcgatcgcatgctgcgcctcggcgcgagcaccgaaatggtcagccgcttctacggcctgacccaccaggaagtggcgcttcgccgcgaaatcctcggcctgcccaagcgcaagggtcgccatcccgtgctggacgagaagcaggacacggagctgtggcggcaatggaaggccgtgaccagcagcaggaacgtcgatctcgaagacgaaacctccatcctcgatgccgccatggacctcgccgaaggcatgtcgctgcctctgtcggtggtctgggcttcgatcaagagctgggtcgatcaaggattgggttaa

SEQ ID NO: 241799 - DNA, 1638 bp, Klebsiella pneumoniae
atggctgaaatgacctcccagcagatggccggcaagctgctcgcggccgggttcgagcgcagcggcccgtccacctcggccttgagcgacccgatcgccgacacgcccatggtcgtgaccctggaccagttgcgcccctacgaccacgatcccaggaagaagcgcaacccggcctacgaggacatcaaggcgtccatccgcgagcgcggcctggacgcagccccggcgatcacccggcgcccgggcgaggaccactacatcattcgcaacggcggcaacacgcgcctggcgatcctgcgcgaactgtggtcggagaccaaggacgagcggttctttcgcatatcgtgcctgttccggccgtggcccagccgcggcgaagtcgtcatgctgaccggccacctggccgagaacgaattgcgtggaggcctgacgttcatcgagcgcgccctcggcgtcgagaaggcgcgcgagttctacgagcaggaaagcggcgccgccctgagccagtccgaactggcacgccgcctcgccgccgatggtttcccggtccagcagtcgcacatcagccggatgaacgacgcggtgcgctacctcctgccggcgatcccgaccgtgctctatggcgggctcggccgccaccaggtcgaacgcctgtcggtcatgcgcaaggcctgcatgctcgcgtgggagcgctacgccaaaggccgcacactactggtacaggacttcgatgacttctttcaggaggtgctgtcgcagttcgacacgcaggccgacgagttcgccccccagcgcgtgcaggacgagctgatcggccaaatgtccgaactgctcggcatcgactacgacgtactggcgctcgacctcaccgaatccgaaagccgccatcgcgccctggtcagcgatccgaccccaccaacggcaccccccacgctgcctgagcctgacaccatggcacgcccgcccgcggcgccggccccatcggccccgacgccggcaaccacacctgggtcgcgcgagcgcgagggcggctcagggtcggacggctcacccgcaggaagccccatggctgctcctggtgatcggctgcaggggcacatcgtttcgcctgcaccgacgacggagcgactgcaatccattcagcggatggtcgccgacgagctgggggatgcgctgcccgatttctcggccaacgtcttgcagtccattcccgtccaagcaggcggtctctacccgatttccgacgtctggcacatcgacgcgagcctggacacgcccgagcgcctgcgcatccacgtcgcgcagttcgcccgcgagatcgcgggcgaggctcgcctggacgagtgcatcgatgaccgtccagacggcatcggtttcgcctgccgtgcccacgcccaagacctggagccgctgggccgtgccgtcctggcgctgctggcatgcatggccggtcagcagcccgccgacgtcggcttggataacaggcaattcgtcatcgacctgtcggcgttgctgcacggacaaggcgacgcaacccggcgactgagcgacaccgcactggtcaagctgttccggctgctgcggctggcccgccgtctgctcgacctggacgccggcgctgcggaccctggaacgtga

SEQ ID NO: 241800 - DNA, 249 bp, Klebsiella pneumoniae
atggcgagcgcacatgaactggcccgaggccataagcggctgcgcgccctgatcgaattcgccgtcggcgagggctggcacgtcaagcgcacgccgggcggccacctcaaattcaccaaggccggctgcgccgcgatctacaccagttcgacggccagtgaccaccgggccgccctcaacgcccgcgcgcagatccgccgcgccgagcgcgaggcccggtccccagtgcagggaggccgccatggctga

SEQ ID NO: 241801 - DNA, 876 bp, Klebsiella pneumoniae
atgcaggttgtatccatcatttcaacgaaaggtggcgtcggcaagaccaccactgccgcgaacctgggcgggctcgtcgccgacgcggggctgcgcgtgctgctgctcgatctcgacgtgcagcccaccttgtcgtcctactacgaactgggacaccgtgcgcctggtggcatctatgagctgctggccttcaacgagcgcgacctcggccagctcgtgtcccgcacgatcattacgggtctggacctggtgctgtccaacgaccaccggggcgagctgagcaccttgttgctgcacgcgccggatgggcgcctgcggctgcggcacctgctgcccatgctggctcctctctacgacctggtgctgatcgacacccagggcgcgcgttcggtgacgctggagatggcggtgctcgcttccgatctcgcgctgtcacccgtgaccccggaaatcctcgccgcccgcgaactgcggcgcggcaccatgcagttgctggaggacatcgctccgtaccggcacctgggcattgagccgccgccgctgcatctgctcatcaacagggtccacccggtgtcggcgaacgcccggctgatccaacaggccttgcgcgacctgttccaggaccacgccggcatccgcgtgctgaccaccgacgtgccggccatcgaagcctatccgcgcgccgcgacgcgcggcctgccagtgcatcgggtcgaataccgccagccaccgggcagagtcgcccccgccgcgctcgacaccatccgcggcctcgccggcgaactgttcccgcaatggcagcaccgatttgccacggtgtccggccgcccgccatttcctctggataccgggaggccccatggcgagcgcacatga

SEQ ID NO: 241802 - DNA, 213 bp, Klebsiella pneumoniae
atgtcgcaaacacctgttctgccgcccaacgagcgccgcatcctgcgcttggaagaagtcgaatcgaagtccggcttcaagcgcgcccacctctacaacctgatgcgcgcgggcaagttccccaaggcgctgcgcctgggtgtgcgcgccgtcggctgggattccatcgaaatcgatcagtggatcgccgagcgcgtcaacaaccgggcctga

SEQ ID NO: 241803 - DNA, 747 bp, Klebsiella pneumoniae
atgaaccacaatgcaccagcatcgaaggtgttctatcgtccgatcgaagcctccctccggtgggctgggcttctgcggtttgagcatgtcatcctcacttcggtctcgtcgtcaaggaacctgccacagtcgttggattgcccacgttggggtgagctgaggctgtataccgaacgcatctacgatggcatcctcaatgcggaacttcctttcgggaggaacggcatcacgacgcacgacaccgcgctgatcgactcccctgatctcactgtccgtcacgtcgatctgaagcgttggatgcgccagcactaccccgaacagcgccccggctttctcttctcgcgcagcgagcgcatcgcccatccctccatctctctggaaaccgggcaggccatgctggtcgagcgcttggccctcaaatctgccctggagcagtccaagcgccaactccgcgagctgcaagacaagcacgacgcactgctcaaacagtccaaaatcatcccggcctgcgcgcagtacccaatcagtgatcgggccgaagccacctacctgaacatcatcggcggcatattggagctgatgctcggccaatcgccctcgggcacaccgtactccagcttcaaaacgcaagaggctgtcgtaagcgcattggtcgcccatcaccacggcgtcatggggatcgccgagcggacgttgaacggcaagttcgccacggccagacgccggctgcatagcgccaccctctga

SEQ ID NO: 241804 - DNA, 141 bp, Klebsiella pneumoniae
atggccgactcctttggcgccaacctcatggccgggcagttgtctgtggatgaagcgagtcccgagtctcgcttcttcatgagccctgagcacttttcagtagctcaagtcagtggtagccgccatgtgctcaatgtgtaa

SEQ ID NO: 241805 - DNA, 315 bp, Klebsiella pneumoniae
atggatatcgaagaatttgtgagtgaagaaaaccatatgtgtaatttaggcgaagatcttttttacaagatcttcgagttggggtcaatctatgatttacctgataataaatttaacagaaagattatttactggttaagccagtatttagtaggggatctgagagaaccgctagatgcgatctctgagcttaatatgttcaatcagttttacgtttatgagacatggttctcgctaattaaatgtcctattgagatgaaaagtctttcaaagcgaataatccaataccacattggactgagaactcttttgtaa

SEQ ID NO: 241806 - DNA, 645 bp, Klebsiella pneumoniae
atggtcgtacatgggaaagttatcaagttattaattactattttgatggtggggttgtcatccgctgcttatagtaaagattatcaggcagggaaaaacttcactgttattcattctactgttaagcaaccgccgccactggttgagtttttttccttctactgcggaccttgttatgcgtttgcagagcgcatcaatgttgatacagctatcagaaagcgcctgcccgacgatatgaaactggaaaaataccatgtcagccagatggggcctttaggaccagcattaacagaagcatgggccgtagcacaatatgctggggtagatggcaaggtggaaaagttattgtttgagggtttacaggttaagcgtgatattaaaacggcagctgatattgttaaggtgtttaatcaacttggcattacgtcagagaaatatgccgaaatgcaaagtaactttatggtaaaagctttaattgccagacaggataatctggtcgaaaaaatgaaagtgcatggcacgccttctttttatgtttcaggaaaatatcatattaacaatgcatcactcgcgcaagatgactatgatacctatgcagaggatatggctaatctggttttatttttgcttaacaagcccctgtaa

SEQ ID NO: 241807 - DNA, 162 bp, Klebsiella pneumoniae
atgatgaagaaaataattgccgttgcggcttttctgctgtgcaccacggcagcgcaggccggtattgtcatgggtggaacccgtgtgatttatcaggaagggaagcgtgaagccgctatttcagtcaccaatgccgatacccatacgccctatctggtgtag

SEQ ID NO: 241808 - DNA, 396 bp, Klebsiella pneumoniae; identical to SEQ ID NO: 100678

SEQ ID NO: 241809 - DNA, 795 bp, Klebsiella pneumoniae
atgaaagagcgcgggatgattttcaactctgaaatggtacgggccatcctcgacggtcggaagacgcagaccaggcggattatgaaggtacagccggaatccaaccagcttggcttgctgcttatcactgactcaaccaagcacagtgacattggcaaataccattgggcggaatctaacgctactggtaaccatgtgcgttcaaagcttttctcatccccgttcggcgccgtcggcgaacgtatctgggtgcgtgaaacatgggcgaccctgggcaatgaagacggctgttatgtcgattgggaagataatctttgcaaaggagatgagcgctcagcggcaaggatttaccgcgccagctgcgagcagagaccaggtgattacggcctgtggtctattcccgatgacgcctactggaaaccacataccaaagagcacaagttcgaaggagcatggcgcccgtcaatccacatgccgcgctgggccagccgcattctgctggaaatcaccgacgtgcgggttgagcggctgaacgctatcagcgaagaggatgctattgcggagggtatgcagggtgttatttgcccttgctgtaaaggcgatagcgaatactcaacatcgcaatatgacgccgaaacactagcagtggtagatgaaataccatgccgtgcgtgtgaatccaacagaagcaagttttttaccctatgggactcgatttatgggtatgggcagcactgtattggcgaatgggtttgggttatcgagttcaaacgcgttgaaggcggtgcagcatga

SEQ ID NO: 241810 - DNA, 714 bp, Klebsiella pneumoniae
atgtatagagtaaatcaaatcatcaaaactataagcaaaatgaactcttatgctccctataatcagataaataaaaaaagtaacttacttagaaaggttcaagtatattcattccttacatcactcttttctcttattttaatggtcataatggccgttatctacaaagtctttgacctttccaaacaaccatttattttacctgcattcgtcctgtatgccctcaattcaattgccggtataatatacttatttacccctataattcctggcgtgaagttcatgctcaacttcaaaaaggaaattttcaatgacctgatttgtgaaattgataatgatgaacaaaacatagaaaaactgatgccttactcgttgactgaattaaactattcaatagattggttaaatataaagatacaaagagttaaatcaaggataaatgatttctttggagaaaaaactgctgttttatcaataattggattagcatactctgcagttcaaggttttggtgggttagacaaattgggtgataccatatcaaaagggatcttcaattccggtacagcaaatacattaatcgtatttggactggcttttcttttagggttatcacttggagcattagcacttaaaaatgtagcaaatcatttgcaatatctgaaagagatgattgaattagctaaaaaaataaagcaacagaataatgagtaa

SEQ ID NO: 241811 - DNA, 834 bp, Klebsiella pneumoniae
atgacatctattttaaaaatgcgtggcgccacattaactaatccgacagtgacacttgatgatcttcctttttcacgacaaaaaaatattaactggcttggtggagacagtgtcacgctttctgaatatggggttgagtcaattaatgattatcagaacgggcaggtttacccgacaattgatacagtagcgcgtcagagagtatgtcaggtagaaactttaaatggaataaatgttttgacgttctctcctaagaattttgctgccggaacaattaatgcctataaagtgcttaaccctcaacaattcaatgcaaaggatgctctctcttttgcaatgttagttaaatctgatgcaactgattattcatccggttaccgtgccattttccacattggcatgaataatagtgcaggttcaaacgtaccaatgatacgcctgcaatttaccagtaataatgcatttggcatcgtagcgcggcactcatcggcagacgagactgctgagcaggtaggcatatccggattgccagcggggtacaatgtgattttcgtcgagcttgactatgttaaccacaccatcaagacgaaggtcaatgatgcgtctgtggttacccggtctgccttcgccggtatttctgggcagaacgtagtctctgcatccgctgtcgtcggtataggcggatacctctctgctagcgggcaagccggaagaaccaccatgttttctggtggtctgcgtgaaatgagcatttttaacggaccattaactgatgatgagatagattctgtcaccagttggttattaagtaagagaggcattctaaattcatga

SEQ ID NO: 241812 - DNA, 1998 bp, Klebsiella pneumoniae
atgggtgaatataatacgggaaaccctgtcccgtcttctgctatacctgatgtatgggataacaatgcaacaattgatgagtttgttaactcaccagaattaactctgacaacaagaaccggaacagagcgcgacacattggccgggattcagaaaaagtcggacgaccagcgtgtgcaaatggcagaggatggtgctgctgttgtcgaggaaaccaggcagaaccttatccctctcagccgtcagtatatgactctcaaagctgctcagaacgatatcgcgaatatccccgagggtagcacgacttattatcgcagtccagacgatagcgcgctggccattgaggtaatcaataacgccggcacgctgcagcctaccggtcgaaaaatgccatctcaacagtatgttgattcagttaatgagtatttagttacaagactttatgaggaaacacttcctggaattcctgttgcatttattgatgataatgggagtgtgtttttgtatggtacagatgcaggagaaacgcatgttcctggtttatcgctacaatattgtgtagacattgcttataaaacaaaaataatcccaggtgtttctcatgttgagttggatgagaatggttttgtacttcgatggattgatgatacaggagtgacacactacccggctggcgatggaaataacaatccagaacctgttgttgcatcaactgcagtcatatctccacaagtgtacgataatgcgcttattaccgaacttgggtataaccaatggattaataacgtagctgttaaattcggtagggactatttattcagctctgtgcgcctgggaacaacttctccatctcgtatttttggggcgctggcaatctcccgtcgacagggggagagaggacgctttggcctttatgagtttgctcggcaagagagtattcttggcacaactgcttctactgatgatcacgatgcgccgagtatccttcttgatacccgaagtgatgcggaaaagccaattaccattttccaggctgaccactctggatccctcgcgtggctgcgcaagtgggaggcatcaactctggaccccgcgaacatcgcaaacccagttgccatctctgattcctcaaacatgacgtatgcccagtcgtatcggaatcctaataatcaaaatgagatcatggtcttctcgcggttaggttctacgaactcagcgcgatggcttgcccatcgctctacagataatggtaagacgtggcagtcgaatccctttatcggcggtgcagacctgtatatgaccagttgccagagcatggacggcagcgcgattcatcttgctatccagcagcatccgcgttctacggatacccgcgttttgtatctgaagatcaagtggtcagataagtcggcggtgaactatgccggaactgtatttttagcgaatatcatgacggcaacgtatattaatccgtttacgagctcggtgcctgatgtggtcttcgaagcctcactaacgacaaatactaagcgtctgttcgaggtcaaggatgacggcacatacttactgttccttgtagctgaattcaattccacgaactactcataccgtcgcatgaaaatgtccagattttctggggggacgccagttatctatgacatcggagattgcgggtcaccgatgaacgatgatgacgctacgttctatgtccctgggggaactattatttctgtgaccgatgttctggtttgcttctggtcaaaagtccccagcgtcgggcgaattaccaggtatgtctacgacggagctaactggaatggaacggtagtagatgaggtcacagatgggcgaaaaatctgcaggccactcgttttccaggagtattatcaggataatggtgtcttgaaatataaatgggacacaacagtagtttatcttcgtggtatctataacgcgtatcgtgatttcgatctcgatgcggtgttaatcaacatttga

SEQ ID NO: 241813 - DNA, 627 bp, Klebsiella pneumoniae
atggcgactaacgattttaagcccttcgctactggtagtggggcaaacgtattatctcaggcagactatgagtcactatctgccctggcctctggatttctttccggaaaagcttcatctgcgcaggtaaataaagtcttgcggcaagcgtcttttgtgtcttcggcaatcgctcaatttatttcgtccacattaaataaagatgtccttgataacggggatgagtcttcgtttgtgtcggattttaccaacgccttgcgtgaagatatcaaaaataacctattacctgtctttattaatcagacgaatgggtatatagcccttcctgctttactgtccggtgttaagaaaatattttacattcagtttggaacatttactggaacaactgacagtgttggtaataatggcgtttatgaaaattccaacattaacgttgcatggcctgtgactttcccaaatgcgattcttgtggtagttaccgggggggcttctgacgtgagcggggtcggaatgcaagagatggcatggagtttatctaagagcaaaactgctggtgtttttggcgtgcaatgtcgagcccctggcgctttaatgacaggaagctatatagccattggcttttaa

SEQ ID NO: 241814 - DNA, 234 bp, Klebsiella pneumoniae; identical to SEQ ID NO: 148814

SEQ ID NO: 241815 - DNA, 603 bp, Klebsiella pneumoniae; identical to SEQ ID NO: 148813

SEQ ID NO: 241816 - DNA, 705 bp, Klebsiella pneumoniae; identical to SEQ ID NO: 161401

SEQ ID NO: 241817 - DNA, 801 bp, Klebsiella pneumoniae; identical to SEQ ID NO: 148812

SEQ ID NO: 241818 - DNA, 1386 bp, Klebsiella pneumoniae; identical to SEQ ID NO: 148811

SEQ ID NO: 241819 - DNA, 774 bp, Klebsiella pneumoniae; identical to SEQ ID NO: 148810

SEQ ID NO: 241820 - DNA, 672 bp, Klebsiella pneumoniae; identical to SEQ ID NO: 148809

SEQ ID NO: 241821 - DNA, 753 bp, Klebsiella pneumoniae; identical to SEQ ID NO: 148808

SEQ ID NO: 241822 - DNA, 795 bp, Klebsiella pneumoniae; identical to SEQ ID NO: 148807

SEQ ID NO: 241823 - DNA, 435 bp, Klebsiella pneumoniae
atggtcaggcaaaagtgtagcggtattaggcgcagctatttaggcgaaattatcggcgcttggctgtccgaccgcgtcgataggcgcgccgccgcctgctttatttccctggcaggcgcgggtattggcctggcggcagtgatgcatttcaccacgccgctgccggtaatcgcggcgatgagctttagcacctttatgtggggcaccggcgcgccaaacattttcgcgctgctggctaaagcgacccatccacgggtcagcgccacggcgggtggaattttcaacgggctgggaaactttgccggggcgctatcgccggcggtgatgggcgcgcttatcgccttcacccatagcatggattccgggctgatttttctggcagtgatggcggcggtgggctgcgccctgttactgccgctgctgagacgctactga

SEQ ID NO: 241824 - DNA, 1956 bp, Klebsiella pneumoniae
atggcccttaatccgccactcgggaacacctctccggaggtactgctcgataacgccaaacgtctggatgaactggtgaacgggcctgcggctaccgttcccgaccgcgccgacgtcccgctggactcctggcgccagattatggcgatggttgccgcagctatcattgaggcacaaaacagcatcaccgcgatcggactgccgtttaccgacgaggcagaagtacaggccgccgcggatgacggaaaaatcccggtcggggctgttgcctgggtgcgtagcactgatggaagctctctggccgatgagtatatgaatgtggctggcacaatgaccgcaaccgggcggaagatgccatctcagttatcttatgaagcagtagttcaggccttatcagttatttccggtatggttcagggtaactcgctggatgctttctactttttcgcaaaaaatgggattattggtcgcctgaggggggatagcacactggaatgttatgctgccattttatctgaattggcgatttcaggcgtgtctataaagtcagggcgttacccgttctcgtggggagcagaaaacggatttctgatgaccctcgatgatactgggaaactggaagggattgaggctgactttcaggaactgaaaatagcgggagtagatgtaaaaacgttaatttctcagtctggtggtgaccctagctattatccaggagcaccaggtattctctccgggtatagccacacggcttgcgttagtcagtctcagggggtcggggttcccacgaatggtgttattcattccgcaccatttgacgctagcagcctgatgctcaacggtggcctgaggtcgtatggtaccgatggatatgacacatcggttagtcagggtaattattatattctactgaagccgatgtatgaggtgacgggagagacgtttatgtcaggtcatgctgtcagggctcgcgcatttcttaattcaaaatatcccgacctgaacgtgaaacggatttataccgtttccgggcaagggggggcgactgtatctttgttgaagaaaggcaccgctgcatattcacgtactctgacacagtgggtggcattaattaatttaatccagtcaatgggcgaggcgtatcgttgtgcatctctgattttttctcagggtggtagtgatgacggggtggcaacaaaccccgatacctgggaggcaaccgtacggcagatgcggtcggattttactgcggatattaaatcgcagacgggactacacgtagacccgccctatatcatcaaccagattaataactatatgcgctatccggcgctgaacgggaaaccaaatattggcctgcgtcagtataaaatggtaacggaacagggcaatgatttttatggttcgtgcccgacgtatattctcgactttatcgacgtggcccactggacaaaagaaagtcaggttaaggttggtgcatacatggagaaggttgagagaaaccttctgttaaccggcggcacatggaagcctgtgcatccgattaaaatcacaacctcgggacgattcacgacggcgaaatttaatcttccggagggtggcactcttcagtttaataccgatatcgtaaatgaagttccgacaagctatggcttcagcgccgaacaggcggacggcactgctattggaatcgaccgcgtacgacttattgccaatgacacggtagaggtgcggtataccagcatgccgctgcctggtgcggtattgatgtatggtcagactggtcaaatcggcgaccctaatgcatctaacggttcaggtctgggtcggcaaaatggcgttcgcggtaacctctgcgataacgctggcgacaatgacaaaattcaaattaacggcattgattatccgctccataactggtgctggatgttcaccgaaaatatgggagtagaataa

SEQ ID NO: 241825 - DNA, 786 bp, Klebsiella pneumoniae
atggccggtttatcttttattggtaatttcaccgcgagcagggtgcttgatatcactctggaccatatcttaaaaaaccagatgaactatttcggtatttttggcgggtctctcagtggttcacaattaaatcaggctcccggcgcgtctccgacgaccgtcaccgctcatgagcctgcaaatctggtttttggtagtaattattttacctcgttggctgcaaacctctctgcaggttttacctcagttagtcagccgcgccagctagacgccacgctgttttgcgcgtttaccgccggggtccctggctggtccgccggtacggcattttcctctggtctgattaacctgtggggtgatgacacgggtaacggggcgggacgtatgacgattgggctgcacaaaaccgcagtaggggtgccctatatcgttctgcgctgggggctatccgcaaacaccccaatactcacctgcgccatcccgttcgactggacaaccgcaaccgggccgatcctcgttatcgcctcccgtgacagcgctggcggcatgcgcatggagatgcgcaacaacggggcggtatataaggcggtcgcaacaactacaccggtcgcaatcccctctaccagtctgaactggcgcgggtttacgggccagctatcaacgttccaggtcacgaaccagcggatgtatgcggcagctatctggtcggcaaccatgacggcggaacagatgagcgcggagctcgatgtgatgcaggtaaacctggctagccacctggcactataa

SEQ ID NO: 241826 - DNA, 1185 bp, Klebsiella pneumoniae
atgaagggtatgcagaagatcaaaaggggtaagagcttcgctggtgtcgttcaatatgcattgaagccaggttcacatcataaaagtaatccaatcgtcattggcgggaacatgttaggcgattcagcctctaaactgatcactgaatttgatggcacaaaacagcttcggccagatgttcagaaaccggtttggcacaactcacttcgcttacctgatggtgaatcattatcgaatgaccaatgggtaaccatagctgacgactatatgaataggatggggttcagtgatacccatctccgttgctatgtacttcatgacgatccggctggtcagcacatacacattatcgcaagtcgcatagatctcaatggtgggaagctctacttgggtaggaacgaaaaccttataagcacacgaattattagtgaactcgaaatcgctcacggtctgacagtgaccaagacagcaccttccattacaccaaagcaaccgaagcgaagaaaggtttcccgcaatgaacagatgctttcagaacggactggccttccctcccccaaagaagctctgcagcagatacttgataaaagtttatctgataagccggaccttctaactttcacaaaacgactggaagaagcagaagtcggctggacggcgaatgtcgcttcaaccgggaaaatgaacgggttctcattctcctaccgcgatatagctttcaaggcatctaaacttggaaaggcatactcttgggtaaatcttcaaaagcagcttaactacaaccctgaccacatagaagctctgcgaagcgacatatcgataaaagaccaatctgctgctcctgctcctgctcctgctcctgctcctgctcctgctcctgctcctgctcctgcaaaagatgttgcaacagcggatattccaagggaaagcataagtgaaaaaattgccgaactggaattacggctcagagaagacaaacggaacgaaatcgtagaaaagattcttcaaaagaatgcagtacaacagctaaagcatctcaggcttagtagctggcttccctttttacaacggctcatagagcttctccgaagctacggtaagagcattcttcacaacaaccctgcaagattctcaaaagtctatgcaactcagcatctcagtcggaaaagaaaaattcgtttatag

SEQ ID NO: 241827 - DNA, 318 bp, Klebsiella pneumoniae
atgactaaaaaaatggaaaaaatagaagatagggtttcataccatcaaaaacagcttgctcaactaagaacaaagaaaaaagaagagttgagcaaagcaaaaaaagcagagaaagcaaaaagagcgagtaaaaatattttgcttggtgcttctgtctgtaaagtattaggtattgattacactgaaatagatgattatttgcctaaaatcgttgggttgattgccagtacggttaaatacattgaagatccaaaggtgctggcaaaaggaacagagcttttagagagttggaaaaatggcggcgacagaaacgagtaa

SEQ ID NO: 241828 - DNA, 297 bp, Klebsiella pneumoniae
atgaaagataagcgcaagctcggctttttacgtggtaaaggctctatccctgaccaaaagcagctcgaagagatggatcaggaagtcagcagccagtttttccgtgacctgatggaatcagcacaggaagctgtcgaaatccatcaaggtaaacgccctgcagctcgtagaacgctgtacaaggtaaacccagtcaccaaatcagctattgaacgctcagaagcccgtacagacgtttttacagctactgatgcctctgatctcttcaaaaagctacagctcgatagggacgactga

SEQ ID NO: 241829 - DNA, 846 bp, Klebsiella pneumoniae
atgataatacaagataaccatactatagaattatttaaaaatcaattacctgtaaagccttactgctccaacaacttgcaatcaggcttgagtatcaggaacaaaaatagagcgcttgagatgctttaccttcaagcaaatcagccagctatacagacgtgcttactgttcgatctcgatgaggacaacgctttctacaagttcgatgaggtagggcttccggttcctacgttcatcactaaaagccctgactctggtaggtgtcattatggctatatgcttaaagccggtgtctgcaaaactcaacacgcaaagctgaagccattgaagtatgcagcagccgtagaagctggccttgctgggaagttagcttctgatcgtggatatgccggactgattaccaaaaacccactgcatagccattggtcgccttattggtcaggtgctgatctgtatgagctggattatttagctgattttgttgaactggagacaccaaagaaggccaaaaaatcagagaactacgggcttgggcgtaatgttaacttgtttgaagatttaaggacttatgcttatagacgagttcttaaatttaaaaaggactcaacttatgaagcgtgggaacgtgatattctaagtatagctgaaggactcaataatcattgtaatgctttaaatccgctacaatataatgagataaaagcaactgcgagatctgttagtcgttggacttggaagcattttgatagtgctactttttcagaaatacaaaccaatagagctaaaaggccacgtaaaaccagcgctaaaaataaaatagataacgtattggagctattcaaatga

SEQ ID NO: 241830 - DNA, 261 bp, Klebsiella pneumoniae
atgattataaatggtaaaaaagttaaagctaaagagctggctgaaatggctggcgtatcacgtagaacggtagttaagtattatgctatgccgcgtgaagcctatgaagatgaagcggcagaacgtagaagaaaagcgtatgaactgagagagaaaggcttaaaatggaaagatgtaggaaaagagttaaatacttcgctgcatggtgctgtagctctttataagcgttatttgaagttagatttaaaccaacagcaatag

SEQ ID NO: 241831 - DNA, 729 bp, Klebsiella pneumoniae
atggctaccactgcagaggctaaagctgaagctctggctaaggctgtaagccttgataggccagcaatccaaaggatttggcgtagtaagctgaacacggaagagggtagggctttacgtgaagcacagcaagatagaagagatgtgcagctcgttattgctgaagagactaaaaagagtgttttgtctttaccacaagagatagttttaaataactttgctcctaaaaaaataaaatcaaaatccaaaacaaaaactactattgaaaaaacacgccccgccaaagaagcagtttttaaaactgctgatacagggggagagataaaagatctcaaatatagttcttttagtaagttaatgttaaatattcaaataatgtataatgaacacaagaaaaaatctattggtaagaagctaaacaaaagaataaagaaaatagagagagcggataaaataggcggtggtaaaggtggctatttcgctagacatttagataatgattattcagttgaagatgatattaaacctataccagaagaacgcaaagaagatgaatatacgaagctacagaagttttttgatgatgtaaataaaagaggcatagagctaaaaaacaaaaaagaagccatgcttaaagctgagcaagaaaataaaaagatgctatcacaacaacctaaacataacccaaaaaatgacgatcagaacgatagacacattaaatacaaataa

SEQ ID NO: 241832 - DNA, 1485 bp, Klebsiella pneumoniae; identical to SEQ ID NO: 218039

SEQ ID NO: 241833 - DNA, 123 bp, Klebsiella pneumoniae; identical to SEQ ID NO: 239650

SEQ ID NO: 241834 - DNA, 393 bp, Klebsiella pneumoniae
atgatgctgttttttagaaagtatggttttttgtttatccctccagtctactggctcatctatctgggagtcaggctgacgtacaatggactggcaggagagttttctcctgatttctttcagggtattcgacatgaaggcctctatattatctgtagtttgtgtgtgttttattttttctgcctggaggtggaaattagtgatggggagttctcagcgaaccttctgttcctgattgttttctttcatgtggttttattatttatcactctgcttatttgtttgtggcaaggggcgatgttgttggatgcgatctttatgggccagattattgcctccatgtgtttattgtttttcattcctgtgctttccattataagaaggagtttctag

SEQ ID NO: 241835 - DNA, 225 bp, Klebsiella pneumoniae
atggagagtatcgggaaggacaaggcggtctgttacgaatatccctccccgatcatcccgaaagaacgctggcgctatcagatggtgaacatgtatccggacagtggtcagtgccatccgcttggacgcagcgtgatgcgctgggaggccggcaaaaatccacccaactcccgcaagaactatggctacctgatgtggcgtaaacgtaactgcgtatttttgtaa

SEQ ID NO: 241836 - DNA, 693 bp, Klebsiella pneumoniae
atggaattgatgccattcaattttgacagattgcctaatggacgggtttttataagcaacctcgcaggctttcatcacttcattaatgagcaagagctgcttgatctttctgatgagcaaatcagtgcggagcaatcaaacgcactagaaagcaagctgttcataaccaacgaaagctcatcagctattgctccctatgctttaagttctgcttttgcaaaaagattgatgaatgaactggcgatcaggccaattttcatgattgtgcccacattgcgttgcgaccatacctgcaagtattgtcaggtcagtagagcttcagtgaacgcctctggttatgatctagatcccgatctcatccctcatatcatttcgactatcaaaaaactatcgataccaccttacaagatagagatacagggtggagagccactcttgcggttcgatttaattcagtctatctatgagcaatgtactgaaacgctgggaagctccgattttgagatggtgatagcatcaagcctgtctgtcttgaatgaggatatgcttgaatggtcgagaggcaggaacataacattctctgtttcgcttgatggtgaggaggttgttcacaacagtaatcgaattcttggtcatgggcttgcttacagtagaactgacctgcccccagagttagatacaaccttcagttag

SEQ ID NO: 241837 - DNA, 597 bp, Klebsiella pneumoniae
atgagtgaagaaaaacgccctgtactgagcctgaaacgaaaaccggcggagaacagtacggcacccgcggaggcgacacctgtccctggtgtggtgcgccgtaagaaggtcatggtggtttcgtccccgccggcctggaaggcaaagaaagagaaacttgagaaggttaaacaagcggccgaagccgccgcgcgtaacgcggcgccggcgccggttaaagcagtaaagacgccacctccggtgcgttatcttcgcctgctgccgccggaacaggccattatgaccctgaaggcgttctggccacagctgttcgacggaaacgcgccacgtctgctggcgacgggcatgcgcgaacagctgtttgcggatatcgtgaaccgtgacctgccgctgtcgcataaacaggtgattaagtgcctgaagagtctgacccggtctgcgggctatctgtcccggatgaaggtgggggcctcccgctatgatctgcaggggaatgccgtcgcgaccgtcactgcagaggaagcgcagtacgccagcgagcgcatgatgaaagaactcctgcgaactgagcgtatgcggagccagtcagctggctga

SEQ ID NO: 241838 - DNA, 348 bp, Klebsiella pneumoniae
atggattttgaagcgcggaaacaaaaggcgctggcaatcatggccagccgtaagatgtggaaaagcaattatgcaccgcttctgatacgactgttgtggcggctggggataaacattcccccgctgccgtttgctccgctctggcaggtttttgtcgtaatgacaggctatttctcccttggatatgggctgtggatgtactggacggtgtggcgggcccaggggatgcctctcctgttcgcctgcgaaatcagtcttatcgcgggcgtgttatttggcctgacgatggcactttttcatctgtggcggcgaaaggtgaataaattacctgactggaaagatctgtaa

SEQ ID NO: 241839 - DNA, 768 bp, Klebsiella pneumoniae
  misc_feature (22)..(31): n is a, c, g, or t
atgaacaatattattttatttnnnnnnnnnnctaaaaaacaacttacggccgaaaacaattataatgaattcataaatttttgtcgctatcaactatcagggctcacccaaactcaggattgggaacaatatgtctggaaagggtatgtaacctttagaaagataggggttggacataaagcatttaactccaaagatgcaatgcatgaagattttctcaattttgcaaaagcatatatcagatatcaacactcattgaaacccttgaaaaattatggggctacaatgatggctttgagatgtctcgaacaggctcttttgcaagttctgaacagtggtctcatttataatgttaaagccgttgtttttgatgaggcaatgcaaatcggaagtaaatattttgaaggtaatgttctcgctcaatgtgggatacagcttgaaaaagtatcaaaatttctatgtgaacataaccttgtgaaatcaggatacatatcctggaaaaaccatgtgaagcagaaggtcaaaaacaactatcttcctgagattgaggactatcacagaaacgataagttacccgatgaagcagcattacttgccattgctgatattttttctaaaaatgatgagctactgagtccaagggataaattcaccagtgcagtatttgcacttctgctttgttgtccgagcagaatttctgaaattttagccttacctgctgattgtgagattacacaaaaagatgtcgtggttggtgttagcgaataa

SEQ ID NO: 241840 - DNA, 684 bp, Klebsiella pneumoniae
atgaatacccttgacgagcttgggtatgaagttgctgattctgcgattgctggttcttcagatcctaaaattattgatggtaaaaatttcctccctcaacatagagaacgaatcgtattggttggatttcgtcgtgatttaaaaatagatgaaggatttacattacgaaatataaaaaatttcttcccgtcaaaaagaccttcttttaaagaacttctcgataacgatgttgatagtaaatatatcctttctcctaaactgtgggattatctttataagtatgctaaaaagcatgcggcgaaaggtaatggttttggattcggcttggtgaaacctgataatgttgatactgtcactcgtacattatctgcgagatattataaagatggttctgagatcttgattgaccgtggatgggattatgaactaggcgaaatagacttctataatgcggaaaacatgtcaaatcggccaagaaggttaactccccatgagtgtgcacgcctaatgggatttgagatacctggtggcaaacctttcaacattccggtttcagatatgcaatcttacaagcagtttggaaattcagtcgtggttcctgtatttgaagcggttgcaaaattgctcgaaccctatattcagaaagctgtttccataaaaaaaattaacaccttacaaaaataa

SEQ ID NO: 241841 - DNA, 495 bp, Klebsiella pneumoniae
atggactgcggcaccgggttgtgccgtgccgacacgtcagcccggcggaaagcggaagatgcaggggcgacaccggaggccgcagcgcagataaagcgcgaagcgggtctggacggttttcgagcgaaacctgagcgagaaaacgacgggaagaacggcgagcatcataaaaaaaactgcgaccgggcgaggatggcggcgtcagcggacccttgcatctgcagcagccgggctaaagtgaaggcacggcactacccgtcgcgatgcaggaggttgaacacagggtttttctcccccgtttttcgaccacagggagaaaagcggaagcagatgtcgcgacgcgacagacgcagtaataaggccacgaaccggagggatggggccgggtggatgcggagccggcacggcgacatccttatcgcatcagtcctcctgtggcggcaggctgacaagggaggggtcccctcccctgccgcgccgggctgtcactcctga

SEQ ID NO: 241842 - DNA, 123 bp, Klebsiella pneumoniae
atgatatccaaaataaaaaaagtcatgagcatggatttaaaaatattttcgcccgacacgggtatttcgataatgaaggtcagccactacttattcgctaacaccaaccacgacatcttttaa

SEQ ID NO: 241843 - DNA, 288 bp, Klebsiella pneumoniae
atggaaaaacaggcggaacagactgcccgggaagtggccggggaggcgcgtaaagccggcgagccggtggaccgggtgaaagaggttatcggggacgtcatccgtggactcgagcgtgaccggccgggcccggagaaaacgacgctaccggatgatcctcagttccggcgccaggaggcggcgattcagcaggtggcctcagaaagtctgcagcgtgagcgtctgcaggctgtggagcgggacatggttcgtgacctgaaccgcgagaaaaccctcgggggcgactga

SEQ ID NO: 241844 - DNA, 225 bp, Klebsiella pneumoniae
atggagagcatcgggaaggacaaggcggtctgctatgagtatccgtccccgatcatccccaaagaacgctggcgctatcagatggtgaacatgtacccggacagcggccagtgccatccgcttggacgcagcgtgatgcgctgggaggccggtaaaaatccacccaacacccgcaagaactacggctatctgatgtggcgtaaacgcaattgtgtctttctctga

SEQ ID NO: 241845 - DNA, 381 bp, Klebsiella pneumoniae; identical to SEQ ID NO: 206035

SEQ ID NO: 241846 - DNA, 594 bp, Klebsiella pneumoniae
atgaataatgactccggatttggctcttttgtagatacgatttcttctcataaggacgtcatggctgatatcgctgatgccggattagaggccgctgaggaaatcccactttttggctgggcagttaaggcatggaatataaaaaatacatttcaagaaaagaaacttgcacgcaatataagggaattcctaagatgttcctctgtagacgacgcgaaaaatttcatctcaaagtttagctctgaagaggaaaaagaggagctttgcgatagcctaattcaagtgctaattgattctgaaaagcccttaaaggcaacgctgacatcaaagatagttaacgccatcaacgaagatcgccttactgtgtctgaggctcatcagttacttttgataattttaaatgcctccattccagcgctagaggccattgataaattttatcaaaataatccgaatggcagaacaagcaccatgaatgagaatgcaagaacatatggcgcattgttgatgtcgattggagtgatccatgtccatggcaatatgacccgagttaccaaccttggcagaaagttatacgaatgcgccttcgtgtaa

SEQ ID NO: 241847 - DNA, 462 bp, Klebsiella pneumoniae
atgagccgattaaccgccattatcagcgccatcgtgatttgcctgatagtcagcctcggctggctggcaagtcactaccacagcaacgccaccgagttcaaaagacagcgtgacgagaaggttaaagcgctaaacctcgcgtacgagaccatcaccgacatgacaacccggcagcgtgacgttgcagcgcttgatgccaaatacaccggagaacaggcaaatgctaaagccactatcgatcagcttgagcgcgatgttgcttctggcaagcgtcggttgcagctcaacgcaaaatgtccctcgaacggagctgccgcaaccggcggcttgggcgatgcttccgccccccgacttactgactccgctgaacgggattatttcaccctcagagagcgaatcgtcaccatcaccgggcaagtgaattatttacaggactacatccgcacgcagtgtctgaggtaa

SEQ ID NO: 241848 - DNA, 204 bp, Klebsiella pneumoniae
atgcaacgcatggataaaatcagagagtggctcagttattgggttggaggcttaacgaccatgggtggcgttctttccctgaacgactgggcaattatcataggtatcgtctgcactatcggtactttcggtgtgaactggtactacaagcgcaaagagcgcgaggacagactaaatggtaatgtcaccaaagctcaggaatag

SEQ ID NO: 241849 - DNA, 210 bp, Klebsiella pneumoniae
atgagcaagcctaccgatgaagaaatcgtccaggtgctttctgagcacggtcagtgcatgacttacgtcgtgacctactggctacgcaggaagcacaaaaacatcaatacggcctatacgctgcgccgcttgaagaagctcgaagccatcggcgtggtgaagcgcatggaaagctcgtacaaaactcaaatttgctggggtgccgcatga

SEQ ID NO: 241850 - DNA, 837 bp, Klebsiella pneumoniae
atgagcaataaaatcaaacatccagcgattcgttatcacggcggtaaattccgcctggcaagttggataatcagccatttccctgagcaccgttgctatgttgagcccttcggcggcggcgcatctgtgctgctgaaaaaggaggcgtcagaagcagaggtttataacgacctcgacggtgacgtcgttaaccttttccgtgtacttcgaaacccggaaacggcgcagcaacttgttgatgcctgcgctcttaccccttactcacgcgacgagtttaactgcgcgtatgaaaacagcgaaaacctggtggaacaggcccgccgcctgattgttcgtgcaactatgggattcggcagcgctggcgcaacaaagggtaagacgggttttcgtctggataccaagcgtaatagtgccaccgcacaacgtatttgggcgcgacaacctgacaacctcgcagctgtggccagccgttttgctggagtgctgattgagaatcgcagcgccattcagtgtatgcgagaccatgacaccgtatctactctgcattttgttgatccaccttacgtacatgatacccgtgtagagacggctaaaaacagcgcttatcggttcgaaatgaccaatgaagagcatatggaacttcttaacgtgctgaaagatctgcgcggcgcggtgattgtttgcggatataacagcgatctctataacaatgcacttaccggatggaagcgggtaacgcgcaccactgccgccaatggctttgccggttcagtgcagcgcaccgaatgcctatggcttaacccggcagcacagcagaaacaggagcgtgcagcatga

SEQ ID NO: 241851 - DNA, 969 bp, Klebsiella pneumoniae
atgacagacaagaaaagcagtgaaggtaaggctaaaggcggtttggcccgcgccaaatcattaacaaaagagcagcgcgccgatatagcaaagaaggccgctgctgcaaggtggaaatggaagccattcaaagccactcataaaggtaactttttggatgagtttggcattgatacggaatgctatgtcctggatgatgaggcaaaaacagtagttgtaaccaagaagggtctggctcaattacttggcattggggaggcgggaaaaacgattgatgagctcttaaagacccaatacatgagcgaattcagtgatcgtgaattgcgggcaaaaatagataatccacttatatttcaatatagtgggcagtcgaaaaacataaataatgcccatggatttgacattacagtaatagttgatattgggagggcccttattgatgcaagaaacgctggcgcgcttccctcctccagattgccggctgcagatgccgcgcaaaggcttattaacgcctcagcgaaatcaggaataaaaggagttgcctacgctctggctggctacaggcctgaggtgcaggaggtaattgatgccttcaaggcgtttgtgcgagaagaggcaaggcaatacgaaaaagagtttcctgatgaattgtatgaagaatggtacagactctacggattgaaccgcccagaaaaagggagacccattaggtttgggcagttaactaatatgcaaatctatgtacctctagcaaaaagcaaaggcagaatacttgagcagattcgagccagtcgcgacgagaacgggaaacaatctgataagttgcacttatttctctccgaaataggggttaaggccctcaggcaacatattggtaagctgcttggcgtcgcggcgatgagtgacaacaaagaagaatacgaggctggaatagaaaaggtcttcggaaaaatgaaaccagaactatga

SEQ ID NO: 241852 - DNA, 441 bp, Klebsiella pneumoniae
atgagcattgacggttggtattacctgcatcaaaacggagatctgatttacaaaccatcccctgacgcaatcgtagatatccgtgattcagactttgcggtctgctcatggcctgtagacgtcggcagccgcaagttagcctgggaaatgcttgtcgaagctctggctctcggggctcgagagtcgcgaatttttgaactcgcagaaaaatggaattgcaacgatgaagacgctgacatgtttgcaagcgtcatcggcgtagacctggaaattgacggcaaccagtggtgtgcgcatcgatctgactttgtgaaccttcaagaatcccctgcgggatttggcgaaagcaagctattggcaatggctgatcttgcccggaatctcggaattcgtggtggccatatgtggcgctctactttttctgacctcattaaaaactga

SEQ ID NO: 241853 - DNA, 591 bp, Klebsiella pneumoniae
atgaatccatcagatgtcaatggaccactcttacaatatcagtcaactcggcatgaaaaagatgacatctataaactgatgatgtccatcaacacctcctgtggcgagcaggcccttgataatgagaggttaagtaagatatttgaagtttggtggccaaatttagagcaaaatttgaaggatattcctcaagaggtagttgagcagccagcaactaaacaaggcacaggaaaatcagcagatctagagagattctctaaaatctttgaagaattattagatcttagccgaaccaatcatcaactgttgcgctctcctgaagcaattttacctaaagattattttgattacattttaaacaatgttaataaagatctttcaggagaattgccagacgtaattagtgatgccgtggatagattaaaggatctggaaactacagtgcttgaattggagctttcgacagatataaatctttctgaattaagaaaatcaatcgaagttcttaaacggccaataaattacttatctagtagttacggcggcgctaaaaggctccgttcgagaagattaattagacaaactaactga

SEQ ID NO: 241854 - DNA, 858 bp, Klebsiella pneumoniae
atgaaaaactggtcagttgagcatacgagagaagtgaagaagtggctggatatagatacatatcgaggattcgaagagcttccgctcatgcagctttatcatgaactacttgcaagaaccttgttcttcaaacctttccatgaagaatttgaagcgaaggccgtaagcctctacatcgacaggatcttcaatggaaatccctttctcatcacagaaaagcatttaggttatctcacaagagaggacacattgtatcagcccccgcacttttttctcacaaccaccgaacgactggcacagttgagcatcattggactgcgaaattcactgttcttttgggatgggagtgatgagtattcggttaaccgtgaattcctcgatagccctgtatcggaagttttgccaaaattgttcagggatacggtcatggtcgaaatcgacctggtaaatggaacagatgaagagattgctgaatccctgaaggctgcacttccacaatggcgtaaagtacggggcattgaagccgatacatctgattcgatcaggtttggctatggaaccatcaagaaaatcatcaactacagactcatacccatgattgacatccttgtatggtctactctgcacaaggttcgcatatcagaagatcgactttcacgcctcctttacaccgacgatgatgatgaagaacagacccgcctcaatcaccaaattcgggacacagacagaccactggcgataaaagcagccagtatacctttcatccgtcagttccatctgttcatcaacaaaaacagtcatctcaaaaacatcagagtttcagacgtgatgaaaatcgcggattctgataaagactga

SEQ ID NO: 241855 - DNA, 1389 bp, Klebsiella pneumoniae
atgtacattgataaatttttaactgaatatgatgagtcgctgaccggcgagatgaatatcgaccctttgggccaactggttatctggtcatcctggggacaggacttgtttcacggacgcatcacttctattgccaatgatgtcaggcagtatacgctcaacctgctgcaccacagcgtcatccgaaaaataatgctggatgatgctgtgcaaaccgctggcgcgatgaaaatacgctatcccaaaaagcagctcaaagagtttatcgcggcaagccttatccacctggagaatatttatatttattcgatgctgggggcggaacagggcgacgtaacgcttgcgggggtgcaggggattaataaggccagggcaaaatggcatacctcagataagaaccctcagctcacttttggccatcagaaggaaagtgaactgctgacaaaccagcttgcgctcggtactaacggccgctataaatcgccaatgatcagtatgcgttttttcacgacgacctacgactatgatctgccggatagtaagcctgtatgggaggccgctgaagcctttattcgccaggtccccgagttacaccaactgcatgctgatgtactgacctatcttaagtcgctgatgtgtgaagcaagcaaggatgccctgacgcccttcttcagtaaaattcccgacagtcttaaaactctctacgccagcgtatttcgcaaccctaaacatgtgggcaactactcgcaggcattctggctcgccagaaccgggctcaataaaaatggtgcaggtgccatttatcgggtactggagcgagaacgaaaataccctgagcaatcacttttgccgatttcgagtgtttttcttgaagcctggaagaatgccgatgcaacgatggaaatggaagaatgcgagcggcaaacgctgggatacattattgaggcagaaccgtttctgtctttaattgacctgatgttcacaggactaaggcggcagagccagcagagcctcgacgacttcgcgctattctggcagcggaaaggactgacgactcagagtttacctcaactgtcgatgaggcttgagcgaaacaatgagctggtagcgtcgctttccggtacacccaacagacgctttcggcaactgcttgcgctagccagtgggccgtctctggaggcgcaggtgcgtgggctgctggcgtatcaccgtggactgatggaagcccgtgggcagtttccatggattatgtttgaaggcaatatcatctcgctgcagactccacctgtagctattgatctggaacgtaaaagtagcgattgggtaaaccattattacataccgcaatttcgtcatttactgaatggattatggggaggtgaagtgtga

SEQ ID NO: 241856 - DNA, 612 bp, Klebsiella pneumoniae
atgtcaaggctacgagaaaatactgttaaaaaaataaatcgagctcttttaattctgtgttcaatcatattgtttctttcgaagatgttaacgaatggttttgtcaatgaagtctttgatattagtgttgctaaaattgcttatgttgggtggactttttcaatcttattttctatcccattttttgtgattgcttcctattttagttgtatggctataggggcggtaactgattcatcgcgggttaaaagaattaaaataccttcgatggtgcatacttcaattctttgtctgtcaggtgtttttttaattatcggttatacttcctatttcattagctctggtggattgtttaatgctgtggcgaaagaagtttaccgttatgataccagaagctcttttcaatgtaatgataaatactggattattcctgaattaggtagagaagccagatatctgatggacacaccaaataattatagagcgatatatattgaaaacaattctgttcatgtgactgctgtggtgtgtaagaaagatggtggttatacccgttatcctattgaaagtgcagaagatatattaaaaaatcccgcttccaaaggagcctga

SEQ ID NO: 241857 - DNA, 255 bp, Klebsiella pneumoniae; identical to SEQ ID NO: 135916

SEQ ID NO: 241858 - DNA, 546 bp, Klebsiella pneumoniae
atgaaaaacaaaatcattatacaagatggtgttgctcgcttgagcaaaggcagattatcaattagtcataacgaactcaataagggattggctactaagattttatattgggataatataataaacctaaaatccaccttcattaaacttgatgattctgatattgtaacactattaaaaagcgagaaaatatttgaggacgtgtattataaatcctcagaattcggaccaagaagctctgtaatggaaaagtcaataacagacaaaatgatggagttattattggacaaaaccatcaactacatcgctgacaacctaaccatttcagcagaaacccacgacaacaaattaattcaaaatggtggtagtattttgcagatgataaatgtgcttccaaccccagatgatgataccgacattcacaagatattagagttcagattaaaaaggaaggaccaccttagaaatcttttaaaccatataaactccctggagattagagtgagtaattctgaaaatcaagcacacgagcttaaaaagcattaa

SEQ ID NO: 241859 - DNA, 240 bp, Klebsiella pneumoniae
atgccgcgtttatacgaaatcgagacagcttgccggaacgcaatagatatcctgcctaacggaaagcgcatcctcaccaccaggcgatttctgcaggaactggagagatataactggcactggtcgccacggcaggctaatcagtggatagagggctacgtgacaacattccgcgacgtctcaacgcaggaaggtgacgatcgcacgttccagctttacaacccgaatggagggctgtaa

SEQ ID NO: 241860 - DNA, 387 bp, Klebsiella pneumoniae
atgttggtgactatgacagacaaagaactttaccggcttggcatcattcagcgagtatttgaccgggctttgcttcagcgcgacgcagcagacatacttgagcttagtgttcgtcaggttcagcgtcttgtgcgcctgtaccggacagatggcgcatccgcgtttgcatcttcccgccggcgaacccgggtttatcagccacgctatcgtcgtgactgtctcggcgaactggttcagatcgatgtctctcatcatgactggttcgaaggccggaccccaaaatgctgtcttctggtcttcatggatgatgccaccggtcgcctgaagcacctgcgattctgtgattcagaaaacgcggtcgactacatgatggctacccgtcaatag

SEQ ID NO: 241861 - DNA, 228 bp, Klebsiella pneumoniae
atgttctacgaatgcgccatttcaccagaggctttgtttgagatcgcaattgatcggagaaattatcgtgacttcatcaaaggattttctacgggcggtaactttctgtatagcgaattaccaaagctgaagagaaataaaaaacaattgctagagttattaaatgctaatcatagtgaacttcaaaaaaaacgattagaggatcttattgttttttttaaaaaataa

SEQ ID NO: 241862 - DNA, 1623 bp, Klebsiella pneumoniae
atgaaattaactaaacttgtacttgaaaatttcagatctgttagagaggtgcaggaaattgactttgcacctgtaacattgctattggggccaaacagcgctggcaagactactattttaattgcattattttatcttcaacaaatattagaccgtgagcaatgtgaccctatatatttagaagctatggggaacagacgcatagatggatttagatctctagtccataatggggatctgaataatgtaattactattggtatcggtttcgatcctgaacaaacaataggtgtagaatataaaacatatttagaagaacttagtgatattttcgatattcattttataaaaatgagagacattgcggatgaaactgaaaaagtttatgtagagtttaaaatcgcatggtcacaattgcacaaaacagcatatataaagaactatgctgtttctataaataatgaatttattggagagctaagtaatgatgagtatactaaatcatctttagtaaatagattgaactttacgcatccgttgcttcttcctattgattataatttatggcttgaatctattgataaggaaggattagatacgattgtcagtgaatttgaaatgtctttaaatgacttaattcctggcttagatcgtaataaaactggtgcaacagagcaagtaaaaactgttgattatatatttgaagaagataaagaaaaaacaatgcttcctgtttttttaaagacgaaaattggtgcattacctcaactgggaagaactgttgatacaaatttgaaagtttttgatatatccgagtcagttgagtattttaatcgagacataatcaccagagtgctaacgcaagtttttacttctccgttagataaattaaatgattatttaaagactagcgtatcaattggaccgttaagaattatacctgattcttcatttacgccaaatccttatccagaacaaaatggatggtttgatggtacatcagcatgggacaagctgtgtttatctcaacataatgatagtgatttgattaaaaaagtaagtgattggttttccaatagagataaactaaacactaattataatatatttagtggaggagaatttgatataaaaacctcccctcaactcttaggtctgaaagataatgtttacttccgtaaaatagattcaagccaaatgttatttccaaatcaagtcggtgtcggattaactcagatcgcacctcttattattgcagccaatatagttcaggatggattaattgctatagagcagcctgagctacatattcatcccgctttacaactcgctgtaggtgatctgtttacccaataccctcctgatgttaaaagagctatgtttttagtcgaaacacatagtgagcacattttgcttcgaattttaaaaagaattagacaaacaacggacaatgaattacctgaatcaaattacccagtaaaacctgattttatatctgtaatcgttctcgaggataataatggttcgactgttattaggaaaatagatattactgatgatggtgactttaaacaaaaatggcccaaaggtttcttcgaagaaagaaggggagagcttttttaa

SEQ ID NO: 241863 - DNA, 1158 bp, Klebsiella pneumoniae
atgggaaaagttaccgatattgccgaaattatatccggatttgcttttaaaagtgaatggttcggtgctggtgatgcgaaagttattcgaatcggcgatctaaagaacggtcgaattgatcttagtgaggctatggcctttgatgaaaaaattcataaagttcgcgcacagtatagagttaaaagtggtgatattttaatggctttatctggagctactgttgggaaaatcgcagttgctgatttagaggctgaaggggcgtatctaaaccaacgagtagccgttattcgaggaaaatgctatgaaaataccgagtatttgaaatacatctttactgggagtcgacttcaaaaactactcttaaatgcaggtggcgccgcacaacctaaccttagcccaaaagatttggctgagatggaaattccccttcctcctctaactgaacaaaaacgcatcgcaaccattcttaataaggcaggaaatatatgccaaaaacgcgagcaagccatcaaactagcggatggttttttgcgggctaagtttttagagatgtttgggactcctgtaaacaacatacatcgtttcccgaaaggaaagattcgcgacttggttgattcagtaaattatggaacttcagcaaaagcttctattgattctggcgaatatcctatattgcggatgggtaatataacgtatcagggtgggtgggattttaaagatttaaaatatattgatctcagcgtaaaagaaaaggataagtttttggttaaagaaggcgatctccttttcaatcgtactaacagtaaggaacttgttggtaaaacagctgtgtatgaagaagagcggccgatggcatttgctggttatttaatccgtgttagacctaatcctatcggaaataactactatatttcagggtatcttaattccacccatggtaagatcacattgatgaatatgtgtaaaagcattgttggcatggctaatatcaatgcacaggaattgcagaatatagagatattaatcccacctaagcatctacaagatgagtatgagattatttataaaaaagtaaaaaaaggactaagcatttatgataaaagcgcgatgcaacttcaacttttagcatcaaacctatcgaataaatatttcatgtaa

SEQ ID NO: 241864 - DNA, 339 bp, Klebsiella pneumoniae
atggacgagcaatggggttacgtcggggccaaatcacgtcagcgctggctgttttacgcgtatgacaggatacgcagggcggtggtagcccacgttttcggtgaacgcactatggccacactggagcgtcttctgaacctgctgtcagtttttgacgtggtggtatggatgacggacggctggccgctgtatgagtcacgtctgaaggaaaagctgcacgtcatcagtaagcgttacacgcagcgaattgagcgacacaacctgaatctgagacagcatctggcaaggctgggcaggaagtccctgtcgttctcaaaatcagtggaactgcatgactaa

SEQ ID NO: 241865 - DNA, 1566 bp, Klebsiella pneumoniae
atgctgtcactgtctgttggcggtgtcctgatgacgtccattctgctgctgagcgctctcactctggttcagaaagaaaatattgagaatagcctgctggaaggtaacatcgcttatgcccgcaaactggctgacacaacggaccgttatctcagtacagcccagcaggaactggcctacagtgcaggtctgattgttgattttcaagatcggaaacaactgcaggcagaagccgatcgcctgcgtctgcagtcgggtttttttaactccgttctggtcgtcaaagcgaatgcggtggtggctgccacgtctccggagagtctgagtctggtcgggatgcagttgcattctcctgccagccagcagtcaatcatttctcgcaagcccctcatatcacagcctttcacctcagcgacgggcaactacattgtttttctttcccagcccattttttcgcagcagggtcagtatgagggctatattggcggaagtatttatcttaaaaagcatagtatcctcagtgagatccttgggcagcatttttacggtaatcaggcagaagtaagtattgttgctgctgacggccgcctgatttacagccatgccccgagcgccgtcgggcgactgcttgatgtccatcaggcacatctaacattactgtcaaaagcgaagagcggccattttgtcgatcatcatgccggtaaggctcatctcatcggttttgctagtctacagcaagctgactggaaggttttcattgcaggaacgtcggacaatgtatctcgcattcttaaggaaaccatgatcagcgccttctggatcaccctcgccattatcatcctggctaactgcgcggttatatatttctctgccagaatatcccgcccgcttgagagactggccagctttacccgcacggccgacagcgaaacagcgctacggcagctggcgcagcttgaacccggctatcaggaagcagagcgtcttagggaggctgtaagccagcacctggcgtcaatgaccatgcaggttagccttctgactaatgaggcgatgaccgatccacttacaggtctgctgaacagaaaaggcttcactacacagattaaggcgctcaatccgcttggaaatcattctgttatcgcaatcgatattgatcatttcaaacatatcaatgatcattatggtcacgacgtgggagatgccgtattgatcagcctcggccagatactgagattgctgactcgccagaatgacattgtctgccgttttggcggagaggagttcattattttactacctgactccaacctgaacgaaacacgtgtagtggcagaacggatccgtaccgtcacagcggaaacctcgtttgcggaaggcatccacttaactctctccgctggcatcgccacactatctgactgctctgcagatttcagacagctgcttcgtcaggccgatttagccatgtataaagccaaaaattctggacggaaccgggtttgtacttacgattcgggtaactatcaacaacccgagtgcccatccaaaaatgatacgcgctga

SEQ ID NO: 241866 - DNA, 276 bp, Klebsiella pneumoniae
atggacgcactggccaccggtcgcaggatcaagtgcctgacctgtgtggacgacttcacgaaggtgtgtctgacaattaccatcgcattcgggatttcaggcgttcaggtcacgcgtattctggacagcattgcactgttccgaggctatccggcgacaataagaactgaccaggggccggagttcacttgccgcgcactggatcaatgggcttttgagcatggtgttgagttgcgcttaatccgtaagcgtccagcgagggccgtctggtcataa

SEQ ID NO: 241867 - DNA, 810 bp, Klebsiella pneumoniae
atgaatatttatcattatacagatttgaatggcttgaaagggatattatctagtaatgccttctgggcgacaaacttttacttcatgaatgatgctcatgaacttcagcatggggttaaatgcattgagaatgcattgggttatttggggggtgatttatcggaaatgaggattgattttataaaagaatctttaaaaaaatacaatcctggggacaagtttggttactataatatttctttttgcaaaaatccagacttgctaagtcaatggcgaggttatgggctaaaacagggtgtttgtttggagtttgacagggatgagttattaaactgtttagattttaaaaacagagaatcttcatccggaaatgtcatttatactgatcctgataaaacacttaaaacaaaaaaagagattattaatttctttgaaaagaggatgccatttaaaaatagggaacacgatggattcgcagagttaaccaatgtccattatttcctagattcagtaactccatttttcaaacatgatactttcaaggaagaaaaagaatataggatagttattaaggtggctgaatcttctgaggatattcaatttagagtaaatgagcacggtttgataccatatattgcagttggtgtaaataataagaatccctctaacggaatactgccactgaaaagcataaaaataggcccatgtaaaaatgtagagttggttgagaaagggattctattattgttgcgtagttgtaaatattataatgttaatatctctaaaacaaaatctccttttagagggtga

SEQ ID NO: 241868 - DNA, 618 bp, Klebsiella pneumoniae
atgacaacgaaattaattaacctgccgcacctggcagatatggtctttggcgtgccgcattacgtgacgcggcaaacaatggactccgtgaaagcggtgctcatcccccgtattcaggggatcaccgaagatgccgccattcagatggcgctgaatccgggtaaatcacctgcagctgagcaggtccagcccaccggcggggtggcggtgatccccgttcacggcattcttgtcccacgccgggggcagattacggcgatgtgctccgagctgaccagctacgagcggatccgcgggcagttgcaggcggcgttaaacgacccctcaattagcgaaatcgttctggatattaactccggcggcggcgcagcggtggggtgcaaggagctggccgattacatttatcagtctcgcgacacgaaacccatcacggcgattgtgaactacagcgcgtattccgccgcgtatttcatcgcatcggcctgcagcaaaatcatcgtcagccagaccagtggcgtggggtcgattggtgtgatcatggagcacctcgatacgtcgaagatggaagaaaaaatggggctgacgggtaatccccccgaaaaaccagtgcatgcataa

SEQ ID NO: 241869 - DNA, 312 bp, Klebsiella pneumoniae
atggatgcacttgccagcggccgccggattaagtgcctgacttgtgtggatgatttcacgaaggagtgtctgacgatcaccgctgctttcggtatttcaggtgttcaggtcacgcgtattctggacagcatcgcgctctttcgtggctatccggcgacaataagaaccgatcagggcccggaatttacctgccgcgtgctcgatcaatgggcctttgagcatggtgtggagttgcgacttatccagcaggtaagccaacgcagaacggatttattgagagtttcaacggtcgctttcgggatgaatgcctga

SEQ ID NO: 241870 - DNA, 192 bp, Klebsiella pneumoniae
atgacgaaacaacagaaaacagcgctgaacatggctaaattcatccagcatcagtctctgctcctgctggagaagcttaacgagcttgatctcgatgttgaggccgacctttgtgagaaactccacgatgatgcggagcatcttttccgtacactgtcctcgagactggatgaattacaggatggtaattga

SEQ ID NO: 241871 - DNA, 2430 bp, Klebsiella pneumoniae
atggaggtttatgcgcttggaataaatggtgagcaatcattcctcctgcttcaaaccggcgcagaatttgtgcgcgaaatgaatctcaacatgcagttagtcgaacccattagggcaaactaccaattcgaatggttggcaaaaaaagtaccgaaaagggaaagggccagactggagacagcaggacagattgggcgtgctattagtcgtccgtctcggtcacaaatgggcgggtatgcggatgatccatgggttccactcaactggctcatccagaacagagtcaaacagttatgccccaagaaatccgacggacggttctttcctactctcaacgacagcagcggtatgagccgtctcgagttgatagactggctcaaaggcattttcgaacggcaccacgacgcgaaaattgcttggatcgacccatttatggaggatgtagggattgagcttctcaaccgactgggcactgctactgctgattaccttgtcatcacgacggaaaaaatgtcgaatgatgacagcataaaagaggccgatgagcccaaccgtgttgaaaatcttctagcgagatgttcaggttggaataatggctactttggaagtgtttgcctcaaaatactctcagtaccagataaaaaactccacgaccgcatgatcctcattcgctcagccaatggtcagccgttagctgggtaccatctttccaattcagttcagagggccagcgagaaacatcctctattggtaacccctattcctctggacgtgattccgcaagtatttgagtacgttgatcagattatccaaagtacactctatggagagggtaatccccaccttcctgcaagaataattttcaattctgccgatattagcccatgtgaggaggagaagcctaaaggactaaatcacaattcctcatttgctgagctaccatgcgctggtagcgtgctagcttggtggcttgatgatgagcagctttcaaacttgtcaggagctgtactcatggagcagatgagtgctaaaggatatattaaggatgggaaacttgacggagatcgctttgacgctcttcccgccaaattctggactgaagggttgccaatagcagatttccactcagcttgggatgcccttggttatgtcatagccaactccccggctagtcgctatgcaggtagcctctacaacaaggagcaatcagtattatccgaacttgtgaaggttgcactgttggagcacatctctccctccagagcaaaagcactgcaaccacgtctcacaaaaaaacaacttgacattgaacactactgttcacagggacttacagcactactgctttcaaaaaatgatccgttcagtacattcacatattcacccgtagatacctcatggagcgattactactccatacaactcctatggtcgcaagctccaaagcagttggtatcttggttaaacacaatattctctgaaccaatcaagtctcctcgtactcacgcgcttgtggttgaagcccttaagcatatttgtttgtgcgtcagctttgacaagcatcatgagcaaattgatgcgcttttgcagagcaatgtgagtgtaataatctggatagggcttcatgctcttgaaaacgcccttaacaggggagtctggggaattgaagccctttcaaaaatcgaccatatcgaatcagccactgttcgacgtatcattttgtgctggctgatcaacgaagccaactaccttaattcggagattaaaccacaactcatcgcttgtttaatccaatcgttaaaggctcctctcgcggacgatgagctcaaggatattcttcaacctgttcggggacgcctcggcaggctacaccatttcacgccctggattcttgaatccatgctcgtacccatgctggaaaaaagaacaatcgatatcactcaagttgcccatcagtggttgacagagctgactacccaatggcgtacagcactcaagaatgagagtctctattttactctagatgcggacggtgcattcaccgatgagctggctattgcgaccaaatacctagtctcagcagatcgagtggagattgtcagagaacttaggaatgtctttgatgcactggctcggaccatcaggcggccgatgagcgcgcagataagctgtaaatcctacaacaatgcgcaccaagtaaacctctggctctatgcgctcgctcgtaggattaaaacattggtgcctgatgagttaccactgttgaatgaacttctgcttgaaagcgaagaaattattgaacgaatcagcccctcaacttggcgctggagttcaagcaaagacctgctcacttatgtaaatggcgatcccgaacagattgggtcacatggtcttcatcaaattattcagagagcaatcgagccacggtga

SEQ ID NO: 241872 - DNA, 669 bp, Klebsiella pneumoniae
atgcatccacccagcccgacagcagtgaacggctcagttccacgccctggcgaccgtatatttcagactgacgatacagcggtgtgtgctctgcatactttgaggtcagcacgcgggccatcagccccggtccggcgataccccgctcaatggggcgcgaaggcgcgggggcctgcacgatggcatcacattttgtgcaggcatgtttttcccgtacggtccggatcacccggaaggcgctgcgcatcagctccagctgttcagcggcatcctcacccaggtaactcagcgcaccaccacactccgggcagcaggaacccgctggccgcaggcgtttttcatcgcgggggagtgattcggggaacggtttgcgggtgcgggtctgacgcagagtgcgctgtactgccgggtcatccacccgaccggtcagcgtatcgctctctttctgaagccggttcagatcggcttccatttgtgcgatacggcgggagactttttcggaacggctgccgaagttcatccggcgaagtttatccagctgcgcctgcagatggtctatttcgcgctcccggtctgccagcttttccagcagggcacggttcagcgcttcctgtttggcaaggcgctgtttcagcagaaggatatcgtcagaagagatgtcattcataa

SEQ ID NO: 241873 - DNA, 951 bp, Klebsiella pneumoniae
atgccttcaccattcctatttacaagatttacattagaatctacaaataatgaaataagcgcaatagttagcgatgtaaaacatcaagctcatatcttctttattgggaataataccagcgacatttatagaatggaacacgagacacacaaaccgattggatatataattgcaaaaaaatgcaatcatgaatttaatttatgcgcaacatctggcatgtattctcacagttttttcgacatacctaaaataataattgtattattatcgcttctgtcattgactttagggatattaatatatgtaagcataaatctcttcttatctaagaaagatactattttgtttcgtctcaaccaagcattaagaactgataaattaagtatagtctatcaacctattctatccatcaaagaaaataaagtaataggtgtggaggcgttattaagatggtatgatactgaatacgggcaagtatctcccgatgtttttatttctattgctgaaaaacatggaattataaggcacgttacaaaatttgtaatgcttaaatcaatactggaaacgcacgaattaataaacacgtataaaattgacttgagcattaatattaattcgaacgatctgttttctgcgttatttaaagaagatctagtaaaagccaccaatttatataaaattagccctagcaccattactcttgaactaacagagagacagtcggcaaatatatctttaattaaggagcatttggtgaacttaagatctctaggatacaaaatagcccttgacgattttggtactgggcattccaatttagactggttgtctaacctagaagttgataaaatcaaaattgacaggttcataacaaactcaattggcaaaaactcaattaactctcgtattctgaatcgccacgggtttaacagacacctccgagtcatttaa

SEQ ID NO: 241874 - DNA, 831 bp, Klebsiella pneumoniae; identical to SEQ ID NO: 94216

SEQ ID NO: 241875 - DNA, 642 bp, Klebsiella pneumoniae
atgttaaaaagaacctttaatgggctgaaggagtttgattcttttttttccattagcgaacgtctgtatatcacattaaatgcaatactagtattgtttggggcatcaggtgtttcagcaatcatagcatggtttgacccaaagaaagactggtcaattttgactctttttattctattcatcgcaacggcaacctcagtatttgcaatgatatatctatataaaacagctcagctaaacacatccaaaaaaacatactatgactatatgggggcaacacgcaatacaataaatccattatcagaaaattttactgatgaagtaataaatttagatcaattgagattacccgcacttgaaccacaaatcaataaaacttttagacgatgcaaattaattggtccattggttctaactatagttgatagcgaaatagctcattgcgtgttttatgagtgcggtgatatgttttccgtttctaaagactgtggcatccttcatttaaatggaaccttagtgtttaaaaactgcaagttcattgactgcaaatttgtttatgcgtctctgatactatctgaagactcagcatctcaatttaaaaccatgatgagatcaacaaaaatactttatgtaaccgaatga

SEQ ID NO: 241876 - DNA, 204 bp, Klebsiella pneumoniae
atggctactaaaaaatttattgaactggaggtcggggacgtcatcgtccccgttccgggaatggaaatcactgtaactgaagcaccagtgccaaccaaaacagatgatggtgaaaattacacattgaaaggtgtacgtgaggggaaagtgataggtgtgtctgcattttatcattcatttataaaagttatataccaaaaataa

SEQ ID NO: 241877 - DNA, 423 bp, Klebsiella pneumoniae
atgatgcatagcaataaaaaatccaacaaatacataatgataataatttgtattaccttctcactttctatgttctacctatccacaaatgctgtagtttatacactcaacaaaaaagaggttgaagatttttcagaatccattctgaatagaagtattctattaatgaaacaaataaattttgcaataagtaaaagcaacaacataaatgaatccgcgacttgctcaaaagaatacataaataaattgcgtgagattctttggcctcagagatttattaaagacattggctatataaataaagatatgctcttatgtacggccttgtggggtgatgacgtaccaccagaaaagctcagcaacaattataagagtgtagagcatggtaaaggattatggtttcttggtgtgaactccaggtga

SEQ ID NO: 241878 - DNA, 660 bp, Klebsiella pneumoniae
atgccggatggcggctacgccttatccggcctacaggggcctctcacaggctcaaacctcgcaggcccgcgcaagcgcagcgccgccgggcaagatatcaggcacggtacctgtaatttcgccgggtggcggctacgccttgcccggcctacagggtcctctcacaggctcataccccgtaggcccgcgcaagcgcagcgccgccgggcaagatatcaggcacggtacctgtatcgccgggtggcggctgtcgccttgcccggcctacaggggcctctcacaggctcatacctcgcaggcccgcgcaagcgcagcgccgccgggcaagatatcaggcacggtacctgtaatttcgccgggtggcggctacgccttgcccggcctacagggtcctctcacaggctcataccccgtaggcccgcgcaagcgcagcgccgccgggcaagatatcaggcacggtacctgtatcgccgggtggcggctgtcgccttgcccggcctacaggggcctctcacaggctcatacctcgcaggcccgcgcaagcgcagcgccgccgggcaagatatcaggcacggttcctgtaatttcgccgggtggcggctacgccttacccggcctacagagtcctcttacaggctcatacctcgcaggcccgcgtaa

SEQ ID NO: 241879 - DNA, 705 bp, Klebsiella pneumoniae
atggacaaacttttttcctgccagcgctggctcatcatcagtccccatgccgatgatgctgagcttggactgggtggcagtatcgctcgggcaaccgaggctggtattgaggtccatattgccgtagtggtactcaaaggtgaaaaccacctgcgcggtcaatgctatgtttccgcatcgcagcgtcatcaggagcttgccgcagccatggagaccgcaggggcacagtactcagttctgaattttgtcagggaaggggaaaccttcgatcttgcttcatccagtctgtctgtgtgcataagccagctggataagctgatagatgagatacagcccgagctgataatgatgccggttccatcttttcatcaggaacaccagtgggtttaccaatgctgcgtggccgccacccgtccgacaaagcctggaaatccgctacggctgatagctgcttatgaatatccgccggcaggctggggaaattcctcttcctgggacggttcgcgcggtgcgatttatatcaacattagccgtcatctgtcggcaaaaatttccatgctggaacagcaccagtcgcagatgtccgcggctgataatgcactgatatcgattgacggggttaaaaggctggcttcattccgcggcctcgaggccggttatgactatgcagaaatgatttacctcatgcgtggccgtattgattag

SEQ ID NO: 241880 - DNA, 594 bp, Klebsiella pneumoniae
atgactggtaaaaagcgttttttcgatattattgttgcctccttctgccttttacttcttatgccagtaatgctggtcaccggactgattttgttcctgacaggaatgaaccccttattccgtcatcccagaataggacagaacggacaagtatttcattgcatcaaatttacatcaatgctgccaatggataaggtttccgaaaatgaacagctgcgtatccgtcatgagctgcagctttatagcgtggtaaaaaatgacccgcgcgtaacccgttttggtgcttttatccgtaaaaccagtattgatgagctaccgcagtttattaatgtacttttaggcgacatgtccgttatcggtccacggcccatcgccgcctacgaaaaagataagtacggccgtagctatcgtcactattgttcggtaaagcccgggatctccggtctctggcaggtatcaggacgtgatgatctgccttatcagcgccgtgttgcaatagatcgctattacagccgtcgtcgtaaagcacgcatggacatcttcattttcgtgaagacctttagcgtggttgcgagcatgaagggggttaactga

SEQ ID NO: 241881 - DNA, 963 bp, Klebsiella pneumoniae
atgctactcaaaaaccgtaaatactgcaattccccttctcataatgaaaattctggcgctctgtctgtaaatagcgcggcgaagctgcgcgttcctcgtctatttacagacatctcaatcgagcgcacattgtctaacatagataaatctataaaaaacagtaacttggaatcgtcgacccctttaactaatacgcttactccgtcttccaaaaaaaccgcggccgcgctgaaaatgaacgtcgatttcatgatttcaaagcatgggattaatcgcattgtttttcttacccttactttttctgatcatattttgaacccttcggaggcgtctaggcgtagaaactcatttttcactaattttttaagggctgaggtactcgattacatttgcgttcttgagcctcaaaaatcaggccgctgccattatcatttagttgccgctgttccttatgatgttagaactggcgtggatattggtgctgtttttcctccgaaagaatctgggaagaggccggactattcgacaattccgtctgagcttaaatccttttggaggcgtattaggtctgctgcgccgttgcatggttttggtaggtgtgaggcgcttcccattcgtaagactgctgaggctgttgcctattatgtcggaaagtatatttctaaggtcgtagaaaaccgcccagcgcgttttaagtttgcaaggcttgttacttatagcttcggcgcaagaatggctactacgcgctttcagttcgtttgtgaggggtcttttatgtggcggcgtaagatgggcatttttgcgagaatggtcgcgcttagcttttatcagcctcttgagggtttgaatatcgctcagcatcttggtgttgattggaaatggaagtatagggctgatattttcgatatagacatagatattggtgaagaggttattgaagcggagctttctgcccccttctga

SEQ ID NO: 241882 - DNA, 2172 bp, Klebsiella pneumoniae
atgacatcagtattaggtaataaatcaagaaattcagagtctgatgaaattgaaatgggttacctgcttggtgaactcattgatcacagaaaattgataattgcgataactgccggcttttcagtattagcgttaatttatacgatccttgcaacaccaacttatcaggcagacgcgctaattcaggtagagcaaaaacagggtaatgctattttaaatagcttgagtcaaatgctaccggatagtcaacctcagtcagctcctgaaatagcattattacagtcaagaatgattcttggaaaaactgtcgatgatttgaatttacaagttcaagttgaaaaaaaatattttcctatgattggccaaggaatgtctaggttaatagataataaaatggaaaatattggtattggaaacctttatctttcggagcgttattctaatactattcaagagtatatccttactgttgaggatagtactcactttaggttcgaaaatgaaagttttagtcttaaaggtgtagttggaaaaactatcgagaattccgaggtgtctataagagttaatcatattgacgctgaaccgggtactcgttttatcgtaagatacttaccccgtttaaaggcaattaacgagcttcagaaagtttttacagttacggatcaaggtaaagacactgggatgttaaatttaacattaacaggagatgatgcacaaaaaatatccactgtattggacagtatcaccaaaaattatttagctcaaaatatagctaggcaagcagcacaggatgctaagagccttgattttcttaatcagcaattaccaaaagttcgccgtgatttggacgaagcagaaaataagttaaatttatatcgcaagcaaaaagattcagtagaccttactttagaagcaaagtctgtattagatcaaattgttaacgttgataaccaattaaatgagttaacttttagagaggcagaagtttctcagctttatacaaaagagcacccaacatataaagcactgatggagaaacgaagaactctacaggatgaaaaagttaaattaaataaaaaagttagcgctatgcctgcaacgcaacaagaagtattgcgtttgagtagagatgtagaatctggcagagctgtatatttgcaactattgaatcgtcagcaagagttggatattgcaaaatctagtgccattgggtatgtccgtattgtagataatgcagtgaccgagcctaagccaataaaacctaagagtattttaattattactggcggttttatatttggtttattcatggccgttggtttagtgttaattaaagcatttttccgacgaggtattgaatcaccagagcaattggaagctattgggatcaacgtctatgcaagtgtacctgtctctgattggcttgcgaaaaatatagctaaaaacagccggaagaaaaatgagtcagatagattgcttgcattagagaatcctacagatttagctgtggaagcaattcgcggattaagaacaagccttcattttgcaatgatggaggcaaaaaataatatactcatgatttcaggtgctagtcctagcgcggggaagactttcataagtagtaatcttgcagctacgatcgcgtcaacaaataaaaaagtattatttattgatgctgatatgcgtaaaggatatgcccataaaatatttggtcaccagctgaatgttggactgtcagaagtattatcaggaatagatttagtacaaaatgtagtcaaagaggtcatggatggacattttgattatatcgggagagggcaggttccaccaaatcctgctgaattgctgatgcacccgcgttttgagcaaatgctcaattgggcatcaaaaaattatgatttagtgattattgacacacctccaatactggcagttacagatgcctcaatcattggaatgtatgcagggaccacactccttgtagctcgctacgaaataaatacaaccaaggaaattgaagtaagtgtgaagcgttttgagcaaggtggtataaacgttaaaggatgtattcttaacggcgtagtgaaaaaagcaagcagttactatggttatggttatagccattatggctattcctattcagagtcagaatctaaaaaaaacagctag

SEQ ID NO: 241883 - DNA, 405 bp, Klebsiella pneumoniae; identical to SEQ ID NO: 229031

SEQ ID NO: 241884 - DNA, 309 bp, Klebsiella pneumoniae
atggacagccaggaactgaaacatgtgatagcccttctgcttgaagactcaaagcgcctgcaggagttagagccaaatgcaggtacagaggcccgtattttgttagcaaaacaggcattaatgacttgcggggcgcaaggccctgaacgaatcgatttcatgaatttcatggctaacacgatcacccccctgccatgcaatggagagagggtgagccgtgtttatcacgacacgatggttaaggctttaagaatcgagcttaaaaggcttaggagtcagatcgcggtaaacgaaatcgttgccaactaa

SEQ ID NO: 241885 - DNA, 690 bp, Klebsiella pneumoniae
gtgtggttcgcctacagccccgacagaaaaggcatccatccgcagacccatcttgcggggttcagcggtgtgctacaggcggatgcgtacgccgggttcaacgagctgtaccgcgatggccggataacggaagccgcctgctgggctcacgcccgccgtaaaatctacgatgtgcacgttcgcacgccgtcagccctgacggaggaagccctgaagcgtatcggcgaactgtatgccgtggaggcggaaataagaggaatgctggcggaacaacggcttgctgaacgtcagcggaaaacgaaaccgctgcttagtaccctggaaagctggttgcgtgaaaaaatgaaaactctgtcgcgacactcggagctggcaaaggcgttcacgtacaccctgaaccagtggccggccctgacgtactatgcagaaaacggctgggccgaagccgataataacatcgctgaaaatgcgctgcggatggtcagtctgggtcgtaaaaactggttgttcttcggctcagaccacggtggtgagcggggagcgttgctgtacagtctgatcgggacgtgcaaactgaacggcgtggatccagaaagctaccttcgccatgtccttgacgtcatagctgactggccggtcaaccgggtcagcgagctgctaccctggcgcatcacactgccaactgaataa

SEQ ID NO: 241886 - DNA, 393 bp, Klebsiella pneumoniae
atgtgccgatgtatattcaatcgtccagatattatccatttactgttcaacactaactctttgtctcttctgtcatgtttaactgggctcgtaagcaatgatgctttcccctcattgggggaaaaggctactgccggacgcttcaacctgaatgcgctacacaaagcgagtggggcagagaaaaagaaaggtccgagttactggctggccctcgagggaactaagcaactgatttctgagcttgaaaggcaaactaccgagatctcggtagttactaaggaaggtaagaacggcggcacgttcgcccatgaactgctggctatcgaatacgccggatggatctcatcgagattgagcataagcatatctatgctaaaacgccgttggtattag

SEQ ID NO: 241887 - DNA, 1356 bp, Klebsiella pneumoniae
atgactatcaaatccaatgccactcaggttctggaacaacttattctcgtttctctttctgatatcaccagtattagtggtcgtcgtaagctgaaaagagaagatcttggtaacagtgctgatttgccacctgatgtgctcgtttcattaggcagcaagaaaatcattgacccacaactcatcaatccatttacccgcaaaaagaattcagctcacgctttttgtctcgaagcgggtattaaatttatgggcggctatgcaattccagccgacaaggttaatgatttaattggtaaactgaatgtacttaagggcgagttttacgattacaaaaaggaatttatgaaagctgattttaatagctggattaactcttttgaagaaaagtatcgctctatacttttgcgtgatgctgctatcgatttgtcttatatggatagccagatacaatttggctttactgcgattcacatcactccttatggcaacagtgtcattcaggatggtttaactgggcaagttaaaagtttagcggatgaagtttatgaggatgtggctgatgttgtggaaggattccttaaaaacaggaaccctgatgcgttttctcagcacacactaaatcctttacgccgctgcggcgataaactcgcgtccctggctttcatcgcacccagcgtccagtctcttagcgactatgttaatcaggtaatgaaagacattccgctaaccggtaaagtgacgggcaaaccttataacgacattctctctctcctcaataacttacgcgacccaattcatgcaaaacagtttgtggaactgctgtcatccgccagtactacagatggtaacgatgcaattgacccatcactttcaatgaaccttattgaagatgatgatgccattactttagcggccatgtcggcaactcaggttcaggcggaaacgatacctcctctgcatacagatgcatttgcatctgctgtggtagtggaagatccggtcggattgcaaaacgttgattcactcgctgaagccccatctgtactggtagaggtcaatggttctgctgatacgcctttggcaatcgaactggttaatacgtcggctgatactgacgttaacgacttgtccgatacccaggagcatgtaattgttaatgatgctgtaattcctgcgtttgatgcggttatggtcgatgatgattcatttttggacggtgattctgttgcaccccgttctctgccagaccctgctcttatttcgggtttggattctgaaaaagtcattgatggaaaagagccggaaattgaaacttcgtcttcacacgatgatgacggaacaataatggtgttttaa

SEQ ID NO: 241888 - DNA, 1914 bp, Klebsiella pneumoniae
atgggtatttataattcccttcctattgtcgcacgtgcattaagctctcagattggccttaatgtttctgtcggcggcaatgaagcatatgctacggagactggagctggttttcttattaacattccattcttcaaagacgctgaaatgttggcaaatcctttgttagggtatgccgtacatgaagcagcacatatccgtttcactgattttggtgatctcaagatattcatgcaagagcatatgaagtcggataaatacaacgttgaggtacttaaacatctggtcaacctttgcgaagatttgcgcattgaacgtgcgatgagttgtcgctatccaggtacattaaagtatctcaattcactgaatcattttttgttcagtgaggaagcggaatcctgtgataaagcttcttcggtgtttttggataccctgcttacttgtggtttgaaccgcttcaacggtttaactattccaacaaagcaagcgcgtgaggactttgaacgtatcttcgggctggagctgtatgacaaagctatgatggttatggctgaagcagtacaagcaacctcgattaaaaaggtgtttgaagttgcatgtcggttatatgacctcgcagtagatgcatttaacgaaactaatgagcaggaagaacctccgcaggatgataatcagggtgctgattctgatgacagcaaaggtgatgacagttcgtcagacccggcccagtcatccgacagttctgacaaaaatggggatggccagaatgatagtgcaggcggtaatgacggttcatcgtcatcgccagccggtcagaatgagccttcttcagaacctgatggtaatgccggtggcgcaccagataaagaacatgggcaaaacgataccgatgatgaaaacgaaaattcttcgtcaacatcagctaatcgtaatgctcctgcttccaactcgagtgacagcaacgccgctgcttcccatccgggcgtaaatgctcagggtgaatcttctgtcggtaacctgtcccagaacggaaaagaccctttcgagggaaccacatcgaatgatcttggccgtacaggacagaacacttcagataagctcaatcagctaatcaaagacaaagtacccccgcatcaacgtatcgtttcacctactccatattcagtagcacctgcgaagcggcacgataccggtaatgcatccgtaagtttaggggtgcagatggctaccgggttacgtcaatcacttcatgggttgttgcagggtgtaagagcggtgagaagaacacatcgtgaaactggtcgtaagcttgattctcgactggttaccagtgccatgctgggaaatacgcgtctttttaaacataagtccaaggcagtagatgtcagttctgcttttactatcctgctggactctagcgggtcaatgagccggtcggttaaagaggctgaagccgctgttgtatcaatgttgtatgcgctcgatggtattcagggggtaactacctcggcatatcatttcccacacgccgcgcataatagcgtaggtctgttaaaaggacgggagcaaactctacggacagctattggaactcatcagtttggaattggtacgcaaggttgtactcctctttgcgaatcgttatggcctgcacttgcagacctgacgtcagctaaagcggatcgccatgtattggttattgcaactgatggccagcctgatgatatggcttctgcgcgagcgatgatacaaagcgctaaagatgatgacatcatcgttattggtatcggtttcggtgatgccaatgacagcatgatgaaaagtctttttggtgataccggtatttctgtcggttctgtttctgccttacgtaacaaactctttgaagtaacccgtaaagctctcctgtcttaa

SEQ ID NO: 241889 - DNA, 501 bp, Klebsiella pneumoniae
atgtctgcaaccgcaaaatttaaagtggttcacgaaaatcaactctcattcatgagtattttcgatgccactgaaagtgaatatgatctgatatcagccgattcagaacataattatgaacttcgtttttcatcaaagatggcttacgagataattcgggatagcatatatatcatgactgcataccgtagtactggcgagcagcgtgtggatgaaatcctctggatttgttcggaagaaaatcaggaagacctttgttcatttacgagttgctgcaaaatagcaggtcttgacccattcgaaacccgaatggaaatcctgcacgagtggtctggtgaattggctaagcaagcaagtctgattgcgcgtcatcactttactgctcccactaatatggaacatgttgcatcccaacgtattggatacgaaaagtacagaaaagcgttttatcacacttatcctaaagaggctgcaaagccgattagggataagcctctgtaa

SEQ ID NO: 241890 - DNA, 309 bp, Klebsiella pneumoniae
atgaatattttaaagcatgatttcgacagttcctctgaacagcgacaagcgggttttttgcttaatcagttggaggatctaatagggtttattgccacgaatgagttcagggttacttcaatcaatcagttcattgaggttgaggcatctgagctcatggttattagcctgtggcatccaatgtgtcccgatatcactgaggttcatttcttacgtgatatggataaaaagtggtggccctacaagatatatgaactcatgtctgatataacgacccaaactcaatttattcctcttgtaaatcaataa

SEQ ID NO: 241891 - DNA, 222 bp, Klebsiella pneumoniae
atggatatcccatgcattttgtttacatcaaatagtcggcattatgtaatcactgaagactcagttatcgctgcctggccatcacgttctgataaagaaagtgagacccttcagcttaatgacggtcggattattacggcgaaaaatgttcggcgatttaatttcatcgatattccaaaaattgaaagcctgacggcgattgatgatggaattgtcttttaa

SEQ ID NO: 241892 - DNA, 261 bp, Klebsiella pneumoniae
atgagtggctgcgcgttgatagagtataacaaccgcaccgccagaatacgcggtgaggttgcaccaggcgataagcattatgttcagtatgctctcgctcactgggctgtcattgcaatcaggattcgcaatacagaccatcaatttacccgaataccggttgatgagtggattgaagggattgcaaaacaagtaaatccttctgaggctcgcgagcagatttttaatgctctattacggtgtaagccgggtatcttctaa

SEQ ID NO: 241893 - DNA, 390 bp, Klebsiella pneumoniae
atgttttattctgaaaccggggatgtctatggttttgtctcaggcggtatgtcattgcaaactcattcgattgaaagagatttgcaggacttaagattactactcgccgatatggaaaccattaatattctgaacgaacgagggataggaactcacaaaaccatctttcatgtaacacaaaatgagtcgaaggcatcaatgctggttactcgtttaacttactgccaaggtggtggacgatttactcaccctgaatgtgctcttcttgttgaacagataactgatctcggacgcaagttgggtaataaacatttcgatacggcgatgaatgaagcaaaacgctttatagcgaatgaggctgacttcatgaaagaacaaactgtctggtag

SEQ ID NO: 241894 - DNA, 522 bp, Klebsiella pneumoniae
atgtatacttcaactactgctaaatcagatcatattgatagctttaataacgcacaaaaccgtatgttgatgaattacgaacgtgatgagtttgaacaagctcccgctgccgtactttatgatgctgtcggtgctgtcgtaaacgatgaatctgatattgatataattctacgccttatggatatggaaggagaaatgttgtttctccgcgcaatgaaaaacctcggctgccaagagaatgttttttatttcgcatctgaatctggtgcggtgctgactgctaacgatgcaacgttgcttgaatttgcttataacttgggcaaacatatcagcaatgagttctttactcgtttcttgcgtaattctcagctagcccgtgaacttatcggtaacatcattcgtataggcaacgatgcccttaaatttccagatgacgacctgaatacagtatttgaatgctgtgtgattgaaaattcatcctggaaaaaccaacgtcatttcaaagataactttggtctttaa

SEQ ID NO: 241895 - DNA, 300 bp, Klebsiella pneumoniae
atgccagcacacaaaatccctgcggtattagttaacgacgaccctaagaacatagttactgatgagctgttgcgtaaatatggaacacgcatgactctcgatgaggcttgctccgaaattggcgttaagtcggatagtgtagccaaacgtatagggcaggtcagatatcggcattatgcattaactcgccagcttgaaagtgcaagggtctttagtggaaaaaatacctttttctggacggagtccatcgcaagaataatttccgagggtaattccgatgaaatatcaatttttaactaa

SEQ ID NO: 241896 - DNA, 1101 bp, Klebsiella pneumoniae
atgaaatatcaatttttaactaagagcattattcccctgctagtgggttttgcttttactacctctgttcttgcggatgagggtaataccataacgcctcaatcccctcagaccaccagtgacgacctcgctggtggtcaggcatttctgaatggtaaagaggaaggttggttctggcgtaaatcgccacctgagccagtgaagaaaaaaccagtgaagctacctcctccgccgactttaccgccacaagatacacccaaacaggttgctcaaacacctgtggaatcgactccagaacctgtcgcaacggaaaagcccggccccgctccgttcaccgtcgcttggttcaatgaaaacattcagaaactgcgcaaccaggccattgacaatcctactcaagaaaacgttagagcgtattttctggcccaacgcattatgctggataaagccagccgctttactgatatggctaggttggttacttctaccgacccgcttatagatgaaagcagccggagatctacgtctacattcggtgctatggatcaatctaatgctgccgcagataagtcttcattagtggtaaaagatatagccacaaaggctgggatcttcttctttttccgaggtgaagattgttctagttgctcaaaacaagcatctgtaatgaccgcttttaattacatgacaggtattaaaattatccctatctctattgatgggaaaccattacctgggaacatgatgcctgactggaaacgtgataccgggcaagcagctaaactccagatttctaatgttcctgctcttgctttggctattcctccgtcaacaactaaaattgtctccttcggccctattgcagctgaccagcttgtttcaagaaccattttaatcgctcatgattctggacttattacagaccagcagtataaaagtaccttgccatacaatgatacgggttatatcgattccaatattctgaaggaaatgcctaaagaatttaccgaaaaccctgatgagttcatcaagtacattcaagcaaaagccggatattcaaccgctgacgctcagaacggtacgtcccaggaggaaaaatga

SEQ ID NO: 241897 - DNA, 1440 bp, Klebsiella pneumoniae
atgattatttcacctcgtacaccaaaatgtggttttcgtaaatcattaatggccttatctatcgggttttctattttattttcagcaaacagtttcgccaccagcattaactctcagctagataatatgtttggttcaatgtccaatgtcactgcgccaggggattatcaaagtgtcacacgggatggttatacaggcggtggattcgttttaagaaacaaacttcgcacattaacacctgttacgattagcctaccaacagcagccggaggttgtggcggtattgatttattcggcggttcattctcattcatcaatgccgaacaatttgttcagatgctacgaaatattgcatccaatgcagccggtctcgctttccagttggcactaaatgcaatggatgccgtactcgataatgctatatcgaaaatgcaggcgatcatacaacaaatgaatgacttaacggcgaactcttgccagcttgccaaaggacttctggtcgataccgctgctgcattcggtgatggcgcaaaagctgctgtttcatcccagctgtcaactacaggtctatctgatcaatttggggcgatgtggggaaactttgctggtggcaaagctcctgaaattcagaagcagcaggctggcaaacgtaaaccatgcaatgattacggtaatatcatgtggtgtttgcttcagaatggtgattttaatgatcagttcaccggttctgaagatgaacaaaaagaacttattatgagcatgacaggcactattattgtgggaagcgaggttggtactgctgaggatggttccgcgaaacaaagcgttgttaatctggctccattggctacaggcaacgttctggactctttcattaatggtgacgatagttttgacttttggtcttgctcaggacaaacagccacttgtgagaatccaaaaaaacagacaaaagcccttaaaggtattgcagccaatataaccttattcttcattgataatggatatttaagcgccgcgaaagatggtattaatcctggtgatgccagattgcgccaggcaaactattacaacgttacaggagcgtcaagcaaagcaacgcaaatagccaggcatgatttaagcgcatcgtattcgtatgtccgtgagctatcaccaataattgcttattcagcggcttacaactatttaagcgacatgcttacagcagctgccactggtgctagatttatgcagcagaatgataaatccgcatccatttattataaagatgctgctgaattaattgagaaggcacggcaaaacctttacgtttcgtatagtgcgatgatcgcccgatacggtggggaagcccgtatacccgagtcattcaatagttatatgaaaacccttccccagactcattatgagtctgaagcctcttttaacggctcgctctaa

SEQ ID NO: 241898 - DNA, 3444 bp, Klebsiella pneumoniae
atgagtgaatggaacgtatataccgtaggtaacattgaatttatctacaatatttttaatgcggttgctatgttgtttaatgacggtacttacgcctcattattcaaaatagctgcgttaattggcgtcatcggagtggttatcgcagccgcaatcacggcaggtaaaacattatcacttgggcaaatgggtatcgctatagtgatgtattttatctttttcagtgtctcaatgcgcgtcaatatcgaggacgtaactactggccgtttcaaagccgtagacaacgtacctgctggccttgcagctgcggcttcccttatttcgacagttggatatgccactactgaaaaaatggaacaagccttctctgttccttcaatgacggaatacgggtcacttgatccccttttcactctcgccacactgtacgacaccatgaaatcgcccatgcgctggactggtgaaacagaaggttatggtgatctggatggtagcatttctaactatgttaagaattgtgtaggtaacgacataattcgtggttcaaaaacgtttgcttcaatgtaccgctccaatcaaggggtatccgggctagcttcaaatgactcatttcaacgcgtagttatctatgacaacgtccgtagtggttggtcgacagcaactgatgaatctgcaaaaggtggttccttatacacatgtgctgatgcttatacgaagctcaaaggcctggctactctgaactcagcggctctcgatgcatcttttgcccgttcctatgccgcagctgggcgcacgtgtggtggcgctacatgctcagggtctggaaaaactcaagaggttttaaatttcttcaatatcatgggaacggatatacgtgacttccaactcatgatggtcatgtatccgtcattcagagaaatgccgatgtatggccttgaaagttcctttcgtggtactgctgcggtcacacgtgcgcagacaatgacccagcaagcattccagtggtcatcttccggctcatcctttttaagctggatggggtcattcatgcccatttttcaggggattatttacgcccttgcccctttcatggccttccttttcggcctgggtattatggggatcaggttggtgatgaagtattttctcgtcatcttctggacgtggacatggttaccattggcagctgtagtaaacatgtatgtgttgaatagcatccgtgatgcatcaagccaaatacttgtcagttcgggttccggtggtcttagttttgcccagctataccagctgttattcgagactcaaaaaagcatcggcctggctggtaatttatatggaatgataccggcattaggtgggttcattgtatggggcagttccgtagcgtttaactcgctggccaattctgctgccgctccttcagcagctgataccaaaaccctatcgccggatgttacaaacgctccaccaatcaatacccgtggctctgaagccgaatttaacccaacgcaagggacgatcatgggtgggtcttctggcactctcccaaacattgatatgaaacaggtcgctactcacaacctgtccagtgctaagcaggaacttgatgcagcctctagctcgttgactgctcaatccggcgcaatgattagccaggtggccagcaacatgaactctggggggcattcgcaggtttacagtgatgcttcaaacgcagcatttgcaagcttgagcagctctgaccgcgcctatgttagttctgtagctaaagaacaaggaatttctgatatgcaggcgcttgtatcaatagccaaaagcgatgcgagcgtcggtgggggatttggaagcccaagcggtggtgtaggcgttaagggtggtatgtctcgttcagaggcagaaagcagtgggctgagtaatgacaacagcgctaagtacggttctacggacagtgccacatcgcataaagtcgacagcgctacccagtcacgcatcgtcaacacggcagcaagtgcgatgtaccagtccttatcgcaagaaggagaaagttctcagtcgactcgttcttttgctgaggcaaatcaaagaatgcagtccgcacaaaagaatttccaggaagcaaacttgtttgcttcaagtacctcaatgggccagacaatgaacgcagcgcaacttgctacggctattggtcgtaaccatgatgcacaagcaacattgactcaaaccctcgcggcgcaccctgaactatccagcaaaatcgccggtgatgcagcgagcctgacctctttaggtatgactcacgaagatgcacatacctttgcgcaattcaaagcagccagtgaacttggtttagcaggtgcagtagcagccaaagccgggttcattaacgctgactccagcccagcgttgaccacaaccgcatctgagcaataccgtggagtgagtggcggagctgaaagtgcaggtggccgggcagttgctggtgcagcggacgttagtaactcggtaaatgctgtaactggccgttcttacggtgcgttgggtgatgcacatgcttcatcgtcagatggttatgggcaaggccaggttaatactgtcggtggacagaatagcggtgcagttgatcaaattcataaaggaaatcaaggtgaagtcatgactaaagcgggtaacaccgccgcgaatgacttcgaaaacaaccactataatctcggcggtatcactggagactttaacaagctcgtttctcatgtcagcaatgcgttcaaggaaagcccggtttatgagcaggtgcataaccaggccaaatcaatcgccggagaaattccgttgggtggtgatgcaaaccgcgaagcagcgcgagattccattgtgaattactacgcgatgaccaaagctggagcgtctgagcaacaactttcccaggcccgcagtgacatgatggcacgtattcaactcgcgacaggtggggaaaataacaatggaaccgtttctggcgggaatacatcccttgcccgtggtattgctgcccgtattgataatgccggtttagaccgttcagcaaatgatggatccattattcagcaggctacaactgctttgaatacagatcgtcagacgcatgaatataacaccggaggtatggccaataaccttggaggaatgcatcaggcatctaatggaggttcttctgtaggcgatggtgttccctatgcgatgggaacccacaaccagggatatggcgaagctgaaactatgaccgttaatgcccacggtgctggtggccatagcgattcaaataacggaggtacaatgttcagtgatccgccacctgcacgaactactcaatcgcatcaggagtatgtcccggttcatccgcgacataaggaaggtaaaggtggccatagcggcggaaacgatgacatgattatttcatcgaaaaagtga

SEQ ID NO: 241899 - DNA, 2658 bp, Klebsiella pneumoniae
atgaaaaaccttttccgaaaaaaatggttttacagaccactctgcacaattacgatgttatgtcaccttggtgttgtatcctacgtgccgtatgccttttccgctacgacccaggaaaacgtcacatcagctaccaatttctacaaaacacttccgcaggtatcagctacgtcaaatggtacggttcagtatggaaaaggccaggccgttgacctgaactcggcttacccaaatcagggttcatcaacttcactggatagcctgacaggtacattcggggatgacagcaacacgttaaaacttggcaacacgaccaacgccaatctgaaaacagaagattctcttcgcggtgaagcttatcgaacgctggtgggctcgacgaaaactacggcaaaccttaagcccgacgattccatctttgatggccacaaagacttcctggaaaatcaggataaatacatgcaggatcttggtgactgctcaatgacgcgcaccatgaccaacaaagataccgttaatcacattcctgactaccgggaatgtacccgtaccacgagtgttagcggcacatttactctctaccatccttacgtagccggtatgctttcgcattatagcggggctgcaaacatcggttcctgcgggactaactgtatcgagctctggctcggcactgttggggataactactgggacggcaattgtaagattttcgaacaggcaatggctgtcaccgtttacaatccgcaggcagtcaccagcgccaggatagtcagggcaaaatgggatgactatatgcaaatttacgtcggcggaacagaccgagctagccttgtatggggtgggccatacggtactggtacgttcccccccgaaacagctggaaagtgtgaacttagcaccagttgggatcagtcaattaatgtagatgtcactgcgcaaattcgaaacactcccatgaatggagttcttaatttcaaaaaccgagtgtcggtaaccggcagtggcgaaggttatgctcttatctatattaacttcgacccgagcaagatcatttcggataacgaatggactgtcgataaaccggaacaattcgatacgttgctgaaagccataaacgccggttattgccagaactatacggtcacctgccgcgaaactgtcacgcctgatgctaatggatgcgcaacaattaatggtgctcgtatatgcgaaagtcagcttgctaagccacctatcagtggcctatccccgttctgcaaatcggctaccgtggtttctaactgtgggactgacgctggtgttaacaacacctgtaagcagtatgatgctgataccgcatgtaagttcatcaaatccacctgcattactggtgctgagggggacaaaaacggatgctggcaggctacagaagtttgggattgcggaacagatgtcgtcgtacccaatacctctgccactgatacttatgtgtgccctggtgcagttcagtgcctgaatggttcttgccttcagccatcaacagaacccagcggtgatttcaataaagcagttgcaacccttcaggccgcaacttacgcattgaatgaaatgaagtgcggcgatgatactgatgaaacgaaccgctcatgtactcttttcaagggtgagtcagctcaatgtaaatcggctatgggcggttgggtggattgttgcgatcaacctgtagatgtcaactggattcagtatttgcagttatcttattacaccctgaaaattgcagatgctgtcgcggttaaagccggtatgttcgaacaagggaaaggcatttttgatatgggttccgagctcatgactaatgccatcgatacaattacccgtcctgcaatttcggcattcaacagtctggtaggtacggcaggcactgaagccgctcagcaagctacagaagctgggttgtctggattaatgaatcaggctatcggagcgctgactaaacaggttgctcagtggacgcttgacaccttcggccctgcggcaacaaatatgctttttgaaagtgcggcttttgaaggaggggccgctgtaacgtcatcaggcttggcaacatctgtgcaattgtcgtccacaatagtctccgctatatccgttgttgggtacgcttatatggcctatcagattgccaacattctggttaacatcatctgggcttgtacttctgatgaatttaagctggccgtcaagaaagaaactaaactagccgtgcatatatccagttggtgtgaaacaaagttcctgggtgtctgtatcgagaaacgatcaagttattgcacatttgattcgcagatcggtcgcattattcaggagcaaggaagaccaatgctaggtatcggctggggtgataaaaagaacccagattgtagagctctgacattagaagaatttggtcggatcgattttaataaaatcgacttatcagaatggattggctcactttacgaggcaaaacttctcccaaaagcttccgagataaatctggataagataaccggtaaaggaagcgtgttgaatatcgatggctcacgccagaacactctggagcgtttccagagcggtgttaacagcattgatgtagacgctgcaaaatcaagtacagaggccgtactgaagactcaatag

SEQ ID NO: 241900 - DNA, 771 bp, Klebsiella pneumoniae
atgaagaaaatctctggtcttgctttggtgtcgttgatgttggttggttgtgcggcttctcaacccccggctatgccggtggactccaatccatctgatgcgttgaaatttgcccgagcgatggatttacgtcaaattaccgatgctggcgatcaatatcttatctataacgggtttttatccaatggccagattgttcctcttaaatcaccggttaaagctggtgaaaatggagtggctaacagtggcggtaatgggttggcagatgttgcagctggcttcgctacacacacatcattcattccggttctgtctgtcttaacggcccggcgagcagctgctattagtgatggcattgtacgtgtcgcgtcgtggaacggtaaatctcaggaagataatgagcgcgaggtcaacactatactctggaatacgctgacccgaatggacggatacaaagtagggggagtgtgcgagggtaaaggtggtgctgttgaaattcttgttcgccggaaagcaacaaacggcgattggttatcgtatgccgatattgccccaacgttgcctaaaccacctatcaacgtcagcggtcacgcgacattcatactcggtaatgaatgtttcaatctctatgcaacccgagtttcaaatgtgaaactggttaaagcaatgagtaaagaactgggcgctcaacgagctctattcttgcctggttcccctgagcatgagccgatggtgttcagcgacggcaagcagtacctgttcaggaaataa

SEQ ID NO: 241901 - DNA, 531 bp, Klebsiella pneumoniae
atgaaggctgctcttgtccgggatgaagataaatttgcgttaacacaaaaaatggtaaaattagggtttcgtcgaaaaatcattgtgcattcgcttaatgcgagtgaccgcgttattgattttttgcgtaaagagttccatctgagtgatgtatcgatcggacggcttaaacattcagaaacgctgctcaacacgacacataaaaaagttgaagcaaccaattttatgagtatctatctgcgacgttcgaaagacccaaacaacagcgacaacatcgttgatgtggttagtgcgttcgaaatttaccgggaactaaatctaaaattccgcccggaagaagcttcaaaagtgatgattgatgccaatgaggcctggactcttgcgcgtgattttcgggccgaagaaatacgcatggtaaggtgtttccgttgcgacctttcatttatttctccgcagagttgtgaccgtccacggaaaaaacatatttgtccgttctgctctgatgcagaagctgaaaatgaaagctcgtaa

SEQ ID NO: 241902 - DNA, 531 bp, Klebsiella pneumoniae
atgattaatcaaaatttgtattttctacagactgccatctcaattattacccgtgcgcaatcgttgtataaaagcccttttgagttagcagaaggagaccgggagttcttgattgagaaaactaatcaggcaaagctcgcactatcgatggagaagtatgacttgcccatctttaatatctgtcatgatcctgaacgcaagatttctactgaggtagaaaaattcgttcgccatgactcatacatcctgcggcttgctctgctggtattcagtattcgtgttttcattaatacaggtactgtcgcccaaacattctactggtttgataatgaaaaaaccgtccagcttgtcgaacgtatggatgatgcacagacaattgatgcaatcataaccggcaaaatatattttaaacctattcgtccatttgccgatttagtagattgtgacttcagtacagttattggagcccccaacccaaccttggaattaacaggctacttacagtcgcgctattctcattggagtaattga

SEQ ID NO: 241903 - DNA, 561 bp, Klebsiella pneumoniae
atgcagaaagcaacgaagagtttggtgctcgctttactatgtgctgcttactgcacgagttcgaacgccaggcttgtagatcttcgtggcacttcctgggaaaaacattcccagaaagagtgtggtctcgatccgtaccttctctacgcggtggcactcaccgagagtaaaaaaaatgcaggaaccaaggggtatgttgttccgagcccctgggcattgaacaactatgtttatgggtcgtattacccgacaagttatgaagatgccaagagagcgctagcccgctacctctctgccactccggtaacagatattggaatcgttcaaattaattttcgttggaacggacagtatgttaaccatcctgaagaactcttggatatcgatacaaacatccgaatcggggcaaagactttgtgtgcggccatcaaagctaaccctggtgatatagaactggcgataggtggatacaacactcaaaaccctaagttggaaggcaaggctcgtgaatatggtcagcgcgtattacgcgtatggaagaggcttatcgaaaatgattaa

SEQ ID NO: 241904 - DNA, 531 bp, Klebsiella pneumoniae
atgcaagttcgagtgacgattaatccaatactgtttccagagctgattaattatctggaatcaaaaccgtctggccagcgtagtagttctctattggcgctggcgaaccgagcattgctagcgggtgacaattttatacccggtgtcgtccgtgagacttcaaaaaaacgtaaatcagaacagaagaaatcagtccgtgggccgaatatagaaaaggagactggtctgatgactagtcaaagagacggccacttacccaaagaaaatgaggacaaggaaccaaaatttcgtcacgtggttagcgacgatatagtcaatacaggcccgccgtttggtgagggcgatgatattcagcatctcgaagtaaacgatggacagttatcgacggcgaacctaatcagtcagcctgagcttactggaaacgaaccggagcccaatcccggagataaatcgggttttggggaggcaggtaacaatcaaggtagcggcgttaatgtaaagggtacaccaaggcgtgtacgcataagttga

SEQ ID NO: 241905 - DNA, 1023 bp, Klebsiella pneumoniae
atgagcaatgacaaattggttgtctgcggaattgatattgggtacagcaatgtaaaaattgctgtcggggatccagcggatgacaaacccacagtcagtatttatccggcctacgcaacgaatgaggctgtagaagatgtgcggctggtaaagcgtaactgcgaacacgaagtgcttgtctacccaggcggtaaagaatggcgggcttttaccgaacgccccgatgcacgggagttgcatgaccgttaccacatgacagaaatgtacctggcgctatatctggcctcactggataaaatagccgctaaatctggcaatgacatcgatctggtagtaacaggtttacctgttcgtctagccaacgatagcgaacgcgcaaaacttaccgctaggctcaccgggacgtttaccattgcgcctggaaaaacagtgactgttaaaaaatgccttgttcttcagcagggcgtaggtgtcatcaatgacatcgttaacagaccaggccttatcagccaggaagagttagagaaggcgactattctcgtggttgacccaggcttcttctcgatggactacatcgcctttaagagcgggagccgggtatcaggctcttcaggttcatcactaaaagcaaccagtgcaattattgaaagcattgtgaatcgccttaatgccgttaacccggaagagcgtatcgatgatttaccagaaatcattgaaatcgctctccgtaacaatgaaccatctttctttaatgggttccgccacattcccctacgccctctgcttgaagaagcaattccctccatcgccagtgatgtagtcaaagagttgcgaaaatcgacaagggttcttgggccagtccatatcattgcagctgccggtggtgggactggtttctatgaacagactattcgtgaggaattcccccgagccaggatcgtatcgagcccgttgcctgttgccagtaatgctatcggtttctggaactatggcgttgacttgatgctttacggtgacgattga

SEQ ID NO: 241906 - DNA, 690 bp, Klebsiella pneumoniae
atgagtcatgagcgcattgaggttattggtgatggaggcagctggatagccgaacggcttcagtcattcaggttaacgatcctgggtcaaagtgagtcgttgtctatcgtcaggaatccggctgacaattctgcctgggttactcacgatgataccggccttgtattatgccccctccatgttgaagggtcgtcggccccgggcatagctgaggctgctgagacggtagagaaatacatcacccgggtgagtcctgcgggattattagctcggattaagcaagcccgtaaccagctggataaaattgccgcgccggtagactcactttctgcggcagcactgttaagacgtggcgggatcccgattctctcactgcgaaccacggaatatctgaagtggtatgaatcgttagcgagactggcgaaaggtcatgctctgtcaccatccatctgggtcgataactaccttgccggtgatacaccagaaagtgcctgggcgaatggacgcggactctatgagttaatcaacaatggaaatatgacatcagccaatacgatattcccggtctggtattcggtagcgctggcactggggagattcacaacggaagaactgcctgtgatgaatgcctggccgagctattgtgatggaacccgggtggagagttttatccagttgtatcgtgattaa

SEQ ID NO: 241907 - DNA, 564 bp, Klebsiella pneumoniae
atgtttaatttaatcgcgaaggctaaagaagcaggttatcaattctggatcagtgcctcgaaggtactgacagttactgccgtaaccgagggagtactgacggttatcaaaacggtaactgatattaacccttgcttgctggtggctgagttaatgaaccttgggatcactgtatccccagataataactatttctgctggttggatcgcgaaggtgtcctttgggccgttgaccgccaccatctctatcgcggaaatacaggagagcatgggataagctgggaagtcgtctatcagcacggcatggtaattaatacccctgagcaggcatccattcttttcaaaataccgcacgttgggcgctttactgccactgttatgtatagcgcgggctatgcacccgactgggttcttccagcctttgttgatttttctggtgaaccggatcatgaaacaatcctgtcctggttatccgaggtaggtattcgtaatgcaggaatgcatctcgaagatattgagtttctttctgttgaagaaaaccctgacgcttatatttccctttaa

SEQ ID NO: 241908 - DNA, 417 bp, Klebsiella pneumoniae
atgtcaaacgtaataccttactcttgggtggttcgcttcgatgttgctcctcagtgggtagcagacggctttatcatgacagataccactgctctcgaaatgttatctgatgttatcaactatgcaaacgaacacgaacttgccgcatcggttatttcagcacccggtgcagaacgaattgccgaggagcaaggctatttgccatctaacaatacggaaataatgagtcaggtgctaaccggctcaccgcaggcatatgctaaagcatccgtggcaaatactctgctaaaggctatagcggcacttgagaaaacgcagaataataagcagatcgttaaagaactgcattccagcctggctttactgacgggcaataagcctatttcggacattatctggtttccaaccccagaataa

SEQ ID NO: 241909 - DNA, 273 bp, Klebsiella pneumoniae
atgtctactcaaatctattgtgcggtgcttcgccatttcatgatgatggctgcatcctcccagcactcattggttgtgctgaagcaattatataacgcagagatttcatcgaaagctcacctggctggtctctccgtgtctgaagctgaagcgctcctggccctgccatccaccagctggcgcaaacgcgatgacgtgattcatgagctcaatattcgtcttaagcaactcaccggcgtagccacaccgccagctcaacaaatcgctaactga

SEQ ID NO: 241910 - DNA, 384 bp, Klebsiella pneumoniae
atgctgccattcctcattttgctgttctgctcatcgcctgagacggcgcgtatgatcttaatctacgctactgatgaaactgcggcccgcctccaggcgcttgaagatttcgccagtctgaatgattccggttttgcggcttccgcccaaggcccgtatgagtgggagaaccctcacggtgatcagctctttatcgagtcggtttacccggttcccaacggagatttatccgctatccgccgtatgctcggggatgacgatgccccatataccgacaaacaccttattgccggtttactggaggacagccgacgtatacagatgattgaaccgaatgccggtactctttcacgtattgctcaggcagagcagtaccttcagtag

SEQ ID NO: 241911 - DNA, 696 bp, Klebsiella pneumoniae
atgcaaggtacaccacgctggtggcaaaatggtcgtcgggtgcaggccgttctcgcagataatcagaccgcagatgttcggctcaatatcggccaggataatgatttctggtttaccgatgatggtaataaccctgttgctgtacttaaggtaatcggcccggtctatccactggatccgctaaaattcacctccagtatcacggatatccttcctgaagatgtcctcagctataaaaatgcccttcaggaacaccaagtgataaaccggcctgtatctttctatttagcgctcgccgatgcctggttactggtcaacgagcaggagccggtttaccagttccgcattcgaaaccagtacaacggcatggctacagaatggaattccgttgcccgggacagagtcatcgaagtgattaagatgcagccagagaacgctgaatttcgggtgcttaccacttcccccgccgaacctgttgagaacccccgtgagctgatttcggaaatagagcgcctgagagaagccattcacaaactctacccagcaaatacagaacttcgccgtattgcccgcaatagcggaaggatgcatctgcatgacgataccaatggcaaaatggcctatgcagacaatgccagaattactccaaatctcgatgcatttgtaaagcagctgcatcgctcactcaaggcttag

SEQ ID NO: 241912 - DNA, 1173 bp, Klebsiella pneumoniae
atgaaaagaccaaccgcgcacaaaaatgaccgtctgccggtgcgcagaactaaccctacaacgcctcaagcaagagagcgtgttattgccgggctggtggcttcagctacatctgacttcgtctacctcgttcagtggctgaaatcgggaaagcagcacggtgagcctctacagctatccagatgggatagcctgagaaatgcaatcagccaccttgagacgctggatgccggtgtacaacctgactggcgcaaagtgctcactctggtgtcgcgggaaattcataccagccataatgtccaggcggttgttacacccccgtcaaaaatcgccggtggcatactcagcaaccttaacgacatcagccagaagatagcgaccgggcttgcatcccctgacatgctcggcagactcaattatatgcttcagctgaccgcaggcctggctggtggtgacgaactggcgcaaagcatccgtaaggtttctgacagtgcagaaaaagcccttcgtggttatgacaagccgcaggcaaaacccaaaacacctaaaccggccccaccagctcatgcaatccgtgatgatcagacgttccggctggagtgtgccccactgattggggttgatgacctctttgttgtggctaattgccttatcgcgatgtccgcccgcctgggacgttctcctgtcagcctggcgaaacgcgcagcggctttaaaaggtgtgattcaacccgatatgctggctgacctgctggagctcttgcaacaggacgtggatctgaacgccctggccccgccccccagggttaaagacgataatacccgcagtgatggaggtaagctcgtcggtttaaccggggtcgtcgaaggtggtgcgtcaatcggtgctgaagcgcagcgtatcatcaccgcagaactgaagaagcactcaccgctcacttcggcgcagcgcgtatctttcgataccgctcgtgcgggcctggcactggagagcgatacattccgggttattgaagagatcaggcgtattgcagcgtctctcaactggagaccgctggctgttgcggcccatgccgcgcataaatcgcctggtatccgcccggagattgccggggatgtgatcacattgctggcgcaggatgagactttaaccaccagcaatacgggccgttaa

SEQ ID NO: 241913 - DNA, 594 bp, Klebsiella pneumoniae
atgactaccaccaacggaaaaaaaatcttctacgttcactattttgaattcgactcctgcggtggcgagtttccactgatgcgcgttgaagcggaaaacgaagatgaagccaacctgatctgtcttcgcaacctcgcggatgtttatgacgttgatcatggcgatatcagccttgaagagggcttcgaagtgaacggcaatagcgtttatctgcaagggatttacccggcaaccgcagagcaagcgctggtggttgatgcggtatttaatatggctcctgtcgcaccagtcgctgaggctgtgaccggcacggcggaatccaccagcggtatcagcctggtctctgacaaggtctggctggaaagctggttcgatctcgaagacgaatttgctgatcagatgtcccacgtcgcagaagatgacaagtctgatacccgcttcgtcctctaccgtgaccaggtcatcgatgtgcgtgaatgcgaaacctcttcagtccctggctgggatctacagttcggcttaagcggcgggacgcagatgcttttcattcgcctgtctgaggacggcgatcacgtggcgttgggtctcgaataa

SEQ ID NO: 241914 - DNA, 267 bp, Klebsiella pneumoniae
atgagtgaagtgaagaattacagcatcacgaagaccattgatttttacatcaatgaagcatccccggaaaccatcgcgggccgcaggatctatctggaaaccgtattagctcctcgtcttcgcaaaggccttgccgtgctcaataatataaacctgcccgagcaggaagatattgagctgcgcgatgtgtaccagcgtggcgtggatttctttgacaaattgttcgatgcccccgtcccgcaggtcaataccaccaccagcaattaa

SEQ ID NO: 241915 - DNA, 459 bp, Klebsiella pneumoniae
atgtttaaaagtctgtctgaattgatgaccagcgctggcaagaccgacgcgcataaagtctcgatagtccaggttaaaaccggtgtcacctcgtggggccgcaaaaaccagtcatcccggcctacggctgaataccagatctggatggatactcctgacaacgacagtcgtatcgtcctgaagctgaatttcgtgctgagttcccgccgtaaccagcctgagaagaatgcgcccctgaatattgaaatcagccagtacgctaactgggatacggtgaaacgcacctgggcggaatgcgctcctgagcgctatatgcgtctggataatgaaacggcagatgagtttatgtccaccagcggggtctgggaagaaacatctgtcatcaccaatgatatgcagccggattaccgctacttctatccaggcacgtcctattacgtggcaaacgacagctactga

SEQ ID NO: 241916 - DNA, 477 bp, Klebsiella pneumoniae
atgaccgatgttaaccagactacccctgaatgcttcagcatttcttccctgaccgacctgtatcgctcggtgcaggctaccgagtcccacgccctttcaatgatgcgtgtccagcgggggatcacctcctgggggagccgtcgtactactgaccgccgaactgaggggttcaccgtctttctggatgcgccggataacgccagccgtattactgtgaaaacggagttcgtgctgaatgctgctaagaccggccctgatacgtccaatgatctggtggtggaagcgcgtgaacattcaggctgggatgagagccggaattgcttcacggttacccgcgagatcggtgaactgcgggttaatgctggtggtgaaaatcatgccgctacacttcgtcagctgtggaagctgcttcacgcgcaggcaaaagcttaccagtccagaaatactgccggtaacgccacctggcttatgttctga

SEQ ID NO: 241917 - DNA, 276 bp, Klebsiella pneumoniae
atgaaaataagccagctggaagccgggatgagtgtctggtcggttagccgggtaaatatgggcaacaccacacttaagacggttgtcgtccacccggtcgtgattgtcgaagtccatgacaaccatgtcatcgccacctggaatggtaacgccccgcgtcgtttcggtgagtccgtcattaagggctggaagaaagaaaagccgttgctgatccgtgaaggttttgggcaaatgcgcctggctacccgggaagagaaagcgctggcaggcaagtag

SEQ ID NO: 241918 - DNA, 273 bp, Klebsiella pneumoniae
atgaccgatgccatcctttctgaagagctgtacttcaaatatctcaacaccctcgaacgcgaaagcaggtttcgcatcgactcctttcgctttgatggcgagcctcagtggacaaccaaattcgggcaagctcgcatccgcccttctcaggtacgtgtactgctttgccgctgcggggcaaacaactggaaggacgatggcagattcgccaatgagtactgctgtgacagctgcggacagttcgtggaggtgctacagcataacgaccgctga

SEQ ID NO: 241919 - DNA, 306 bp, Klebsiella pneumoniae
atgcagacactgaccgacgtattcagcgataaggcgaataaagcctttcattcgattttcgccgatttcctgcccgccagcgcggatggggtaatgaccttcacggttcgcggctacggcggaaaatctgccagtatgaccgttccctctgccaccccggtttttgtctttggaactgaagagctcgccgacttccatcgctccgctgtggcgggagaattctacattgtggatcacggtggtttccgcaccctgaatcaacaggtagagcgtggccgcgttccggtcatctacgacatcctctga

SEQ ID NO: 241920 - DNA, 294 bp, Klebsiella pneumoniae
atggccatcgacacggtttaccgcctgcggctcgatttcgacgtgtataacggcgatgtcatcgacaccaaagagcaggaagacaaagaccagatctccattgcgaaaatcagccagtttatctttgaagcatccaaccgtttcaagctggatagctgcgaaaccagtgaaggcgggccagcgcatgggccttactgtgtgctggagcatagcgaccgttccgcgctggaacaggccgaaaatgaaattaaacgctatgtgagacgctttaaaggccattcactgaaagactga

SEQ ID NO: 241921 - DNA, 2073 bp, Klebsiella pneumoniae
atgccagacaacaaaccccggatgactgccgctgaaatgactgagcgagcctatcactccttcctggacgcgaaagggttatcccctcgtgccgggcaggtagacatgatggcgttttgcagcgaggtcgtgaatgcgaccccatctgaagagcagtatcgcgtcggggttattgaggcaggtacggggacagggaaaacactcgggtattgtctgcctctgatccctctggcgatggaaaagcataagacgctgatcatctccacggcaactgttgcgcttcaggaacaaatcatctccaaggatctgccagaaattcaggcgagagcgggcctgagcttctcctatgcgatggcgaagggccgtagccggtacttctgccagatgcgctgcggcgttcatatggaaagcgaaatgaatgcctatggctacatccgcgatgatgtggaggatatcagcaaggcctttgctggtggtcactggacgggagagcgtgattcctatcctgatgagatcagtgaggcggtgtggggccgggttaatgccattggcagtcagtgccctaaaaagcgttgcccacactatcaccgttgtccgttcttcctcgctcgcgctctgctggattcggtggatgtggttatcgccaatcatgacatcgtattgtctgacctgtcgctgggaggcggtattattcttcccccgcaggaagagtccatttacgtgttcgacgaaggtcaccacgttccgcaaaaagcaattaaccactttgcgacctcagcctctcttgatgccagcaggcatttcatggctgaaatcttcgacatggtaatgaccatgccggagtcctacggcgggacaatggaacagcacgtgcagcagttggtggaatttgcgggccacgccggtaatgagctcggtgatctgcggggtacgctcttacgctctcttaactggcgaagtgatcacgacatgccgaacggtgtggaatcggacatctaccgcttcccggagggcttcgtacctgaagctattgcggccctgttttcacccgcgttaaagacagtaaacgagatgcagaatatcgttgtgaaaatgacggcgattgtggatgaggccgggcgggatatcagcgaggatgatctggccctgcaaaagatggctgtcggcgagctggcaaatcgcctggcgggtatgcatcaggctctggcctcatactgcgggaataaaaccgtctctggtatgcctatggcccggtggattaacgtccgtcgtactaaacgcagcaccgaagtggtgattaattgcagtccggtctatgcgggcgaacacctgaaatccgagctctggtcgaaggcttatgccaccattgtgacctcggcaacaatccgctcccttagcaagtttgacgcattcctggagcaggccggtcttccagtcgatacacctaccctgctggcccgcagcccgtttgattaccagaacaacggcgtgttgttcatcccccgtatgcgctcggttccgaccaatcatgaagaacatacggcggagatcatcgaactccttcccaaactggtgcttcggcttcagggttgcctcgtgctgttcgcctcccgcaggcagatggaagaagtcagcaaggcgatgcctcaacacatttcaccgcttctgctgatacagggggcacttccaaaacgggaaatactgctgcgccataagctcagaatcgaccgtggtgagccgagcattatctttggtatggcttctttcagtgaaggggtggatctgcctggcgtgtactgcaacaacgtcatcattgccaagctgccttttagcgttccgaccgacccggtgggccagaccctgacggagtggctggagaaaaacgggcgtgatgctttccgggaaatctcgataccggaggcctgcctcaaactgacccagtccgttggtcggcttatccgcacagagagcgataccggcgcggtgactatcctggataaacgcctgaagacaaaagcctacgggaaagacatcctcgcatccctgccccctttcaggcgcgaaattcgttaa

SEQ ID NO: 241922 - DNA, 321 bp, Klebsiella pneumoniae; identical to SEQ ID NO: 155894

SEQ ID NO: 241923 - DNA, 192 bp, Klebsiella pneumoniae; identical to SEQ ID NO: 155893

SEQ ID NO: 241924 - DNA, 696 bp, Klebsiella pneumoniae; identical to SEQ ID NO: 155892

SEQ ID NO: 241925 - DNA, 459 bp, Klebsiella pneumoniae; identical to SEQ ID NO: 155891

SEQ ID NO: 241926 - DNA, 141 bp, Klebsiella pneumoniae; identical to SEQ ID NO: 201134

SEQ ID NO: 241927 - DNA, 633 bp, Klebsiella pneumoniae; identical to SEQ ID NO: 155889

SEQ ID NO: 241928 - DNA, 672 bp, Klebsiella pneumoniae; identical to SEQ ID NO: 155888

SEQ ID NO: 241929 - DNA, 240 bp, Klebsiella pneumoniae; identical to SEQ ID NO: 155886

SEQ ID NO: 241930 - DNA, 309 bp, Klebsiella pneumoniae; identical to SEQ ID NO: 155885

SEQ ID NO: 241931 - DNA, 159 bp, Klebsiella pneumoniae; identical to SEQ ID NO: 155884

SEQ ID NO: 241932 - DNA, 555 bp, Klebsiella pneumoniae; identical to SEQ ID NO: 155883

SEQ ID NO: 241933 - DNA, 618 bp, Klebsiella pneumoniae; identical to SEQ ID NO: 155882

SEQ ID NO: 241934 - DNA, 531 bp, Klebsiella pneumoniae; identical to SEQ ID NO: 155881

SEQ ID NO: 241935 - DNA, 288 bp, Klebsiella pneumoniae; identical to SEQ ID NO: 155880

SEQ ID NO: 241936 - DNA, 399 bp, Klebsiella pneumoniae; identical to SEQ ID NO: 155879

SEQ ID NO: 241937 - DNA, 327 bp, Klebsiella pneumoniae; identical to SEQ ID NO: 155878

SEQ ID NO: 241938 - DNA, 339 bp, Klebsiella pneumoniae; identical to SEQ ID NO: 155877

SEQ ID NO: 241939 - DNA, 444 bp, Klebsiella pneumoniae; identical to SEQ ID NO: 155876

SEQ ID NO: 241940 - DNA, 342 bp, Klebsiella pneumoniae; identical to SEQ ID NO: 155875

SEQ ID NO: 241941 - DNA, 555 bp, Klebsiella pneumoniae; identical to SEQ ID NO: 201119

SEQ ID NO: 241942 - DNA, 267 bp, Klebsiella pneumoniae; identical to SEQ ID NO: 155873

SEQ ID NO: 241943 - DNA, 231 bp, Klebsiella pneumoniae; identical to SEQ ID NO: 155872

SEQ ID NO: 241944 - DNA, 459 bp, Klebsiella pneumoniae; identical to SEQ ID NO: 155871

SEQ ID NO: 241945 - DNA, 447 bp, Klebsiella pneumoniae; identical to SEQ ID NO: 155870

SEQ ID NO: 241946 - DNA, 318 bp, Klebsiella pneumoniae; identical to SEQ ID NO: 155869

SEQ ID NO: 241947 - DNA, 843 bp, Klebsiella pneumoniae; identical to SEQ ID NO: 155868

SEQ ID NO: 241948 - DNA, 279 bp, Klebsiella pneumoniae; identical to SEQ ID NO: 155867

SEQ ID NO: 241949 - DNA, 444 bp, Klebsiella pneumoniae
atgacaaaagaagaatcacaattttatgctggtgcaatctgggccgcatcgaccatttaccggatgcattctgactcggtggtagcgaaagattttctccgtgaaattaacgatctggatgtggcagcaaaatgtggtgctgagtacgacgttctcccattacgcctgtttgttttgcgcgatttaccattgggccacgatgcggattatgaagccatcagcttcgggccggtagaccgtcacggcaatatcatctgcgatcactctcagacttcggtcaccgatatctccggccagcgagcgtatggggtttatgcccgccgtgcgggtgagtcgaatctgacgctcatcgacaatcttgatgatgaagaagaagccgaaccactggcgaaggcgctggctgaacagctccagcaaatcaaagaaggtcgctacgatatttaa

SEQ ID NO: 241950 - DNA, 165 bp, Klebsiella pneumoniae; identical to SEQ ID NO: 155865

SEQ ID NO: 241951 - DNA, 843 bp, Klebsiella pneumoniae; identical to SEQ ID NO: 155864

SEQ ID NO: 241952 - DNA, 522 bp, Klebsiella pneumoniae; identical to SEQ ID NO: 155863

SEQ ID NO: 241953 - DNA, 270 bp, Klebsiella pneumoniae; identical to SEQ ID NO: 155862

SEQ ID NO: 241954 - DNA, 1263 bp, Klebsiella pneumoniae
atgacgagaatgaatctaatagataaaattgcccttgtcgggcaacgcatgaagtccgaacaaatttcattgaaagaatcgttactggcttcttcccgggtatctgtatcagatgacagtgtggagggggtagatcgccttatctataaccactgcctgaataaaaaaaatctctccgacttctttggaaaatctcgagttaccttcaataaaattctcgctgatctcgaagaaaaaaggctggtgggtcaacctatttatcagaacaaaaaccacctttatacccgctgggatgtccagaatattatggatgccctgggttatccgcgctatagagattactaccagagccgaacaatcattgttcagaatcataaaggtgggacaggaaaaagcacgacctcagtggctctggctgtagcagcagcacttgatctccagttgaatgccagagttttagtaattgaatgggatccgcaaggctctattggtagcggtatgattcaaagcgtatctgaagacgacgtattcctgactgcaatcgacgcaatcctgggcgtgtatgaagaaggttctgaatataaaaaatacctcgacatgggttactctgaggctgaaatcattgagaatatgccgttctcaacccatctgccaaatcttgatgtaattactgcgttcccaaccgatgcgagattcaaagataaatactggcagtgcagtaaagaagagcgcactcagttgttgctacgattcaaagaagtgataatgccagtcctgaaagctaagtatgaccttattatcttcgatacccctccagaagactcgccaattatctgggccgctgatgaggccgctgacggtattcttgtcgcagtttctccgcgagaatacgactatgcatccacaactgattttatgctgacgatcagtgagcgattccgtcagtctcccaataaaggtgaaaatattaaatggtttaaagtactggccgttaacgtcgatgataaaagcccatacgaaaaaatagtcctcgataagttaattcgaaccgttcaagacctgtttatggcaaccaatatcaaaaactctgaagcattcaaagcagctgcgtcacggggtaggtcggttctcgatattaagaaatctgaagagttatgttcaccaaagcagctggatattgccgaagaatccgtaatgtccgtatatcaacagtttattaatgagataaagagtttttcagcgaaggaaggagttaacgcatga

SEQ ID NO: 241955 - DNA, 1005 bp, Klebsiella pneumoniae; identical to SEQ ID NO: 155861

SEQ ID NO: 241956 - DNA, 402 bp, Klebsiella pneumoniae; identical to SEQ ID NO: 155860

SEQ ID NO: 241957 - DNA, 1632 bp, Klebsiella pneumoniae; identical to SEQ ID NO: 201103

SEQ ID NO: 241958 - DNA, 225 bp, Klebsiella pneumoniae; identical to SEQ ID NO: 155858

SEQ ID NO: 241959 - DNA, 174 bp, Klebsiella pneumoniae; identical to SEQ ID NO: 155857

SEQ ID NO: 241960 - DNA, 318 bp, Klebsiella pneumoniae; identical to SEQ ID NO: 155856

SEQ ID NO: 241961 - DNA, 750 bp, Klebsiella pneumoniae; identical to SEQ ID NO: 201099

SEQ ID NO: 241962 - DNA, 687 bp, Klebsiella pneumoniae; identical to SEQ ID NO: 155854

SEQ ID NO: 241963 - DNA, 1176 bp, Klebsiella pneumoniae; identical to SEQ ID NO: 155853

SEQ ID NO: 241964 - DNA, 522 bp, Klebsiella pneumoniae; identical to SEQ ID NO: 201096

SEQ ID NO: 241965 - DNA, 369 bp, Klebsiella pneumoniae; identical to SEQ ID NO: 155851

SEQ ID NO: 241966 - DNA, 1419 bp, Klebsiella pneumoniae; identical to SEQ ID NO: 155850

SEQ ID NO: 241967 - DNA, 144 bp, Klebsiella pneumoniae; identical to SEQ ID NO: 201092

SEQ ID NO: 241968 - DNA, 2436 bp, Klebsiella pneumoniae; identical to SEQ ID NO: 155847

SEQ ID NO: 241969 - DNA, 375 bp, Klebsiella pneumoniae; identical to SEQ ID NO: 155846

SEQ ID NO: 241970 - DNA, 348 bp, Klebsiella pneumoniae; identical to SEQ ID NO: 155845

SEQ ID NO: 241971 - DNA, 351 bp, Klebsiella pneumoniae; identical to SEQ ID NO: 155844

SEQ ID NO: 241972 - DNA, 825 bp, Klebsiella pneumoniae; identical to SEQ ID NO: 155843

SEQ ID NO: 241973 - DNA, 660 bp, Klebsiella pneumoniae; identical to SEQ ID NO: 201086

SEQ ID NO: 241974 - DNA, 246 bp, Klebsiella pneumoniae; identical to SEQ ID NO: 201085

SEQ ID NO: 241975 - DNA, 3378 bp, Klebsiella pneumoniae; identical to SEQ ID NO: 155840

SEQ ID NO: 241976 - DNA, 324 bp, Klebsiella pneumoniae; identical to SEQ ID NO: 155839

SEQ ID NO: 241977 - DNA, 192 bp, Klebsiella pneumoniae; identical to SEQ ID NO: 155838

SEQ ID NO: 241978 - DNA, 525 bp, Klebsiella pneumoniae; identical to SEQ ID NO: 155837

SEQ ID NO: 241979 - DNA, 546 bp, Klebsiella pneumoniae; identical to SEQ ID NO: 155836

SEQ ID NO: 241980 - DNA, 303 bp, Klebsiella pneumoniae; identical to SEQ ID NO: 155835

SEQ ID NO: 241981 - DNA, 630 bp, Klebsiella pneumoniae; identical to SEQ ID NO: 201077

SEQ ID NO: 241982 - DNA, 270 bp, Klebsiella pneumoniae; identical to SEQ ID NO: 155832

SEQ ID NO: 241983 - DNA, 1119 bp, Klebsiella pneumoniae; identical to SEQ ID NO: 201075

SEQ ID NO: 241984 - DNA, 249 bp, Klebsiella pneumoniae; identical to SEQ ID NO: 155831

SEQ ID NO: 241985 - DNA, 867 bp, Klebsiella pneumoniae; identical to SEQ ID NO: 155830

SEQ ID NO: 241986 - DNA, 486 bp, Klebsiella pneumoniae; identical to SEQ ID NO: 155829

SEQ ID NO: 241987 - DNA, 399 bp, Klebsiella pneumoniae; identical to SEQ ID NO: 155828

SEQ ID NO: 241988 - DNA, 864 bp, Klebsiella pneumoniae; identical to SEQ ID NO: 155827

SEQ ID NO: 241989 - DNA, 324 bp, Klebsiella pneumoniae; identical to SEQ ID NO: 155826

SEQ ID NO: 241990 - DNA, 219 bp, Klebsiella pneumoniae; identical to SEQ ID NO: 155825

SEQ ID NO: 241991 - DNA, 267 bp, Klebsiella pneumoniae; identical to SEQ ID NO: 155824

SEQ ID NO: 241992 - DNA, 1614 bp, Klebsiella pneumoniae; identical to SEQ ID NO: 155823

SEQ ID NO: 241993 - DNA, 207 bp, Klebsiella pneumoniae; identical to SEQ ID NO: 201064

SEQ ID NO: 241994 - DNA, 252 bp, Klebsiella pneumoniae; identical to SEQ ID NO: 170070

SEQ ID NO: 241995 - DNA, 498 bp, Klebsiella pneumoniae; identical to SEQ ID NO: 170069

SEQ ID NO: 241996 - DNA, 291 bp, Klebsiella pneumoniae; identical to SEQ ID NO: 201347

SEQ ID NO: 241997 - DNA, 843 bp, Klebsiella pneumoniae
atgatgatctcatatcaggaacttgttcgcaccttccttagctccctgatcgcggcgctggaagaagaagtgggatatcgactgttcgatcgcgatacgcgcaaggtgcagttaaacggcaatggcattcactttattgatattgctcgccgattgattcagtcacatgatgacgctgtcgttgagatcgcatcctatgccaccggttacaaaggcaaaattgtgctggcggtgttgccctcgatggcggtggagtggttgccacaggtgctggcggagcaccatcgtgcgcatcctgacatcaaggttgagctgctggatacgcagtgggatcgctgcctgaaggcgattctcgacggccgcgcagacctcgcattaaccgcgggtcagccctctcctggcaccttcagttcgcgaatgctgtttgccgatgaattttttctgatctgccatcgcagtcacccgctggcgcagcgcgagagcgtcgacgttgccgaagtggcgcagcaggcgtttgttggcttctctcagggaaccagcatccgccagtacaccgatcagctgatggcgccgcacagctttaactatgtccttgaggtacgacagctgacgaccatgatggggctgatcgcggctaactatggggtcagcatcgtgaccggcctgacgctgttccagtttcagcataagaacatcgccattgtgccgtttcgcgatctgtcattacagcgcggcatctatctggtgacggataaagagcggcagctttcacagtgtgccagtgagttctacgagttcttacaggaaaaggcggagagttttatccctcgctccgcgcgctga

SEQ ID NO: 241998 - DNA, 1104 bp, Klebsiella pneumoniae
atggatgatataaaggattcaataattcaaactattcgtgaacgttttggcaatcccatgtgggggtatatagcactttcttggtttggttttaactggaaaaacattgcgatactattttttagtaagtcaacaattgaagaaagaattaaaattgtcactagccaagactatctttacctacattacctaataataccagtagttgttggttgtgtgctcgcggctagcgcaccatatatcaaatgggctttttctaaagctcatgagtacggcgaatcaatgcttaatgaagttgacaagcgtcggattaatgctgcatatcaaaaggatatagataccgcgaacaaaaaagttgaacgtgattttgctgctagaattgctgaggcagacaagcaaaaagaattagttgaaattgaagaaactaaaaaacaacttccgtacaatactgaaaatttaataaaagaacatggtgtactgactgagcaatgttcaagtcttgagcatgacatttcgatttataaccaacagaaagatcaactagacaaagaaattgactcattacagcttaaggttaagagcattgtagaaatattcaatagatacaactctcctagcaatcatgaaagtattcagcgatttttagatgagatatctacaatcttcaatagtgtaatatcaaaccctaaacaagatccttctgaaaaagaagcagccagtgtgttagggaatataaataaagcatatcaagccgcacttttaccacaaaccattagttctaaaaatcaatataaatcagccttagagaatattcagaacgcattatcaaaaaatcctaatcttgcagatttgatatctagcacttacgatactttcaataaccccaactataagaaggttcatgacctagtacagagtattaactctattcagaatcaatatcctcaacttatgtcactatcatctcagacaaaggagatgctaaattcagcaacaagtaatgacttaaaaaagatatcacaatatgcaaggctattgacccctcaatatactgatgtatctgaactactaaaacataataattcatcattggaaaatgaatga

SEQ ID NO: 241999 - DNA, 921 bp, Klebsiella pneumoniae
atggataacttacctttggcattatctggtcaccagctacaaatggaactatacccgataaaagaagccgatgttgatggcattcaaatgggcgttatgaatgatgggtctccatttttaactcagcgaggtttggctagattatgtggcgtggaccatgcagctctccttcggctcgcctcaaactgggacgatgaaaggacgaaaccaagaggccaattcatagaccaaaagcttagagagcaaggattaaatctcaaccgattatttcataagacagtaattcaaggcacagagacaaacgcattccctgatgttgtctgcatggcctttcttgagtattacgcatttgaagctactcagggtagtcgtgaagtagctttatctaactttcgtaagttagcgggttctcaactgcgtagattcatatacttaagtgtagggattgacccagagaacccacagcggggcgctcttgagtgcttccatgaaagactattaatgaatgatcaggttccatttggatatttttctgtatttagagaaatggcagatctttcattaaaaatggttaaaggtaactttgactttggtccctcggcaattccagatataagtgttggcacgatgtggtcaaaatactgggtcgccaatggttgtgacgaaaagtatggccagcgcacaaagtcgccacatgtttatccagactggtttcctcaacatcgtgcaggccctgttgacgcctggatctacccggatgacgcattagggttgtttagacggtggatgcaaaatgaatacattcctaatcgtcttggagattatttatctaagaagtccgccgatggagcgatttcagcagtggatgcattaagaattgttgaggcagttaagaaaccagaacttcctaagccacactga

SEQ ID NO: 242000 - DNA, 1080 bp, Klebsiella pneumoniae
atgactactaatttcgcaaacctgtctgttgaaatcatggcgcgctctacacctgtccacccttctgtatttggtattgttgtaccagaacatcagatggataaagtgaaaccgttccagggatttgactcagccaatccatttagtgcattcgtgcctaaacagaatgacgactatgtttttgaagcgtatttgcgttcatctgtactgatgtggattaactatccacaaaatcagtctctgtggatctctggcccaacaggttgtggcaaaaccagtgttgtcgaacaagtagcagcaagacttaactggcctgtcatgaaaactacagcttcacaagacctggatattaacaatctcattggcggtctccggcttcagtgtaatgaactgaccggtgataccaagactgtttttgttcatggcccactgacgctggcgtacaagtatggactgattttcctactcgatgagtacgatcaattagacccatcctgtgccaatgcctttaacgccatcctcgaaggagggaatttagttattcctgaaaccaacgaggtaattaaacagcacccgaacttcagatttgttgcaacggctaactcgattggtcagggcgattttactggcgtttatggcggtgtgaaaacattaaatgtggccaaccttgaccgctatatgtttatcactgctgactatatgccaaaagagaccgagactaaattgattaccaaatatatccccgacaccaaagtcgcggagaaatttgttgacgttgcgaatatgattcgcggtctttttgtaggcaagaatatcaccggtgaaattgacactagtgtcaatactaacagtgcaaaactcccggacggtgttcttcccgacactcgtttatcagtaacgtgttcaactcgttcgctggtggcctggcttgaccgctactcaatgatgaaagctgcaaagatgccacgtgcattattaacagctttcgattatcagattggtaatcgtgcatcagcagatgataaaaaatctttgcatctcatcgttgaagctgtattcggttctgaagcacttaaataa

SEQ ID NO: 242001 - DNA, 378 bp, Klebsiella pneumoniae
atgtttcttgtaaatatgactgcatatcttgcatccccggaacaacgggaaatgggcgttattgatgttgatcagcaagtatcacacgcattacgtgaactgttgacctttaatacctgtccttcagaagatgttatgaccgataaggctaaagaattcgctgaaatcgctacatctctctgcaataaatataaggctgacggcgtacttgtttatgccaaaaccttttttatgcccgttctggtctctgcattgagtgcccgtggcatcgtctcttatgtaacgtatgccccaaaggtaaccagtgttgataacagtggcagtgtaagccgcaattataagcatgttgatttagtacgtgctgatattgctgcatag

SEQ ID NO: 242002 - DNA, 1110 bp, Klebsiella pneumoniae
atgtctgacatttatgaagtcgttgatgttgtgcagggttcaaaggactggctcgaatggcgtaaaaccggtgtgactgcaacatgctccccaattctgttagaggagccaggtgcaactaaaacgccctacgaactctatttgcaatacgctggcctgattcaggcagaagacctttctgtcattaaacaggttgatgctggtaaaaagcttgaagcacttgccagaagttactgcgaaaaagagataggacaaatcgccctgcctttctgtgtaaggaacaaaaagtatccttacatgattgcttcactggatggtcaatttgacgatggttcaatccttgagataaagaatctttgcgagagcaaacatctttctattcttcagcttgaaaccaaatcgccagaatttcgttattactactggcaagttcagcaccagttgctgacaacaggcgcaccccaggcatatcttgtgttctggtcagcaactgaccagaccaaggtctttaaaattatgccttcggagaaagcgttttatcgcgtccaggttgcctgcgaatatttctggaatagggtacagacaaaaacagctatgccgtttgataaggaaaaagatattttacttatctctgatcctgtaatcatgtctcatacacaaggctttaagcttccagacgacctggaagctcgtgtggtagacatagccagacaagttggaacattgcagcagatggagaaagagttagctttaaagaaaaagcagttcgaagaataccagaactcggtcaatttattgatccagggtcttggtgtttctgttggcttttcctataacgagcttgttagaatcgatggctttggctttcgttttcttcagtctcgcgtaccggaaaaaccgagctacaaacgaatctgcgataaattatctattgacccgaaacatcatccagaatgttacggtcagtcatcggtacgaaattcactaagtacctatgaatataaatcaactctgactgatactgtctacattcctttggatgacaattccgtactggtatcacctggtgcagaagagacagactcagcccaacaattcgttgttttttaa

SEQ ID NO: 242003 - DNA, 1557 bp, Klebsiella pneumoniae
atgtactcaaataaatcacgtagctcaggttcctcttctaacaacaataaaggcaactccgatattgtcgtaaagatggacagtattgcacgacatatgttgtcgctggataagatgttcgcatccgcaggttccagtgctccgcatatctcattcgaacgtgaatgcgtatttgcaaaacatattgtcaacaataataacttcctggctgacatagcagttaataatccaaagtccttcgaaactgcattccttcagctcgcaagtagcggcctcactcttgacccggcgcagaagcaggcttacctggttccacgcgatggtcgtgtcattctcgacgtgtcctatattgggctcagcaggatggccaccgatgaaggtttatgcgaagacattgtggctgaattagtttttgataaggactcatttaaaaccaatggtcgtcgctccagcccagaccacgaatttgacccctttgcttataaagggggactcgttctcacaaacaccgatcagggtgatttaggagatcggggcatgttcaggggggcttatgtcgactatttaatgaaggatggacgtcatctggtatttttcattgaccttcaggatttagctcaatctcgggcgaaatccgaatcttgggcaaaagtggagaaacggcagtattctccgtggactcagttcccgtggaagatggtgctcaagtctgctattaagcagaccatacacttaattcccggtaaccgtactcgcctgagttcgatgattgaatatctgaacactgctggtggtgaaggtttccgtacagcaacaatacccgtcgcagctgctgaagctgaaatggagattagacaagaagccaggacggctggtaatacggataccactatccaaactgaaaaggctgatggtaaagttattgaaggcgagttcaataagctcgctgaagaacctaattcagccgagcagcaggacatcaagagcaatacaccaaccgatgttaacgatacggctgagggaaatactcctccagccgaagtaaacggtgcggctgatgatattctccccccacccgcagaaaccaatgggcagtccaatgaagaaatgtctgaacatcccggggttagaaaatgggttgaacgcagaattaaaaagttagtaagccgggcagaaaaaacgcttggatacgaaactattttaaccgatgcaaaaagcagtttcgatctgaatgaaagtgagctggcgttcgctcgcttatctttagaaaaatcccgaagggcacttctcaaaaatcatttaattaacgcagtaggtagcttcgattttactcaagtccttaacttcatcgaaaaaatgggtaagggtgagtttaaaaccgacgcggccaaatgggttggtgaagtccaggccgaatcagtggaaatacaccagttatatcttgaggctgttaatacctctgattttaccaggcttcatgccgctctcagcaatgtgacattcccccctctaaaagaaatggtagaaggtcttattgaagatcttcaggccgcttaa

SEQ ID NO: 242004 - DNA, 765 bp, Klebsiella pneumoniae
atgcaatccagagcaaagggtattgttgcgatagaacctaagtatatgcccgcatctgataattcagattcgtatatttattttcgtttacgctgtgacatgtccatcagcggcaagtcccagaccgagttctattcgataaaagcatttggtaaagtcgcggattttctacgtgacaatattcaaatgaataccgaactgtatatcgaggcattagctcgatcattccgttatacaaaaaatggtattgaccaaatgaggactgagtttcatgttttcatggctcgaatcattcagactggccaatcaattgatacccgtgcaaatgaaactgtaaaggcaacatcgacatcaaccgtcactacgttatcccctgaagtagcgcaaaaactaaaggacgatatgaagtggcagaaaatgtctgatgaagaggtaagaactgcttctgaaaaatggagaacagtctatgccgagcaaaaacagcttcaccctggaaatgagtctgtattaccagacaacaataaacagtcagaaaaaaagaagccagacacttcgcagaagttggacgctaagaatagagccgtgcagacatcacgtccgcaagtggctacctctaagcgcccagtcaacatgcaagcctggacaactctgccagccgataattcgacagcagccgttattgcagcccgtatgaaacttaatgaacaattaagctctaccgggccggaaacattaaccaacgcatattcatcagttcgcggttga

SEQ ID NO: 242005 - DNA, 501 bp, Klebsiella pneumoniae
atgacaattgtctatggtagtagcattgagccgggtggtatggaactggatgattacacaatgattgcagagtgcgaaaattgtgggaatgactgccgacatcggatttatgaagactgtgttgcaggagcgataaaccagcgattctcttatacgtgtaatcactgcggttatcattcctgtaacgctgaagtatgtgacgtatgcgatagcatcgaatgcgaagaacatgctggtcgttatcagtctaatattttcttcgaaatgcatgagctcattgagctcatgaaaatagagggagatatactggcaatcagggcaaaaatcaatgtaggcgctcaggactttggagatctttcaaggttagatgattgcctgcataggctcatctatccaggttattatgaacggcgaaataccaatctctataaagagatatcagatgcatcaaccgacatggcaatccaaacatggaagcgtctggaacgcttgttatgctaa

SEQ ID NO: 242006 - DNA, 612 bp, Klebsiella pneumoniae
atgtctgacccaatctcattaatggcaggtatcgtattttttggtgctgtgtattaccgtgctgaatatatcagattccttggcccaatctggctggcaatttttataacggaacgcggtttactattcactggtctcggttttgttactgcgactgtgtgtgtggtggttgctttactggttatttataattcattctttaccaagtctgggaaaaaatctaatgaatcaactaatggaaacattgttgaaggttcttctcagggtggggcaaataatgacaaagccaaatatacgaaccatcgttatgaaggaaaacttgtttaccacggtctcgaaaactggaaacacgatcctaataacgataaaacgtatttagtcacaattcgtagtggtgggaaagaccatgaaatttgggcaattgggctcaaaagtgctgttgcgacttgtggggcacaagttggggatatcgtttcagtctggaaagagtctgaagtgagaaccgacaaagcacaagtttttgacgaaggcggtaaggttacagggtatcgtaatcttttgagcgaaaaacgtcgcggcatttgggttatgcaagtactcgccgaaagctaa

SEQ ID NO: 242007 - DNA, 747 bp, Klebsiella pneumoniae
atggctaaagcaccggtacaaaccgtaaaacaagctaaaaagagtggggctcaggataaccgaacccctaacacccgtgtcgaatattccaatcctgaagctgtcgtgaaatttactcttcacacacaggaaggtattcgtgtccagtcccgaaattttaacattatctcccaggcgctcttcaatctgaccaataacagccgagcccttgaacggcttggcgctaaatacagtggtgcaattgaacgtacactgaaggcagttaacgaagtaatcgacatgcctgagaaagaactggaaaataacattgctattctgaaccgtgcggtaaaagaagaagaagaacgcagcagcctcaatgaagtcgggtacacccatccaaaagaacatgaggttcgcatcagaacgccgcaagcaatgcgggttatccgcattattcagaactttgataaattgcaccagatcatcgataccctctggttaaataactgttttaatcaggatgaggtcgaagagtttaagtctcgtcttcataatctcattcgtgatctggctgcatcactcaaacgtcacgcgcaggcatctgctgatgagcttaatcaggccaatggccgggccgctgaaaaagaattggctggaagcactgagacagaacctacccaggtagaccaggatacaccggtgttgcaggatgccagtaatgaagcgaatgatgatcagaatgaggccattaaacggcaggcttaa

SEQ ID NO: 242008 - DNA, 1068 bp, Klebsiella pneumoniae
atgaaaaaaatactctcagttctgaaatcacccaagaccctggtgctcgcatgtctggcttttactttcccggttttggccgctgacgtttcatcacccgtacagaacaaggtctgtcatgataaccaggtcttatcagcgaaactcattaccgatgtttgctggaactgtattttcccgataaagcttgccggtattaatctgtcgatgactggcactgcacctgacaatgcagcatcagggacagtatgtgcctgtaaggacgggcttaacgtctatcacccgggtgtattgaccgcgatgtgggaaccgcgaaagctcattgagttaacgagaacacccgggtgtatgtcatcgcttgggggggtaaccctcgaccttggtaatgatttgcagtttggcccgcagaccgatggtgcagccgaggaacaacgggagcgtttctcgatcagtttctacaatgctcatatgtatgcgatgccgttattaagaatgcttgatatgtatctacccggccagtgcaatgccgacccatacagcgattttgacatcattaatttcacggagattgacccgacctggaataatacgatgctggcattcttccagaacccggaatcagcagctgtggctaacgtgatagcaatgcaggcttgcgccggtgaagcagctgcgcaatttgcaggtaaacagcctatagactcactttggtggtgtgccggttcctggggtgggcagtatcctttaactggttcggtacggagtatggatgcccccagaacaaccagcctggtcgggatccgtatgctggccgcagaacatcggcgcggactggcctaccgttcgatgggaaacgatactgtttgtcgctccaagatttacccaacgttgccaaagcagcagtacaaattgaatatgttctaccctaccccggagacaaaaaacagtcatgaggtcggtgagtccccataccaatggcaaggtgggcctttccgctatccaaccggtaaaggccaggacagtacctacatgattttccagtgggtagattgttgccgcacaatgtaa

SEQ ID NO: 242009 - DNA, 1314 bp, Klebsiella pneumoniae
atggtaaaaaaaacaccttttcgtctttcaatactgccatttgtaaccgctgttgtttgcaccccaacctgggccgaaagctctggtattgatttaagtgatctaccgtcaaggccgttagccaacttagataacattccgaccagaccggctaataactattcggtcaccgacattcaaaaagctaagcgtcaattatctgctactgaattgaaagatattgacagtctcatcaaagcggctcgtgataatcaaaatgtcgctaccgaccaggctactgacacggttaaagataatcgaaaaatgatgggtgaaatgcccgagtataaaaatacagatgaactagtcgatgatgcagtaagaggtgcgctagcaaagtctgatatgactaacgagaaacaaaataagccagtcggtgattttatttatattctcgtctccgcgtctctaagcgatgctgaaatcaccgacattctcaagttatatgatggacgcacggatatcgcgctggttgtccagggggcgaaagataaaaagaacctgcttgatgaactgactcactggcagagactttccttcgactccaagtcatctcttgccgtaaaccttgatccaactgtattcaaaaactacaacgtcagctctgtaccaaccattatccatgaaaaagatggtgagctggtggccagggtgacaggcatctatgacatcgcgtacctgaaagacaagaccggcgaccttggtgtggccgggcccgcagttggggtcgtggagaagaaccttattgatgaattacaggaaagtgtcgcgaaactcgattttgatggcatgaagaaaaaggccattgataactactggccccgccaggttttccaggaattcccggaagcgacaaagcgaactaccagaaccatcgatccgacggtcattatccctcaaaacattacttcacctaacggtgatatcgttgcgaaacgggggcgatttaacccgctaactgtgatgccatttaccatcaagctaatctttttcgatgcacgtgaagaatggcaacgccagttcgccaggtatcagtttgaacatacacctgcctccctcacgccaatactggtcacgacaaacgtgtatggtgatggctggcagaccttccgtgacaccaagaaagaatacggtgatttcgcaaggctatacatgattcagccaggcatggccgaacgttatggtttgataaacgtgcccagcattgtgacagccgacagtaagcgattcattaatgatgaatactcgcgcaaagattttgaggagctgaaatga

SEQ ID NO: 242010 - DNA, 2487 bp, Klebsiella pneumoniae
atgagtgaatctttaatttttcagcgactcaagaacctgaaacgtttttctgacttgtgtcctgttcgtgcgtatgacgaatccaatcatttgtttatgtgcgacaacaaatatgttggcttcggatttgtatgtcgtcccttaagcgggacaaccggcaaggagatgactaaccttcaaacgttgctgtcttccaatttccccgccaaaactatcgttcagtttgacctggttgcaagcccaaacatcgtacagaaaattaaccggatggatgtattgcgtatggattgtcgagacgcaatcctgcgtaacgcaatttataaccgctctaaattccttctaaaaagtaccgaatcgccaatgaagcgaaccggcactcgtgtccgaaattgtgtgcttctcattacagtaaaaattccgatcaaatataactatgaaatgcgtgaagaagaattcaatcacgtgaacgaactgcgaaatgtgttcgaaacgacgctgagcatcaccggtttgtgtcccggtgcattgacacgcgaaagttacatcgatgtattgagctccatttgcaaccagggcgaaagcgcctcctggcgagaccggacgccggtgcagccacaagaagataaatacatttcagaacagttagtcgaccacgaccgcatgtttttcattaagaaagactattgcggttttggtgacccgacagattccgagcttcgaggggaagcacctacaccgacaacgtttgtgaaaacattgagtgcgcgaaaattcccgaaaagattctttcccgggcaagcgcaatacttcctcggcgatatgatgagcggtgtcaccggcattaaatcatcctgcatcatttcaatgagcctgattttctttgatcagcaaagtgaaaaaactaagttcacatcgaaacgtaactgggttgttcagcaaaccagtggcccattaattaagtgggttccatcattgattaacttgcgtgaaggcttcgatcttctgagcgagaaagttgataacaacgacccaatttgcaaagccaaatttacggtatcaattttctcgaactcaaaagatggtgtgttacgcgctgctcaggaagcagctagttatctgaacacctatcagtttaagatgatcccagatacctactatgttgcgccaattttcctgtctgctctgccaatgtttaacgaagcatcagcagaaaagtccattggccgatatcgtacaatggcactcagtgaagcgatggtactttcgcctctctatgctgactggcaaggtacggacaaacccgccttaatgctgacatcccgctctggccagatccaatcactggacttgtttgattctgatactaactataacgcctgtatcgcagctgaatcagggtctggtaagtcattcctgacaaactacattatcaccgcctacagaagcctcggggctaaagtatggtgtattgatgtaggtgactcgtacaaaaacatctgtgagacctaccagggcgattatctcgacttcaatcccaaaaccaggccatgccttaacttcttcgaactgatcgaagactatttcggcgagtctgaagatgatgactccagtggtggtgaagaagatctgatcattggattgttatcggtgatggccgcgcctaaagaaggtctgaattcattcgaagagtctcgacttaaacaacacgtagctgatcttgtccgtgtacacaagaaagagaccaccgttgatatggttgctgattcactgctacatgatgaagatccagacattaaacgaattggccatcagctctatccgttcacgagtgcgggccagtacgggaaatactttgttggtaagaacaatatcgacttcaaaaacccgttcactgtacttgagctttcccgacttgaaagttcagaacaccttaaacaggttgtcctccttcagctgatttatcaaatccagcaggacatgttcatgggcgaccgtagccagatgaagctggtcatcatcgatgaggcctgggcgttgttatcaggaaatatcggggcattcatcgagaagggctatcgtcggttccgtaaatataatggagctgcaattaccatcacccagtctatcaacgatatttacaaagatagtatcgggaaatcgatcgcagataactcagcctttatgctcttgctggggcaaagtgaatccgcagttaacgaagccgaagctaataaacgtctggcgctggacgaggccggttatcggttccttaaaactgtccgttccacgaaaggtgtttattctgaaatctttgtcatatcgaaagcaggccagggtatttgcaggcttgtggttgacccgttcagcttactgctctattcgactgacccgaaagacgttgccgcgataaaggacagaaagtcccgggggattaataccgaagaggctatcaacgaaatcctggttgagcgggggttagccgcatga

SEQ ID NO: 242011 - DNA, 765 bp, Klebsiella pneumoniae
atgaactttatcaaacatgtcgcgactgcggcacttttggtggcactttctgcatcaacttctgtattcgccgatacagtaaaaacgaacaccgggaatatcgatacgattttcaatgaaaaagcgttcaagaacattcctcagaattcgcaggaagtaaaacgttttgtcgttccgactaacggcatcatcgcattagagattgatgggaaagttaatttactttcttcaaatggccgctttgttatccagggaacgctctatgatacatgggctaaaaaacccctgaccaccatgagtgaaataaccaaaaacgccagcatcatcccaatgaaagagctgaacctgaatattgcggacttgcgccccgccgtatggggcgatgggcctaaaaaggtgatgatatttaccgcaccaggttgtgaagcctgtgcagccccgctttccgcacttgctgacctagacccgaaagaattcaccgttagcgttctgtcgctcggagctctgggcccggcaagccagcagcgaaatattgaattgtattgcgcatccgaccgctaccgcgcagaccgcgcaattattagcggcaattccgctcagaaattcgaccaggtaaagaactgcgatatgcaggctctggctcgacgtgaagttacggctcagatactaggtgtcagcatgatccctttcattgtacgtgatgacggctcctacgtactcggctcaccaaaacaaggcctcaaaaactttatcgagaacaagtaa

SEQ ID NO: 242012 - DNA, 1602 bp, Klebsiella pneumoniae
atgaaacaaaagtcattatatattgctattgttctggcacttcattgtgccgctgcctatgcagataacacaattgatgaacaccaaattgacaaagttactgtaattggtgatgagaatagtgttactggactatctcaatgtacacattctgacaaatgcgaagtacctgatgggccgtcaagcgttaatggtagttataacattataactggtctatcaaactacgttataactggtaataataataaacttgactacacatatgatccaagcttgagttggtctagttatgcaaacagttttaacgtatatggtaattacaatactggtacatatttacaaggattaaatattttcggcagtgctaatgacgtttatggcattaacgttgatataatggggtatagcaacaagataaaaggaagtgcaatacaggtcatgggtagttataacgatctggatactgtaggtatgggcgcaattctcggttcaagaaacactgttactaattatgcaggttcaataatcggcacattcaacacattgagtggtggttcctatgctttgacaataggttcacttaacaatattacagcgtctccatttggtgacccctccgtgccttttaaattcggcaacatcacaatcgggacgattaataccattactgattcagatgaatcaatcgtactgggtaactacaatactgtttccgatgataacgcaatcgttattggtaattacgcatcggcttccaatggtggtattgccattggttacggttcgatctccaatagcgcagatacagtatcgtttggatcatcaacggtacaaagaacgctgactaatgtagcagatggttccagccggtatgatgctgtgaactatggccagctcatgaattcggttagttcgcttcaggcatacaccgatagtgctatcagttcgtacctctcatccattggatctggttctaacacaacgccacctattaccggaggaaatgacaataacggtacggacggcaacgggacaggaagcggtacaggggctggtagcagtaacgacaataaccaggctgcaacggatgctaatacttataccgacgagcgcgaagtgtcgattaacgcccgaactgatagtcttattgcaacagaaagcgcatcccgggttactggggatgctcaaacactgctaagtgcaaacagtcatacagatgcccgtgaagctgtcatcaactccagaactgatatccttgtcgatactgagcgccagtcgcggattgacggtgaccgccagactctggcttcagccaatagctacacaaaccagaagttctctgaccttaaaaagacggttgaccgtaatgataaaagagcaaaagcaggctcagcgagcgctattgctatcgcgtctattcccttcctcaataacgtttctggctttggtatggcaatgggcgcgtaccgagaccagggagcaatttcgggcggtgcaaattacgctatcaacgaaaaagtaaacgtccgctttagcatgtcggcagatacagccggtggtgttggagctggtgcaggatttgcggttggcttccagtaa

SEQ ID NO: 242013 - DNA, 567 bp, Klebsiella pneumoniae
atgatgacgaagaaaattgtatcggcattgtttttagttagtgccggttttgcgatgtcgggttgctcactactgggccagaacgatgaatatggatgcaagggaatgcccaattcggtcacatgtatgaatgtccgagatgtgtatgccctgaccgatggagatgattatcaggagcagattgacaccgcatctgaaaaccaactttcgggaaagcctgtggaggttaagcggcttcgcactacagctgagaacggtggacggaatactgccgatggtggtcgatacgtccctgtgcctgctaccgctgctgatcctcaacccatccgaacacaatctatcgtcatgcgggtgctggttgacccctatgagaccgcagatggtgaccttaacgtccctggctacgtctataccgagattgagccgcgtcgttgggaggtaggtgcaagaaatagtgccacgtcaactgctgttatcagaccgatgtctgcaccggttgccgctgtaccagcgcaatcccagggtgagacatcgcaaccacctcagaaagggagttacattaaataa

SEQ ID NO: 242014 - DNA, 1398 bp, Klebsiella pneumoniae
atgcttatccctttaaaagagaaatgggcctcaatttcagcaaagcataaaaaatgggttatatgggctggcgtaacgactttcgccatactttttttgctcttggttatccctgactcagctggcccccgaagccgtgcgccacaagaaaaagtgattgccagcgtccttaccgacggtgataccaatggggttagccagaatgctattgcggcgcgaattcgcgcactcgacaagacaattaaagatcaaggccaactgattaaagcgttaaccgaaaaatatggtgctgaccagacagctcagcgacttagcaatctggagaacggccagaaaaaatcaggcgctgaggttgccgctattaagaaacgcgttgataccgtctctaaccctgtgccttactcacaacagccacgcggagcgacaccactggctggaaacggccaacgtaacgtcccaactctatataaacctgaagagatatcagccccttccgttacgcccagaaactcaggaagtttcaataacgggaaaacattacagcgcgtatacgaagatgcggctcccccagtcgtaccggaacccgcagcaaaccagcgacagcagaaagggaaggatggcaaagcagttccaagccagataactcctgaaattatcactgtacaggaagatattgaagccgcccccgttgctgacgaagatgataaccccgagaaccagacctaccttcctgcaacgtcgatcataagtactgttttgattgcggggatggatgctccaacatctcgtgatgcacgaaaagacccttacccggcactggccagggtgaaaaaggatgcaattcttccaaaccgtttccgggcagatatacgcgaatgcggaatgcttgcagctgggttcggtgatttgtcttccgaaagagcttatttcaggtcggaagtcattacgtgcattcgggatgacggtgcggtttttgaagccccactcgtagcatacgctgttggtgaagatggtaaatcaggcgttcgtggtcgattggttaccaaacaagggcaatacctggcgcgagccctgaccgcaggcttcctacaggcagcgtctcagctctttaatgtccagagcattcctacaatcagtattaaacgcgatggagatagcagcgattccactccataccagcaggttatgagctctgacgcactccagggcgcagctgtttctggcgtaggtggcgcattgaatcgccttgccgatttctatatgcaaatggccggtgaccttttccctgtaattgaaattgatccaggccgtagtgttgattttattgtgcaaaaaggggtcatgctgaaattcacacgtgttacttcaaaaactcaaaccgttgggggcaagaaatga

SEQ ID NO: 242015 - DNA, 1116 bp, Klebsiella pneumoniae
atgttgaatagtaaacgcacaattatcctgatgcttttcgtgtcatccacatttgctgcccatgtaactgcgggggaaatgtcggttgatcaagggatggtgtttgaacagcctgatgctcaggcacaaccaaaagttactgcgaagctcgcctctcgaccagcgtccacgacccaggcaatgctcagtacggcaacacgcccttaccctgacaactacacgccaccagcaaatggcacaaacgcgggtggtgatgaaccggctattgatggccgtaatattcaaccagttccagccgccattgccagcccggttccactgactaaagaggtcatcccatctcggttggagtacatcgttacaccgggcgttaataccctcgtgccgatctctattaaccagatcaaccgactcgttacgccattcgaacatcctgttgttcagaaggtaaaacaggagggtgtgaccgtaaccgtcaaagataatgccctctacgtgtcaactgctgacagtaacccggcaagtttttatatcagcgagaaaggtgacgaaagcgttgcgatttccgtatcgttagtgccccagaaaattgcgcctgttcaggcctcccttatgctttcgcgcaagctgaattccaccggtgcatctggggtcattcctgctggatataacagctttggtggaagtgaagttaaagccaaacgatgggaacagaaagataactacatcgagaccattcgaaacataatgcgaactatcgcgcttggcgacatcccccctggctactcgctgggcaatctatcttcaggggttgggatcccaaactgtaatttccgcacgggcactgaccaggatcagattcgttactccttcggtaatggccagtatcttcagggtagtcaattcagtgtcatcatcggggttgcacaaaacactggttcatcaacggtaatggttgatgaatcactctgcacccaccctcagcttgcagcaagagcattatggagtcgtaacactctccagcctggccagcgaactgaagcttacttcgttatccgcaacatccagccaaacgaacaagctaacgattccatgcgccctaaactcgcggagtaa

SEQ ID NO: 242016 - DNA, 627 bp, Klebsiella pneumoniae
atgaatatccataatttcaaaaaaggattagttggacttcagttagaaaacaagagtttcaagttaatcgctgcctcgatgattttggcgaaccttgtacttggttacgccctgctggccaaaacacaacccatcaccattattccgccaaaccttacagaaacagcatggctggatgagaaagcagccagcagctcttacatgaaggcctgggcgttatatattgctgacagtttcggtaatgctaaccctactactttagatctactcaaaaactctatcggcccctttcttgacgcatcaatttacaccaaagtcatgaaagcaatggacgaccagattgaccaaattaaacgcgaccgcatctcactttctttcaatccggtcggggttatcaccgacccgttagcagttggtactttttatgtcaccggtaaccagactctcgaaggtatcaccggcaaaccatcgaccacaccggtctattacgagattactgttaacgtaaaaggctaccggcccattattaccttcattgagataaagagtggtaaaccgctgctgccaagtgaacaagacaaacacaaaggtcaaagccagaaatcttcggctgcaagaacatcctaa

SEQ ID NO: 242017 - DNA, 285 bp, Klebsiella pneumoniae
atggaaccagtttatatttctcactcgattgacgaaccaccaaagttatttttctggtctgtcgatgaagctatgccatttttcgtagcactcgcggttggaattatcactggacgattattaccgatgataattctgggtgtagttgtttcacgtgtatacggtggttttctgtcgcgagcctctgagaaatattttatgcacctatgttactggaaattcggagtcacattcggtggtggcacttttgtacctgaatccttcgaccgggagtttattgtatga

SEQ ID NO: 242018 - DNA, 819 bp, Klebsiella pneumoniae
atgaaaaagaacatttttaactctcttatatttggtcttccgctcattattatggcaaccactgcggcgtactttacctaccaaattaaccaacagtcacaactcctgaatgatctggcgattgttgcagagacccaccaacccgtagtcaacaacaaaagcgagctactggatgcatttgcaaaatacatgaatgcggcaggacttaagcctgaatcccagaaacaagctaatgttggttaccggactggcaataaacccgataccgcctatgcaccctcaacagacaatgaacgtatttacggaaacccggatgctcagttctatatcattgagtattccgactttgaatgtccctactgcaaacaacatttccctatcgttatggatctcgtggattcatcgcaagggaatattgcgatggtcttcaaacatgttcctgttcacgggcaggcttcccgaactgaggctttagctgcggagtgcgctgttgagcaaggtggaaatccatctttcttccagttatcaaaagcattgttccgctacagccaatctgacggccacggtcttagcgcacctcttgaccaaatcgcccgcgaagctggtttagatgcgaaccgcttacttgaatgtatcaatgctgccaggccgtcgagcaagatagccgacgacgttcatgaagccggtcagcttggtatccaaaagacccctacaaacattgttgtatatggagataaatcggccattgttcagggcgcagttgatggcgctggtcttatgcagatgatggctcagcttgctggctctggtcagaaatag

SEQ ID NO: 242019 - DNA, 294 bp, Klebsiella pneumoniae
atgactaattcaaaaccatttattctttctgccctgctctgcctgacgtttaccgtagggatgattagctatttactaatttctgatgtcccagaaaaaatccgtatcctcaatcagaagataacggttgctacctacccccagtcacgggatgtcctgaacaaagacatggctgaaatcatactgccatatcttaaaaagcagaaagcagctgaggcgtctcaggtcgaagtcaaaaagccaaacgaaatctatacgccggaacaattgcagcaatcaagaggctacaaatga

SEQ ID NO: 242020 - DNA, 651 bp, Klebsiella pneumoniae
atgtctgacaagctgaatgaagagaagtggccaaagactataaagacgctgatcatctggagctcggcgatactgctctttatctctgtcttcttccctgttgagtatttcaagtctaatgcacttaaggaaatagcctggggccacaagatgatcggcgaaaaggatttcattatggttttgcaaaaggcgcgggacaattatacggaatcatttgtaaatacggggattgacaaagctctaaaggatttttaccagcttcccccaagcgacatggctaaccacggcgggcctctgaagtactttattggccttttccagaatattgccgaaaacctgaattattggctttacatgattatgtatcgtttaacactggacatgtactggttgccgtacatgaccgttgttatcatgccatctttgttcgcaggcataatgcggtggatggcaaaaagatataactttggatatgccagcccgtttcttaaccgtcgtagcatggtattgattggctggggtgtttatagcgttcttttatcgctttttataccgttacctgtgcctccaatgatcggagcactcataatgattgtgatgattccgattggttcatctctacttatttcaaacctaccaaaacgcatttaa

SEQ ID NO: 242021 - DNA, 387 bp, Klebsiella pneumoniae
atgattaaaaccaaaaatctattaaagcgtaaagatgatctcgcctcatatgacgggctaaccatgatctggccatgtgttgatggcatcactgtgcgaatgttggctctgttgaaaacgctagcgcatgaagagcgtgttggtgcagccgtgagctcagccatcaaggcttatcatcaggacatcgatgaggagctaaatgactgggaacgtcttgctatctatatcattgagctcggcttattcgtcagccgtgaacttcaatttgctttaaatctgcacgaaattacttcacggataaacctaccgaggaagcttactcacgaactaatgatccaggcagggaggaaggccaggattggggaggtcgaatgtctgacaagctga

SEQ ID NO: 242022 - DNA, 1971 bp, Klebsiella pneumoniae
atgagtgagtggaaatataacttacgttggcgcaccaattttgaaggtcttgagcttcttggctggacagctggcatagccgccactatcggggttaatacactttttaatatgccatcactgccctgctatctttctgttgccgtacaagccgcgtatggcatacgtagtctccctgcggcatgggatatatacactcataagcgtcgactcaaacgcaaacctaaaccgctcgtcatggacatgaaatcatttataaaacagatgattcgtgagcctgaaagttatctaatcggcaagggctttgagtgggggcaaaatgaagggcaactggcttcagagctgataaaacgtgatatcaagaaatttatagctaagccgccaaaaaatttcatgggtctcggttggatacatgcgcttggtaagaaaaccgaatgggtcggtatttcggaagagcttttaacattgcatactctggtaactggtacaaccggttcaggtaaaacaacatatttcaaactgcttattcttcaagctgcactaaaaaaacaaccgcttattctcatagatccaaaaaatgacgaagagctcgcagaatggatgaagttttgtctcgaattggtagatcggtcgtcaaaatataattatgtttctttagctcatcctgagaagtcagctcgaatttctcctattactaactacacgcaggccggtgaagttgccaacaggatcacatcggttattcaacgagcagacagtacgagtgacccgtttgtatcgtttggtattatgtcattgactactgttgttgagttgatgaagatttgtgaaatcaaaccaacactccgtaatatcaaatcacaactaagcgctgatatctcttcgttagcatcgctattgattctggcaatcactaagttcgggcacaagacattaggtgaatcggattttgacatcatcttgcaggcgaagattgaacgatactcatctaaaattaaaggcccgaaagaaattgctgagatttgtgctgatatttatcgtaatgatattaagggtaataaagggaaaggtgatacttctattgaggcggggattgatatgttcggccatcagcgcgaacacttccagaaaatgattttgaacgtaatgcctatactcagccagttaacccagggctttatgtcagaactattatcccctgacagtaatgatgaagacgaactgaatgacatgcgtccaatttctaacattcaggatatcatcactaccgggggtatgttgtatttagggttgaattcacttgcagatgcagaaacgggttcagctgtgggttcgattttcctttccgatatcacatcggtcagttctacggtatacaactttttgaaacctggtggccaggacttggcttcagttatggtactgatagatgaagcagcagaggtaatcaacgaccaggtcattaaaatgttgaataaaacccgtggtgctggtttccggttatttatttcatcgcaatcaacatctgacttcgaagcccgcctcggttcagaagccaaaatgaagcaggttgttaccaataccaaccactttacggcgctgcgtacaccagaccctgatgcccaagaagcaattatgaagcgcgtccccccgactaaatttaaatacattatgcgtggtcatggttctagcgcgggcgctgatcctgagcagattaccggtagtgtcggggagcgtttgatggaggaagaaggcgagctattccagtcccaattgctaggttggctaccaaacctagaatttatggctattaatcaagcaaacaaaattgttaaaggtaaagtacctatcattttaatgccaaagaacgattcagagctaattagtatcaggaaattggctaaaaagttcctttctatctacgaacgaaaacagaaagttcgtggtgaaacatcacgtattagcgcatag

SEQ ID NO: 242023 - DNA, 2703 bp, Klebsiella pneumoniae
atgctgagactcattaaaaatgttctgaatatcttttcgcctgataacaaaaaggctaccactgatctattcggtgacgaaatcgatacgtcagtagatgaagaaatcggaaaactcatttcttcacgagataatatgcgctatccggcaagcgaaatcggattcccggctcaagtaccgggtgagtacgtattacgtcattaccagaaaccgcttgtgatggcgattaaacgagagctggatataagggactctgagttcaatcagcttattcttccaatgctggtaaatttcgctaactttgttcatctcttccctgcatctgaaaaccatcaccaccgtgctgcaaccggtttgttacgtcattcattagaagtgtgtttccagtgtatccggcgttctaaaaacattgagttcgattcaatggcggttcccgtacataaatcaaatcgggcattagcatggcgacttgcagttgcagctggtgggctacttcatgacctcgggaaaccatttaccgattttgaagtatggaacgaagacgggaaaattcactggccaccaggccatgaaccaatccatatctgggcaaaagagaacaacgtaaaaagatactatcttgtatggaaaccaggccgtcaccgtcagcacacctccagcacgagcaatatgctgttgatgatcatgccaaaagaaatgcatgtttacttgctcaacggcgggaatgatattttcaatgaactgacccgggcactgaatgccagtgcgcagctcaatgcagaaaagcttagtggtcaggacgtcaaaaacaaaattctcactaccattaaggccgcagattcagcatccgttaactatgatatgcggcaatacgccggtgatgcgattcgtgcaagccagtcaggcgtacctgcggttcagcgggttgttgatgccatgcgccatagattgaaaaaaggtgattggatcccgaacaagccaggaagccctgtatgggtgactacctatggcgtattcatcgtctggggtgttgcggtcaaggatattattgagactgtcaggaactccggctctgttattccacaaacccagaacagtctggctgacctgatgctgagttatcatctctgtcgaccaaacgttcaccaggacgatgacacggcatactggcgtattgcccctcatattttgaatgataaaagctcaagagaaagcaaagaccctaaagtggcgctgagctgcatccttctgatatctccagaagtactatttgtcgatactgttgaccctctaccatgcagcagccgcatccgtatcgaagggaaatgggtggaatacctgaccgggaggccaaaccagccgaaacttgtcgaaagcgaaccctacattggacagaaacctgttccgtcagccgggataccgaaggaagtcgatccctcagttttacagggtgggacaatcattgatgaagaacaggaatcgccactggcgagtatttttggaaaccgacaggttacgccggaaaacgcccacgaactgttgcataagctcaatttgctttctgatgaagactacaatcgtgttaaggaaagacataccagtcccaaaaatccaaatgactgtcaggatggcgctaattcaccaacaactgagccggtggtcagcggtgagccaaatgagctcaaagctaatgaaccaaagccagtaccggagagtaatgaacccaaacgccgactttcgctcaaagaaaccctggcatcagcacaaacagaaattgagttctctgcacccggttcatttacaaaagaaccaaaccataaaactctgaacgaaactcttgagtttcattcaatcatcaacacgtataatagcaacgaaccaacttcaggcgatgaaatcgatcagcccacgcgctcacctacccggcaggcaataaaggaaattcagctgcaccaggatgctgccgacaccggcatacagtctggtgaggtaatagatgattattcaatataccaagattatgattccatgtggcaggatgacgtgaaagctgataacgattatggttactcggctcatgcggatacatcagacaacgtaccggctaatgttaaattttacgataaattcagccagctatacgtatctggtcttgaagctgcaaaagaatttctcgttaaatatgttgccgaccacgcaaacgacctatttattgaatcaggccacttaatcattactgttgataaagattttgacgaacgtaatttttcgctacttcaggactcgaactggttatggcaaaggtttatggaagctccagcccagtattattttcaccgtactcagaagtgcttttatctcagaaaagaacttaataatgatatcgacttgctgatggacgggaagtttaaccatctgctttactctgctttaactgatgtttcagataaagattacgacattacagatttatgtaatgagatgatttcaaaaggtatgttgaagcgaacctattctggagagcctgttattgccataagcgttgccttaaagcgacgtattgcagatgaactcggcattgatattactcaattgcaaaaaattatgcttatgcactttgatttctattcaaagaccggtgttgactacattcttcctaatagtgaaagaatgcataatcaaatggtggataaagatgagtga

SEQ ID NO: 242024 - DNA, 570 bp, Klebsiella pneumoniae
atgaaattggctaataaaattgtttatcccctgctggtggttattaccggcgtaatcaccagcggttgcagtgggtcaggtaaacctcaacgtacttacctcgacgaaacgcgcaatcttccggccagggccgagtacccttaccagtatcagtactcagaatcctggcgtagtactgaacgcggtggcgcggcgatacgttacccagggtatgagcacacgctcgtgagtccgtatgcaatcaatgacccatcagggaagcgatatgtggctcatgacaattacacccaggtcttgctcacttcagtggctaatacaaagtatgccaatgggccgcgtggcacgttcacccagaccccagcattttgcggggaaaatacctttctccttcctaataacacacagaacgccagcagggccgaatacctccgcatcaaagataaatactgctcaacacctggttatcggttaagtgcccacgaattaagtgtgctttccagtggagaaccggaagagctgcggaaatatcgaattcagatgcagatcgataaccaacaacctaagtcctaa

SEQ ID NO: 242025 - DNA, 900 bp, Klebsiella pneumoniae
atggataagcagagaaacgaaaagtgcagttctggaaataaatcggtttttgcctgggccgggggaatcgttgttgtaatcggaatgatctggttgatggtaattagttttatcacgtacaagacccaggtgatgaccaatcaactgctggataaaatgagcacatcgctggccacgaatcccgtggctcaatcgggagcaaagggaaatcttcaggatgaagtaaaagatgctctcaagtctatcgccgaccaaaagctcgctgaagaacgaaaggcactctataaaggctgggacaaagcaaataaaaatactgatggccgttatatctatggcgagccgggcgctcggttttcgctgatcaactatgaagatctggagtgtccattctgtaagcgcttcaaagaaacaccgaagtatatcgttgataccgcgacagccggggccgtaaactgggagtggcgtcactacccaatgtcattccatgagccggttgcatcgaaggccgcagctgttgctgagtgtattgcggagcagaaagggccgagtgctttctgggccgttactgattactggtttaaccatactgaaacgaacggtaaaggttttaaggatgcggacagtatcccagcactgtttgaggtagaccaggcgaagtatgatacctgtatgggcagtactgaagtgattaagcgcattaagcaggatatggaggccggttcagctgccggtgttgatggtacaccaacaacgattgtgcgagataatgtcaccggtaaagaagtgtctgttgtaggcgcacaacccttctcaaaattcgtagaagtgatccaggctatggttaccgattctcagaaagacacatcgggcgaaacctcaccgtcccaaccagaaaaatag

SEQ ID NO: 242026 - DNA, 1476 bp, Klebsiella pneumoniae
atgccggtaactgatgaacagaacgtgatcataggcttcaaacccacgcctggcagtattgtttcagtacaggcatacgcgggatctggtaagacctttacactaaaagaattcgcagacgcaaacccttcactcaaaatactctatatcgtctttaataaagcgattaaggacgatgcaaaaaagaaatttcccaaaaacgtcgagtgtaaaacatctcatggtttagccgcagctcgctacaagcactttgctcataaatacagacaatttatatccgtgagcgaataccgtactatgatggatgaagaggactggagagtggttaagcttgcaataaacgggcttacccattttatgaattcagatgaacacgatattaccgccgaacacgtacttaaagatttaagtaaggccgataaaatatctcaaagcaagctggatcaagcgctacgtgcagcaaaacgtacatggcaaatgcaatctgacccgctcaacgatgcctattgctcaccgaataccatcctcaagttgttccagttatcgaacccagcccttgaccagttctacaatgttattctcttcgacgaatcgcaggatgcaaatccggtaacgatcgatatcgttctgagaaacaactgctgcaaagtctttgtcggcgaccagcaccaggtgattaaccggtggcgcggcgcagaaaacgctcttgaggtagttgagggccacggggctcaggttatgcgcctgactaaatccttccggtttgggcctcttgttgctgccctggccaacgttgtgctgtcgatgaagggagaaactttccccctggtaggcctgggtagtcttgatgctatcgttgaaccatcagcgatactggatcaaaagttttacgccatcatcagccgtacctacatgggagtcatacaatctgcctacgaggcgattatgtggggtaagcgggtgatgtggaacggaggtatatccaaataccgtctcgatgagctccttgatttacacgcgctgaaaacaggcaacattgccgctattaaaaataaccgtatcgctacggaatacggtaactgggcaaatttttatgagatcgcagaaaccactaaggacgtggacatggtgcgggcgattaagctaatggaagtgtatgacgatatccccggaatggttgagaccatgaggatgaatgaagccaaatcagaaaaggaagctgacctactcgttaccacggcccacacatcgaagggaaaggaatttgaccatgtcattatcaatgacgactttccatccattatagaagcagttgtgatgaagaagccccgggaagtaataattgatgagttaaatctgctgtacgtaaccatcaccagaacgaagaaatcagtaaacatcaatacttcgttaatggagctattagaggaataccgaagtcgtattgaacgaaatgtttcagtggtgataatttga

SEQ ID NO: 242027 - DNA, 288 bp, Klebsiella pneumoniae
atgttttatttatcatcctttgtctggatgtcaatctggagcctgatttcgatttatgtttatcgcaaagataaaaaagctgcgactgctggtgagtaccgcgtggatgaattgacgctggatgcgctcattgtgctcggaggttggcccggttgtttcatcgctcaacggatgtttaaacacaaaacgcgcagtgcttaccaacgtcggttccgggtcattgtagcggtctggatagttctttacattggattatggaattttctatgggcgggaaataaaatataa

SEQ ID NO: 242028 - DNA, 336 bp, Klebsiella pneumoniae
atgaacgctatcaaattcgagaagtttaaaaccccgctggtgatcaccggcattctgattctggccattgttaccgctcacgcatctggttcgacccaggaaggttttgacgatgtatggatcaaaatctctgattacatgcagggttctctgggtaaggtactgatcggtcttatcgttctggtgggtctcgcagctgccgttgtacgtcagagtctgatgtcactggcggttgctgttggtggtgcgatctccctgtactactccccggacattatcaatggcatgatggccgcatcccatgcggtgcaaaccacgttaccgacattcatgtag

SEQ ID NO: 242029 - DNA, 570 bp, Klebsiella pneumoniae
atgttgaaatcagaggtattgtttggttcactgacatcattggcattattgtttttcttaaatacagctcaagctgatagcccaacagaggtgatgctaccatctgaaggtgtgagagtcgttgtcggattttcgcctgaagggtctgcacagaaagccatactggatctgatcaattcagctcagcaggaaatccgtatgggggcatactcatttacgtcacccgtaattgcgaaagcattagttaatgcccaccgaaggggtgtagatgtcaggatcgtagtcgacaaagaacaaaataaaaaccgatatgccgtttccactatgaatgccgtggctaacgcgggtatcccgttacggacgaatgatcaatttcttctgcaccatgataagtatttgtacatcgaccgggtatctgttgagaccgggagttttaattattccagttcagctatgaaaaatagtgaaaatagcatcgttctctataatgtcccggatgtcacagcgcagtatctggcccactgggaatcgcgttgggctggtggggaggattacaaacctaattattga

SEQ ID NO: 242030 - DNA, 693 bp, Klebsiella pneumoniae
atgacagattcatgcatcgacggcttaaggctggtttccaccagttaccaaattggttttccctggaatgaatggtcagagtcgaaatcctacatcgtatgccgagccctggtagaccagggcgtgattgcaggaacggccactatagggacacgtcgaaaaatggtcaaagaacgcatcaatccaggagatcgtgggatataccagataactgaaacgcagtatggctggatagcacttaacggaggtggagtgctcgatccttgtggctttcttggtaagccattatccggcccggaaccccagttttgtatccttgagaatgatgagtgctatatccggggtataaatcccgttcagtgccccagaactcacttacctgagcatcttgtaagtgatgagttattccctctcacacgcggtgttatgcgcgatacatgcagccgcctgctggggtacaggttgcatatacagggattgactatgtccgaagcagcataccttctgtcaagaccgcttaccgattttgaccggtacagccgccaggtgtatgaatactttattaaaatggggctaagcagcatgatgccattaagcaacataaaactgctgcatccgaatttagcccgtaaaggatggcgttcattttataacgaccttgatatggacgaacttcacgtatttctgaaatga

SEQ ID NO: 242031 - DNA, 1329 bp, Klebsiella pneumoniae
atgacgagtgaaaaacgtggcacaagtgctgaatacggccaggagaaattacgtgaacgcgcagcgcagaatgctggagatgaaaatcccagcgttaagatgcgaatttctaaaaaaaccttgtgtatcctggttgccggtctctttgcggcaggcacgttaggcgcatttatttcaatgcatggtaagccagacaaagaaccgaacctatctatcgtcgaagttgcaaagagcgggattagcgttaacccggatattgcaaaacaacatgctatcgatgcggatgacgatgaccttgataccggtgatactgggcctcagccaacactgacacttcctgtcgcaaataatgaacaggaaccagcatcagtcactcctgatgaagacaaaagtgaacctgctgtcacaaagcaagatagcgccggtgtttcacctgcatcgtctgataaccttggcgatcagatgctaaaaatggccacaaccacaccaccagctaacccggatgcaaattcaccagttgtatccaagtcggcccctgctacgcagtcattgattgactcaattaaggctgaacctggatttactgacggtagtgaagtttcacaaaacgcagaacaacctggaactgttgagataactcctgcccaggaaattgcaaaaaaagcactttctggggccactagtgaaacaccagttcctgctcctactccggcagaaccaaatcaacacgctgtggcgcagattaacccggttctaacacctccatcgccttctcaacgacaagttgtaggcgttgaaaacaccgccaaagatacttctggccatcaaattgaccccgctgagttcggttatacagaacccgctaacactgcggctacgtctgaatataaagctgcatcagaaggctatacagcccaacaatttgtagttcaggagaagaatacccttactggtgctgacctggactatagtggtcactttaaatcggttgaatacaactcgcagggacaaaacacggtattcgtttattctaccttttcctcaaaagtattcctgttgccatcgaaaggtaaggtcaacgtgtacctttctgatacaaaaggttggtcagtctcactcctcccaggaaatattctgcgggtacagcggtcagagaataagggggcttggtcgcaggcaaccgacctctttgtactcaatggcgataactcctactcattgattcttcaggcagtcggtgatcctgataaacgaaccgattccctcaaattcacgaaaaaggaactttctaaacaaacggacaagctggccaaaaaatccaaagcctga

SEQ ID NO: 242032 - DNA, 1095 bp, Klebsiella pneumoniae
atgaatggtgaccatatggttttcagaaaattggcagcaaaaggaatgtcccgaagtgccaaattccagtggtgcttttttcttgtaacgtcattagtcttatactttctccatgatggcccgttagtcattgcgggcctctttattacgcaattatctctccagatgaccctgacccgtacaggtagggaagtctccggcgtgatttttaatatccagtcatggagaaacagtggagctagccagaaaacctatttattccgatggtatatcggattcccgatctcatgcttgttatatattctttctctgactaattatgtgtacataccaggcgatttgtattaccagtttattgcaagcagcactgataaccttgccctcgtaatgactcgctttgctgtgggtgtaagcaatatactccccgacatccttcgtggcacatctttaacctttgcgataatgatgtttgtaggaacattgcttaaaactgttcaacttgctgaagtacggcgaatttactcttctattcaggatgcaaatgatgctcaaaatatcctctcgaatatgtcgtgggagcaatttgaaaagattataagactgcatttcgagctcaacggctacaaggccactctgaccaatacaggagctgacggcggagtcgacattctgctgcataaaggtggccaccgcgaaatggtacagtgcaaactgtggaaaaccagcaaggttggtgtatcagtagtccgtgaaatttatggtgtggtgcaagccgatgcatatgagcggggctatatcataacctccgggttcttcactcaggatgcatggacattcgctctcagcgcaaacgttaaaggaacattatcacttatcgatggttccagacttctgaaaatcatcaaagataaagacatccccacccctccccctgagataattaatgttgttcctggtgagaatgaaataaacgatccgaatgccatacctaactgtccccgctgccatagcaaaatggttagaagaatgtcgaacggtacttatttctatggttgttcggtttatcccatttgcaagggaacccgtaactactag

SEQ ID NO: 242033 - DNA, 369 bp, Klebsiella pneumoniae
atgaactctctactccagcgtgttctgatttacgccattgtgattctgatatgtagtgtttattgcgtcctgtactttgtaccaatcacttccataaagacgatcaacgccattggcattgcgaacttagtggttctggcgttactcacatggttgttagtaagaccacgtttgttccgattgtggagtgggtatcttgtactgtcagcaatctatttaggtgcgatataccctgattatccatatgttgaagaaatcatcgtttatacatttgccctgatctgtttatcagtcatggcatacgatgtaatcattgataactgtaatgggatactgaggcgcaccttccttagaattaattctgaatga

SEQ ID NO: 242034 - DNA, 636 bp, Klebsiella pneumoniae
atgatgatcgaaaccttttacagaaccgatgatatgaaggtcagaaacacttacgaggaggtgctgtctgcctaccaattgtggttcaggttaacaaaccagctctgtaacgatgagggattcgaaggttttactgctcatgatttttgtgtgccagatttgtttctacgttcagtcgaatgtcatatccagcgggtgtctggtttccgtcaattcaaagagcaatgcttaattagccccgacaatactattccgtttgccctaagaacagaccatgagcatggctctgcgctattcaataagtttaatggtatatcgaaagctgcattgacatcgctgggtattgatcccatccgctttggtaacccaccattcggttttgcgaaagcagtatttttgattctgaatattcaccatgaagcaaaattaaatggattagttgggtacagccagttgtgggcacttgaaaaccagctcgacgaaattctttttgtttgttccttacccgttgtaggctgcgggagaattccattttatgagactccggccattcccccttactggttacctatcacgggaactgaagccatcgacctctttaatacgcacaacaccaaaatgaggaagagaggatga

SEQ ID NO: 242035 - DNA, 393 bp, Klebsiella pneumoniae
atggatgagacctctgaggtttttgggtgtaccagggggattgtcccagtaacgggaatcaagcgagtggtctcggttgtcaccgaccataaagtaatatccttcgggaataatccattttttacccgtttgtacatagccgatacggttatcggtctcgaagatataactttgaccggcagtgtcggtctctgcctggtattgagttgtaaaaccatcttttttaatcaggctaccgttttgtttaccgtttatcgagaagactttatcttcgttgtatgtgacggtatcgccaggaatacccaatacgcgtttgacgtagtaaaccccaggaacggatggagcgttaaaaacgagtacgtccccacgctgaacagcgcgatgatcgaataa

SEQ ID NO: 242036 - DNA, 147 bp, Klebsiella pneumoniae
atgagcagtgatgccattaagatggtagaagcctttgtcaaagacccattgagctacgatagattcgggccaggcttatttcaaatcagaaatgtgtcctcaacatcaatgggcatgaaatgtctatcgatgaagcagttaagatga

SEQ ID NO: 242037 - DNA, 627 bp, Klebsiella pneumoniae
atgagtgatattgaaaaggggctcttaggtgaaatttacgagcttatcgacgcaatgaccaaagcggaagccaatttctcaccgggaaaaaagaatctttttcgtcgggtgttcgattatttaaccggttcggaaattttgcggaaagtccagttagatatttatagcaaagtagtcatgaaactatgtgaacgcataccagatcatttcaaaatgctaacctctcatgctgagatcacaaaagatctggaggcaatctatgcgcaagatattcatcaactggagattttcatagatgctgtcgagtcatatctgaaagataagaacgagtgtgactacaatgtcacaagcaatgagtatatggcaattaacaggctacggatcagaattaacaactttcagggtgtactggttggtttaaaactaagccgggtacaagcgcaaatgagctatgaaacagctatcgatgttaaagatagcctaagagatattaatgataatttgttgcctatgtgggaggggcaggtgaagagcattagtgccaatggtgtgtgtaatggcattgatgaagtggcacatgaaaaattcaagaaacttgtcaacaaattaaataagaacataaggtga

SEQ ID NO: 242038 - DNA, 1119 bp, Klebsiella pneumoniae
atgaaaaacattaatagtattattgatgtgtcagatgtcaaagtggctaaggaattcgacaaatatgctgttgatgtaagcatggaatcatcaataaaagatgcagtcagatctttccagattggtgatattgatgccgcgcataactttggacgattggaggacactactgatattaattatcttgataacctccttctcagcgtcagctcatcatctcagggcaagaagggtgagactctgaatgagattgttgcactggctcgtgaagtcagtaatgcagtcgaaccaagttatcttcaaaagaaactgtcacggataccgtatgttgggcctttcataatgaaagccatcggcattcattttagtgcaatgtcaagatttgattcagttaaaggacaaatcgatattttaacttcggatatagaaagcatatctgaagggttgtttgaaatgaataaaaatattgatggaatgtatgagcaagccttaacgagtgtaaaaagtacaggggttaacattgtagctgcttattaccttctggagaagttacaaacagttcaggtttctattcgtaaggaactaaaaactcaacctgataataccatgctgagcatggaagcaatgaatatcgaacatcaaatcgccctcataaccaaacgtcgaaatgacatgatcacagaacaacaaaaagcatttgaagacctgaagatgatgaaaatgatgaagttcaataacctttcgatggtagaccagtttgaaactattattaaagtaacgataccatcttctaaacgtagccatcttataattgaccaggccgaaagaagtgacaaaagctcattactgattcaggcaattggtgattctgtaaatcaacaagccagacgtcaagctttgttggtaaaagagagtagtatccgtgtagcaaaaacagctaatcgtacagtgtatgatgttgagacaattgattacatatcaaatcagatcaatgaggccggacgagaaattaaaaaaatccacgaccgtgccaaaacacaacatgtccagcttgaaacacgcgcagcgcaatggaaggagaaacgttttatgattgcgcaggaactgtcttctaaataa

SEQ ID NO: 242039 - DNA, 486 bp, Klebsiella pneumoniae
atggcaaaaatcaggcaaagcaatccatttgatgaggtagaaagggtaataagatgtaagcgcgatagaattatttatctttcgatagctttatccttactctttgccgttatattgctcatattgtggttttgtattccaacggatatttctatagatggacaggttgcccaggtttcaactgatattagtaaggttctgagtgctaatggatttggtgtggttacttcagatatctttgaatcacttggttccgacatggctctatacgccagtgtaataacatcattgataaccatgtttgcaattgcatggtcactgattaaaggtgatggtttcaatatcgaattgttcttcgcccttgtagttgtaaccaccggcttttcagtttttcgaacgctttatgattccgagtctgataggtacacgtattactctgaaaaagtaagctctgctatggaaggtgcgaacaagttcctgatatga

SEQ ID NO: 242040 - DNA, 177 bp, Klebsiella pneumoniae; identical to SEQ ID NO: 234138

SEQ ID NO: 242041 - DNA, 354 bp, Klebsiella pneumoniae
atgaaaaagtggattcttatcgcgctctgttgccttccaggggtagcttttgcggccaaccctggcggcataacattgcaatgcggtggttacaaattagagcttgttccagatgcactgttcagagttaatggtgaaacagttacctctcagaaaattaaaactctaggaaatggcaacggaatgaaggctagcatggggctcatgccagctaaggatggtaacaactacggattcgagtacatccgtcgccctggcaccgatacgcgtttcctgaacgtccagcttctacaaaatagcatggatgcaccgaaagttaacgggtccttcccttgcaaaaaggtgtctaactga

SEQ ID NO: 242042 - DNA, 411 bp, Klebsiella pneumoniae
atgcttgggctcgaagagtttgatggtgaaataaagaagactaagactgtacttttaattgagcttaagaaaggcggtttcactattggtcgtgatgagatgaatcaggcaagatcttatgtggaagatatttggcatactggtgtggggtcttcacgtccttttattaaagcatttgttgttggtgatacgatagataaatttgccagcaagtatcaagccgttggtaataatgaaaatgataagtttggcgaagttaaagctattacttttgatgaaatggttaggactgcgcaggctaggctttttaatttgcgggataaagtattccttagatacgacagcttagacaatgaaactacgatgagtaacgtcatcaatacccctacacaagataaatttagcatttaa

SEQ ID NO: 242043 - DNA, 963 bp, Klebsiella pneumoniae
atgaagatttcagtaattataccagcattcaatgctgaactttatatagaagaatgtattcaatcagttcttgataatgagtatcctgatgtagaaatcataatcataaacgatggttccacagaccgaacaggagatataataaactccttcaaagaaccttttattcataaaatccatactgaaaataaaggtcaatcagcagcacgaaatacaggcatcgataaagcaaccggtgattacattctttttttagatagtgacgacaaactaaacaaggaagcattgattaaattaaagaaagttatttcagagaagaatatagatatggtcttatttgaatctgatgttttctttgatgataactcattgacaaacaggttcaatcctacctatgaaagagcgcaatcattatcatataaattactcaccggcgttgatttctttaaaactgcaatgcacgaaaacaactatatcgtaagcccttgcctatatatattcaaaaaaaaccttaccatagacacaagatttaaggaaggtattattcatgaagacaacatatttacaacaatgctactgctgaataacaacccttccgtttactgtattaaagaaaagttataccaaagaagagtccggcatggttcggtaatgactcagaaaaaaggtgataaacacctcaatggatattacgcatgtgtttttgagttaacaaacaacccccctaaaaatcactcactagttcttacagagtataaaaaattcataacacacatgcttgactgtttcaaatacacaaatctagatattgccacacagaatagagaagaaatggagcaaatgcaaaatcaatatgaaaatacaataaatcaattgaatagtgacatttcggccttaaaacattcaacctcatggaggattacagccccattaagaaaaataaaagatatactcaaaaagtaa

SEQ ID NO: 242044 - DNA, 885 bp, Klebsiella pneumoniae
atgcaaaaagttgggaatactacagataccgcagatgcaaatggtgaatatacaaatggtaatgttgctaatggtataccacctacaataattaatgccgaaatgttgaatacatttcaacgggagttagttaacactgtcgaaggttccggtcttgttttagatccttctaataaccatcagttgcttgaggcaataaaaaaactgacttcgccaggtcgtttgcttggcattaaggttattacaagcacgcaaacatatacaccgtcaacaggaaccaagaaaatcataattgaaatggtcggtgggggaggtgctgggggtagtgttgacactggaacggcgagtggagatcaggtccctggtggggctgctgctggtggggaaggaggtgcttatggagccgcactgatagaccctgtatttagctcagcgttagtgaccgtaggtaaggctggaactgcatcaataaattcaccatctgatggtggaacaacatcaatctcagtgaatggtactgttttgttatcagtctcaggaggagctacaggaaccacaatgaaggggccttatgcttaccctgctacgcttggaggacggcggactacagctaatatatttactggtaattttttattaaaggtaaatggtaaatccggggggttaggtactattttttctcctgcaagtgctgctggtggagatggcggtgcaagttatctctcaaatggttcgcctcagggattattaaacaatgatactaatgtgtcggtgtatgagcctactggctatgggtgtggaggtacaggggcgtgtgcaacatccagaagtcaggctggtggatcggctacaggcggtttagtcataataaaagagtatgcataa

SEQ ID NO: 242045 - DNA, 867 bp, Klebsiella pneumoniae
gtgaatctacctcatctggcccagcgcctttttaatacaccgctggcgctgcacccaagtaaagctgaagtcatcatggcatccgttatggaccggtttggcatcagtaaaatcgaatcctctcttgccatggatgatgactggtatggatatgacgataaccgggggcgggaaacccgtagcgatccgggttatgacaatgtgttgggcgttgcggttatcccgattagcgggacgctggtgcaaaagctgggtagcctgcgtccgtacagtggcatgaccggctatgacggcattcgtcaggcctttctgaccgccatggaggatcccgatatttccgggatttgccttgatattgattcgcctggcggcgaggtcgcgggatgtttcgatctggtcgatgtcatttacggcgcccgcgggaaaaagcccattcatgcaattctgacggaatccgcttattccgctgcctatgccattgccagcgcagcggaccggatttctgttccccgcaccggcggcgtgggttcagtcggcgtgatcaccatgcaccttgactggacccagcggattaaagatgacggtctcaaggtcaccatcatcacctacggttctcgtaaggctgaggggtcaccgttgagagaactgtcagatgaagcgctggcagctattcagcaggatatcaacaccatgggcgaattgtttgtgaataccgtcgccagaaatcgggggattagcgcaaaggttatcaaaagtactcaggctgcctgttttatggctgctgatggtgtggaacttggactggctgatgaggtatgtcctcctgatgctgcgttcagaaacttacttgaaaaaacaggagcctga

SEQ ID NO: 242046 - DNA, 888 bp, Klebsiella pneumoniae
gtggttgatagtgcgaaaagaaaaagcagtggtcacataaaaaaaagaattagtgatgctgagtttctcattgaaaatcagaggtatgaagctgcgttattgctcttgttaattgcaattgatggttccgccataaaggtcttccctaaaggaacacaatccataagtcacccaacaaagaaaagaaatggtaagtgggtaaaaaatgaaatgtcaaatagtgagcgatatcaaagatttcttggagtaaggttgatgcaagagttgggtgtggcattacctgattcaacattctacgctcaaaatttaccacaattaacagattgggcagagagacctgaaacaatcatctataaagcatttagaaataacgatgtccatgaatcaaaaatccctgaagaatatcattatgtatatagtgaagatggtgtttctgaccaatttggtatttcttttgctagtggggagataaaatttaacaaaggtttcctaacgatgcttaaaaatgttgttgtgagggccgagtgcaatagaagtgaattctcaagtaaattcattgtattgactcataaggatggcttgtctattgaagattatattgataagttaagtgatgagcatggcattactaaaggtcgaattgcaattttagttaggttgatgaattatttggatgaagaagcatatacactttcaaatggcgacctaaggttgcttttgaattctttaattgaagaacatcttaatggtagtaacctcactgggctgtgctcggcaactgcttttattgacaaacctcctctatgtacgcgggaagattggatgactaatgatggggttgaatttattcgaactataaaaagtgaactcaatttaactgaaggttag

SEQ ID NO: 242047 - DNA, 195 bp, Klebsiella pneumoniae
atgaacggaaaaatactcatactgtcaacagcaacggggatcctggcaacctgtctggttttcctgatcgccgatgtcttttttaacgtactgccagatgataccagcgctgttgtaatcgcgctgttcatcgggagctgcacccatcttctgatgcgccacctccttgaccggagcccaggtaaattcaggtaa

SEQ ID NO: 242048 - DNA, 963 bp, Klebsiella pneumoniae
atgaaaaatcaaaccacattaccgcttacctcagaatctctctcttttcaaagagataatccaatccatgtcttcggtcatcgaaatcctgacagcgatgctatctgcagcgcgctggttgtggctgactggcttaattacactggtcgtcccgcaacgccctggcgcctgggggatatcaccccggaaacccgttacatcctcaatgtcgcgggtgtttcacaacctgatttactcaccgccgacttgactgataaaaccgtatggctggttgattttacggatgcggagcagggaccatcctcgttgatggacagcaacgtcatcggcatcattgaccatcatcgtattggcaccctcattacccgcaatccaccggatgtctgggtgcgggcggtaggatgctgcggaaccgtaattctctcaattctgatgcatgacattccgatgccgattacggcatctcaggcagtgttgctgatgggggcgatcctcagtgataccgttgcgctgactggccccaccaccaccactcaggatcaggaagccgtggcagttttgcgtgaaatcgccggtatcgattatgaccagtttgtgacagggctactgcgtgccaaaacagatataaccgggcaatccacatcggtattactcaatcgtgacgccaaaaattaccggatccatgatgtgccgctgttgttgtcacaaattgaggtacgcgacatggctgatattactcccctgttgcccgcgctgctgcaggaaatggataaaacctgtaaagacagttcgctggacatggttattttgatggtgacagacatcaccaaccggaactccgttttacttttttcagatagcagcctgacaggctctctccagatgtcgctgcccggtatgacaagccggaagaaagaaatcctgccctggctgaccgaccacttcgcttcttataagaggtga

SEQ ID NO: 242049 - DNA, 579 bp, Klebsiella pneumoniae
atgctgaatgaaattgaaactctgaacagaaaaattttccttgctatgaacgctaagcctggaacgcctgattcagctctggttattgcgaatttttttgcgaatacccttatttatgccataccatttattattatttttttatggtttgccggtaaagaaaaaggaaagatactggcgcttcgctcaacgttaacaatggtcattggtgtagtgttgagcctgattattggaaccttctggccgcatccaagaccatttatggttccgctgggctatgtctggttttcgcatacggcagattactcattcccgagtgatcatatgaccatttttgtgtgttttgcgcttgcgctgatcagcgcaaaggcagtacgtaccggcctggtggtgttgggcattagtattctggtcgcctggtcacgtatttatcttggcgtacattttcctctcgatatgataggaggtgtcatcacggggatggtgtctaatgctcttttctgccggttatggaaatataaaggtgaatatgtattctctttttttaaaacaatcagcttaaaattattcaaaatttaa

SEQ ID NO: 242050 - DNA, 780 bp, Klebsiella pneumoniae
atgaaagagatctgttccgcagattcgtcaacatttaaacatgtgcgttttgttctcacagacatggatgaaacgctgacttacaaggggcgccttgcggctgaaacctatatggcgttggaacggttgcagaacgcgggagtcaaagtgataccggtcacagccgcgccagccggctggtgcgaccagatggcacggatgtggccagttgatggtgtcattggtgaaaatggcggtgtgtttttcaggaggcaaaatgacggtcatggcattgagcgtttcttctggcacggcacagaaaaatatcctgacgtcgctgagcgcctgacgcaaattggggaacagataaaaagggaaattcctgccgctcattttgccgacgatcaacctttcaggatgacgtccattgcctttgctaaaccgccagaagcccatcagtgttcattaatacttaacgcattgacgcaagcaggtgcgacaaccaccgtaaacaatctctggattcttggttggtctggagagtatgacaagttatctatggcccgacgagtgctcagggattattacgatctcgacattgatgccgaacgttctgccgtattgtatagcggcgactcgacgaatgatgcgccgatgttttcattctttgaacatacggtgggagtgagcacggtatcagatttccttgatcaaatcccgaaacctccacagtggatcacccgtggcccgggaggtgctggttttgtggaaattgcagatgcggtaattgccgccagataa

SEQ ID NO: 242051 - DNA, 258 bp, Klebsiella pneumoniae
atgacaattcaaacttgcccagtatgccatggccgagacggcctattcgaggttacctgcccggagtgcgatggatcgggttacagtcctgaagaagacaaaccctttgcacaatgccacacctgttatggtgatggtacaactgaaacgtcaatctgcccccactgcggtggtgtgggcgaagttgacgatgaagaagaagacgaatatgaagaggaagatgatgatgaagaggactgggacgaggagaaggactaa

SEQ ID NO: 242052 - DNA, 213 bp, Klebsiella pneumoniae
atgttggtaataaagtacaaggctactcggaaacgggtggccttgaccgatactcgaatttatgcccgtgcgcttgaggacaccgtacttgaggacgcaattcagcaggcggcgaaccggttttatctcgccgatacgcgttatgctgcgcactatgaaccgggcggtgatgagtatatttccggagcgctgaccgaagcgttgttgccttga

SEQ ID NO: 242053 - DNA, 894 bp, Klebsiella pneumoniae
atgaacgaagatgagaacgaaagtttcaatagatggagttgtcttgatccaaatacaaattcttatcgagtttttaacaaacaccattgtgaaataaataattatatttggagctttgtaccattacaaagctttggggagtatttagtaaggcatgataaagctgataaaactattcatgatatatttcatgtgtccgggatagactctagaagagtagagaaaagtaaagcactttggatgaaaaacttcaagagcttccagaatttatgctatataaatgctttaacctcaatcctttcatatttggaattttatataaaaaggattggcacaatttccttgttatcagacccaggtgtcatgattggagaatctagggcagttgatgggacgaagttaattaaaaacaccaaagcagtgaacactgaaaaaataataacctcccttgtgaagggtacttggtatgatagggctaggaatttcgaattggtatttttggaattaccatcctcaattcgtgataacattgaaacattggagaaaatcagaaaaataagaaatcgagcggcgcattcattcagcagaatggataatggcgtctttgttgatcgagtggaagataaattccatgacaaggttgagttggaatcattgaagaaatacatgtcactaattagcgatatagcagtagatatagataaacagctcttaagaaataacattggagaatttgaatcaatatatatctatcacagcaaccaagacaaatttcgagggttcaataatgaaaaagctcgacaatttggtactttgttaaacagcagctatgttggtaacatccgaagcaagaaattttgcaagcaattaattgactattatagcggcttgtag

SEQ ID NO: 242054 - DNA, 630 bp, Klebsiella pneumoniae
atgccgagcataagaaagcatcgctcttttatctctctttcgcgtcgaaaacgtcggcaaaaagtgattcagctgaaaaatcgtctccggaatactcgtcatatctatggtggcatcttctacgatgaatgcgatatagatcaatattataacagcaaagattatatctggaactggagcgatatctattttttaggtctccagcctgacgtattatggaatgctgaaatcattaccacgcagaccgcttttaatgatgtagttggttcattagcctttgaagaagcctacagtttgttgaatacacatcagcgtgaagaagaatttaggctagataccatgcaacgcgatagtccaaggcatcttactcgctatgcaatattcaatggattaactttttctgagtatctttcgaagcgagaacaagaaatagcgcttaatactcccatacaaatttacagtgagtaccgttacttacctggctattcctacggaatcggccttaaaatgattgttgatgcgccagctttgaacgtggatgtcatagaggctgttatcagagattttcgccgtcgtggtgaatccgaatggcaatcaaatgtagttatttcgactccctcacagttatag

SEQ ID NO: 242055 - DNA, 1416 bp, Klebsiella pneumoniae
atgagtgtggatgccgttttaaatgccactaaaggcctgattgtagcgcctgccggatgcggcaaaacccacctgattactgacgctctgagtgttgcacaaagtaagccgtatctcgtgctgacgcatacaactgcaggtgtaacggcactcaaaaagcgattgagtcgttttgcaattcctccgcgaaactatattgtgacaacaatcgatggatgggcgctgaagatagcaggctgtttcccgggattgtgcccgcttgacgttggtcctgaaaatccaacccttttctacccttctcttcgccgtgccgtactgaacttgattgttaacggtaatattagcgaaatcatcacagctacttactcgcgtttgctggtcgatgaataccaggactgcaatagtgaacagcatgaactgacttgtgcgctttcacgtttgctaccaacggtcgtctttggtgacccgatgcaatgtatcttcagcttcagcggccctatgcctgactggacccgaaccgttgagacttttttccctactctggcaaccttgcagacgccctggcgctggaacaatgcccaaaccccagatttgggccaatggatccttgagcaaagacatcgtttacttcgccgggagcgcattgacttaaagtcttgtcctgaatatgtccgttttcatcctctttcacgaaatcacaatgacaatatccagcgccagcagcgcgaatattactcgctgctgcgacatttccccaacgactcgattttggttatgggtgattcacgaagagcttcatcccggcatcaatttgcacaacgtattaatggtattgatgttgttgaacccgttgatctgactgatgtgatgagaatggccacttcccttgacgaggctaataccgctaacgtgatgccaaatatattacaggcagcagctgagctgatgacaaatgtgggcgttagcgcaaccctacgcagaattggttctattcaagccggtcgaaacataacgcccccttcttcacttgaaattgcattagtagagcttgcactggcacccacccgacaaaacatgcgaacaacgcttctcttgcttgaagagaagtatgaaactcgcgtattcagggccggagcgctgcaagtgctaaaagatgcaataaatctgtccatcagttcacccgaaaaaagcattcatgaatcagcatctgtcattcgtgaacaacgcagataccagggagaaggacgtgtatcgcatcgctcaataggctcaacacttcttctgaaaggactggaatgcgatcacgcattaatactggatgcaggaaatatgggagcaagtgatttgtatgttgcactctccaggggggctaaatctgttacggtcttctcagtccgtgatgaattcacaccctga

SEQ ID NO: 242056 - DNA, 963 bp, Klebsiella pneumoniae
atgcttggcacgggatcgacccgtttactggtaagcgggttacagaaagctgtcgggcgtccagggaccatacttattgatgaagcggaatatgggctggagccctacagaataagccagctgttgcatcaactgggctcccgcgatcctgagcccacttcgcaggtattcatcaccactcattccccatatgttctccgggaactccaagcaacccaactatgtgtgctgcgaaaagtaaatcaaccggccccagagccttcacaccttttcctgacacttagcggagaagatcaggaacaggcaaccttacgggcctgcgctgaagccttctttagcaaagccgtgattgtgggtgaaggtgggactgaggttggttttatcagaggactggatttatacaggcaaagcagaggaagaacgggttttcaggatcaaggtgcctttgctaccgatggcgccggtggggaaaaatatttcaaacgcgccgaggtttttgcacgactggggtatcgtactgcattactaaaagactcagatattatctcgcaagcacacagactaaagacagaacattgccgggccaggggcgtgaccatttttgaatggggtaatggtttttcaacagagggagccctgctagcctggtgccctgttgagactatccgtgacattgttctcctcgctgcggctctgaacagccaacaacaggtggatcagcatattcagaactgctcccagggagcttataactttgaagcatgcactgaggaaccaacgatagaaatgagagagcccgtggcgcgtgcggcaggtgaatatggttggtttaaaacgatcggcaaggctgaagacctggcggaaaatattgtgggcccggctatcaatgatttttcacggccgttcaaggcgataatcagagatttgctggggtgggctgcagatgacggtgatcaacaatga

SEQ ID NO: 242057 - DNA, 972 bp, Klebsiella pneumoniae; identical to SEQ ID NO: 179289

SEQ ID NO: 242058 - DNA, 246 bp, Klebsiella pneumoniae; identical to SEQ ID NO: 179290

SEQ ID NO: 242059 - DNA, 1848 bp, Klebsiella pneumoniae; identical to SEQ ID NO: 184721

SEQ ID NO: 242060 - DNA, 432 bp, Klebsiella pneumoniae; identical to SEQ ID NO: 184720

SEQ ID NO: 242061 - DNA, 591 bp, Klebsiella pneumoniae; identical to SEQ ID NO: 184719

SEQ ID NO: 242062 - DNA, 1668 bp, Klebsiella pneumoniae
atgagacgatcaaaacgattcgaagtcctcgaaaagcggccagttaaccaggatggcctgattggtgaatggcctgaagaagggctgattgcaatgggtagcccctgggacccgccatcttccgtgaaagtcgaaaacgggcgcattgttgaactggacggcaaagcccgtgccgatttcgacatgattgatcggtttatcgccgattacgccatcaacattgaacagacagaacgcgcaatggccctggatgcgttgacgatttcacgcatgctggtggatatcaacgtggggcgggcagaaatcattaacatcaccaccgccattaccccggcgaaagcggtggaagtgatggcccacatgaacgtggtggaaatgatgatggcgttgcagaaaatgcgcgcgcggcgtacgccttccaatcagtgccatgtaaccaacctgaaagacaacccggtgcaaattgcggcggatgcagccgaagcggggatccgcggattctccgaacaggaaaccaccgtcggcattgcccgctatgcgccgtttaatgccctggcgttgttggtgggctcgcaatctggccgtcctggcgtattaacccagtgctcagtggaagaagccaccgaactggagctgggtatgcgcgggtttaccagctatgcggaaaccgtctccgtgtacggtactgaagcggtgttcaccgatggcgatgacacaccgtggtcgaaagcctttctggcgtctgcctacgcgtctcgcgggctgaaaatgcgctacacgtctggcacaggctcggaagcgctgatgggatattccgagagcaaatcgatgctttacctggagtcgcgctgcatctttatcaccaaaggtgccggggtgcaggggctgcaaaatggcgcggtaagctgcattggcatgaccggggcggtaccttccggtattcgtgcggtgctggcggaaaacctgattgcctccatgctcgacctggaagtggcctcagccaatgaccagacgttctcccactctgatattcgccgcacggcacgcacgctgatgcagatgctgccggggacggactttatcttctcaggctatagcgccgtaccgaactacgacaacatgtttgccgggtcgaatttcgacgccgaagactttgacgattacaacattctgcaacgcgacctgatggtcgatggcggtctgcgtccggtatcggaagaagagaccatcgccatccgcaataaagcggcccgcgcggtacaggccgtattccgtgaactggggctgcctgcggtgaccgatgaagaagtgacggcggcgacctatgcgcacggcagtaaagacatgccgccgcgtaatgtggtggaagatctgggcgcagtggaagagatgatgaaacgcaatatcaccgggctggatattgttaaggccctgagcgttaacggatttgatgatgtggccgacaatattctcaatatgctgcgccagcgtgtgaccggggattatctgcaaacctccgcgatcctcgaccgtgattttgacgtggtcagcgccgtaaacgatgtcaacgattaccaggggccgggtacgggctatcgaatttccccggaacgctgggaagagatcaaaaacattgccacggttatccagcctgacagcatcgagtaa

SEQ ID NO: 242063 - DNA, 429 bp, Klebsiella pneumoniae; identical to SEQ ID NO: 179293

SEQ ID NO: 242064 - DNA, 1164 bp, Klebsiella pneumoniae; identical to SEQ ID NO: 179294

SEQ ID NO: 242065 - DNA, 366 bp, Klebsiella pneumoniae; identical to SEQ ID NO: 179295

SEQ ID NO: 242066 - DNA, 549 bp, Klebsiella pneumoniae; identical to SEQ ID NO: 179296

SEQ ID NO: 242067 - DNA, 1926 bp, Klebsiella pneumoniae
atgaccacgcagaatgagcacgtcgaacaggccctgacgtcatttattgaccagtcctggcaccgctgcggcaagatgatgaagcgcgaattctggagtacgccgcatcaggctaaggggctgacgttccagtctatctgccgtcgtaagactgcgctgctgaccatcggccaggcggcgctggaggatgcctgggagtatatggacggtcgcccgtgcgccctgtttattctggatgagtctgcttgtgttctgacccgctgcggccacccggataccctggaggcgctggattctctggggttcatggccggtagttactgcgcggaaagtattattggtacctgttctctctctctggcgtcaatgatcgggcagccggtaaaaactctgggcgatcaacatcttaaacaggccttattcccctgggcattctgctctacgcccatttttgataacaatgggcgtttatttggctcgattgccctgtgttgtctggctgaggactcgggcgtggcagatctctctttgaccctggcgatggccagagaagtggggaattcgttgctgacggatagcttactggcggagtctaaccgccatctcaatcagatgtacggcctgctcgagagcatggatgacggtgtgatggcctggaatgagcagggcatattacagtttcttaatccccaggcggcgcggttattacacctcgatgcgcaggcgtgtcaggggaaaaatattaacgatctggtgacgctgcccgccctgcttcggcgggccaccaaacaggcgcgctccctcagccatgccgaagtcacgttcgaaagccagcaccagtttgtcgatgcggtcatcacgctaaaaccgattgtcgaagcgcagggaaccagtttcattctgctgctccatccggttgaacaaatgcgccagttaatgaccagccagttgggtaaggtgagccatacgttttctcagatgtcggcggacgatccggagacccggcggttgattcattttggtcgtcaggctgcgcggggcaatttcccggtactcatgtgcggggaagagggggttggtaaagagttaatcgcgcaggcaattcataacgaaagcgaacgggcggcgggcccgtttattgccgttaactgccagttatatgctgataatgcccttggcgtagatttcatgggcagttcggcaacggaagaagagaacgggcgtctgagtcgccttgagctggcgtccggtggcacactttttctggagaagatcgaatatctggccccggagctacagtccattttacttcaggtgatcaagcagggtgtggtgacgcgtctggatgcacggcggttgattccggtggatgttaaagtgattgccaccacgacgatggatctcggcaatctggtggaacaaaaccgttttagccgccagctttattacgcattacactcgtttgagatcagtattccaccgttgcgtgaacggcggaacagtatcccgtcgctggtgcatagccgcttgcgcacgctggagcggcgtttctcatctcggctaaaagttgacgacgatgcgctggcgcatctggtggcctattcgtggccgggaaatgattttgagctgaacagcatcgtggagaatattgctatcagcagcgagcacgggcacatccgcttaagcaatctgccagggtggctattcagcgaacaccccggtgtggcgggaaacagtacattaatgcccgccagtatgagcatttcggcaatagagaaagaagcgattattcacgccgccagagtgaccagtgggcgcgtacaggagatgtcacggttgctgaatattggccgcaccaccctgtggcgtaaactgaagcagtttgatattgatgtcactcagttcaagcatcgacatcaggattaa

SEQ ID NO: 242068 - DNA, 1101 bp, Klebsiella pneumoniae; identical to SEQ ID NO: 179298

SEQ ID NO: 242069 - DNA, 1071 bp, Klebsiella pneumoniae; identical to SEQ ID NO: 179299

SEQ ID NO: 242070 - DNA, 405 bp, Klebsiella pneumoniae; identical to SEQ ID NO: 77461

SEQ ID NO: 242071 - DNA, 600 bp, Klebsiella pneumoniae
ttgtatcgctgtggagaaattttcaccacccagagcgattttcttaccggcctcgaccgcgatatcggcgacgccgatcacggcctgaatatgcaccgcgggttcagcaaggtggtagaaaaattaccctccattgccgacaaagacattggctttattctgaagaatacaggcatggtgctgctttccaacgtggggggagccagtggcccgctgttcggaaccttttttatccgcgcagcccaggttacccaggctcgtcagaacctcagcgttgaggagctctatttgatgatccgcgaaggtgctgacggtgtggtgagccgggggaaagccgaacgaggtgataaaaccatgtgtgacgtctggctcccggtggcggattcactgcgtcacgccagcgaaaaccatttatcaatgaccgccgcgctggaagcggcctgcgaggtggcagaacaggccgcgcaatccaccattaccatgcaggcgcgtaaaggacgtgccagctacctgggggaacgcagtattggtcatcaggatccgggcgccacatcagcgctgtttatggtgcaaatgctggctgctgcggctaacgcgtaa

SEQ ID NO: 242072 - DNA, 1428 bp, Klebsiella pneumoniae; identical to SEQ ID NO: 179301

SEQ ID NO: 242073 - DNA, 978 bp, Klebsiella pneumoniae; identical to SEQ ID NO: 179302

SEQ ID NO: 242074 - DNA, 195 bp, Klebsiella pneumoniae; identical to SEQ ID NO: 185731

SEQ ID NO: 242075 - DNA, 642 bp, Klebsiella pneumoniae; identical to SEQ ID NO: 185729

SEQ ID NO: 242076 - DNA, 708 bp, Klebsiella pneumoniae; identical to SEQ ID NO: 185728

SEQ ID NO: 242077 - DNA, 552 bp, Klebsiella pneumoniae; identical to SEQ ID NO: 185727

SEQ ID NO: 242078 - DNA, 528 bp, Klebsiella pneumoniae; identical to SEQ ID NO: 185726

SEQ ID NO: 242079 - DNA, 645 bp, Klebsiella pneumoniae; identical to SEQ ID NO: 185725

SEQ ID NO: 242080 - DNA, 642 bp, Klebsiella pneumoniae; identical to SEQ ID NO: 185724

SEQ ID NO: 242081 - DNA, 1590 bp, Klebsiella pneumoniae; identical to SEQ ID NO: 185723

SEQ ID NO: 242082 - DNA, 1164 bp, Klebsiella pneumoniae; identical to SEQ ID NO: 185722

SEQ ID NO: 242083 - DNA, 1071 bp, Klebsiella pneumoniae; identical to SEQ ID NO: 185721

SEQ ID NO: 242084 - DNA, 2145 bp, Klebsiella pneumoniae; identical to SEQ ID NO: 185720

SEQ ID NO: 242085 - DNA, 504 bp, Klebsiella pneumoniae; identical to SEQ ID NO: 185719

SEQ ID NO: 242086 - DNA, 801 bp, Klebsiella pneumoniae
gtgcagactatcacctgcgatccctctgagcctgattatgaatcagccttcggctatccgttactgaggccagaacttgaagcaccactaggattacggacctggaatggcagcgatccggcacagcgttatggaatttatcgtaataacgttatggtttcactgaccgaagcccttgcggataatttcccgacgatacgtactcaggtcggggaggccttttttaccgccatgtccgcctgctatatccggcaacacctgccagactcaccggtactggcgttctatggtagcaacatgccggcgtttattgcggcctttgagccgctgagagattatccttggcttagcgacctggcgcggatggatatggcatttattcgcgcctcgcatgccggggatgcggctgcaccggtgtattcttctctgccggaagaactcatgatgcttaaggtcgtactgcatccatctctgcagctgatgtgctcatcctgggccatcttttctttgtggatgcgtgaccgcgacggggaccagggaatggaaactgaatttgttgatcctgctcagccgcagagtgtcatgctgtttcgcccgcacctggatgttatggtccagccaatacagttggccagtgcccgattcgttgatgcactgatggcaggtaaaacgctaatgaaggcactggaggacggtctggactgtgatgcagcttttgaatccacactcattctgcgggggctgatacatcgcggactggttttgaatttttcacacgatgttaacggagagactttatga

SEQ ID NO: 242087 - DNA, 888 bp, Klebsiella pneumoniae; identical to SEQ ID NO: 185717

SEQ ID NO: 242088 - DNA, 297 bp, Klebsiella pneumoniae; identical to SEQ ID NO: 185716

SEQ ID NO: 242089 - DNA, 141 bp, Klebsiella pneumoniae; identical to SEQ ID NO: 185715

SEQ ID NO: 242090 - DNA, 468 bp, Klebsiella pneumoniae; identical to SEQ ID NO: 185714

SEQ ID NO: 242091 - DNA, 3825 bp, Klebsiella pneumoniae; identical to SEQ ID NO: 188241

SEQ ID NO: 242092 - DNA, 426 bp, Klebsiella pneumoniae
atgattgctgttgccgtgaactgcataatctggcaaatgaaaccgggtaaggccttcgttcatgtcagcggcctactgtcggcagccttcagtgacttaaatggccatgccccccgttctcctcttatgctgaactcactccagcgtacttttactgcatcagcggagatgatgatcgcgctggacagcatgattaagcagggagagaacctgctgtcggacctgaaaatggattttagtacctatgaacaaaagattagaaataaagtgtacttgtacaagcctttaaggagtaagtatctcactgagatggagaaagcctttcagcgtattaatgaagaatggaacctgatggtgtcctgcaaagataagctcctctcagacggaaaacatgtaaggacactgtttgtgatcagagaaagctga

SEQ ID NO: 242093 - DNA, 981 bp, Klebsiella pneumoniae; identical to SEQ ID NO: 188244

SEQ ID NO: 242094 - DNA, 282 bp, Klebsiella pneumoniae; identical to SEQ ID NO: 188247

SEQ ID NO: 242095 - DNA, 186 bp, Klebsiella pneumoniae
atggatttttctaaaactactgtagtgaaacccggtttaattggtgataacaacgcgtattgggcgatgcacttttgctcaattattgaaaccctttatgataataaccggatgaaggtacgttttaattcccctctcatggggaaacatacaccaacaatgagaaacctaaatagctgcgcctaa

SEQ ID NO: 242096 - DNA, 1071 bp, Klebsiella pneumoniae; identical to SEQ ID NO: 201294

SEQ ID NO: 242097 - DNA, 318 bp, Klebsiella pneumoniae; identical to SEQ ID NO: 156028

SEQ ID NO: 242098 - DNA, 336 bp, Klebsiella pneumoniae; identical to SEQ ID NO: 156027

SEQ ID NO: 242099 - DNA, 402 bp, Klebsiella pneumoniae; identical to SEQ ID NO: 156025

SEQ ID NO: 242100 - DNA, 885 bp, Klebsiella pneumoniae
atgcatgatctccagaattcgttaactagcaaaaataccaacattatccgtgctgaatttgaaaatatgctttctgcgcgtggaacatctatcgtgcgttttgataccaacgcaggggcgaacagcggcgagtatataggaaaaggaattcaacgtgagtgggttgggtatttgctaaaccatacgagttctggccatacggtcaaggcatttgaaccggtgtattctattcctttaaaaatcaggccagaccttcaatccagaaatattgcagaccaccagactaaagtaaaaaagttatttgaaagttatgatgaagcgtatcttacagccgctatagactcagaagagcattgcaagccattctgggtttatcagaatgcagatgacggtcattactcgatcagtactcgcggtttcaaaaatgcaaatgcacctgcaagcattccgagcgataatcgcattgatatcgctcagatgaaaatgggatatcccatgctcgattattgccataacattataccgtcctcagtcgtgcgattaggatttaatgggcgagtgtttacgcaaggtaagtattattacaccaatgaagaggttttcagttggttgtcccggaacccggatagcgcagttttcattacgttcccaaaagttaaccagactgatagatctgaattgatgtcaattatgaaacgagaattcctgaattcgtggggtttattctcatattatcgctggctgggacgcagcaccgcattactggcattgagcccggtcagttctaatgcttctgttaagttaagaagtagcaatgcacacttcttcaaaaatgcaatgctggctgttaacacgatcattcctaaaggtaacggaatttcgtaa

SEQ ID NO: 242101 - DNA, 528 bp, Klebsiella pneumoniae; identical to SEQ ID NO: 156023

SEQ ID NO: 242102 - DNA, 303 bp, Klebsiella pneumoniae; identical to SEQ ID NO: 201300

SEQ ID NO: 242103 - DNA, 453 bp, Klebsiella pneumoniae; identical to SEQ ID NO: 156021

SEQ ID NO: 242104 - DNA, 531 bp, Klebsiella pneumoniae; identical to SEQ ID NO: 156020

SEQ ID NO: 242105 - DNA, 153 bp, Klebsiella pneumoniae; identical to SEQ ID NO: 156019

SEQ ID NO: 242106 - DNA, 558 bp, Klebsiella pneumoniae; identical to SEQ ID NO: 156018

SEQ ID NO: 242107 - DNA, 198 bp, Klebsiella pneumoniae; identical to SEQ ID NO: 156017

SEQ ID NO: 242108 - DNA, 162 bp, Klebsiella pneumoniae; identical to SEQ ID NO: 156016

SEQ ID NO: 242109 - DNA, 681 bp, Klebsiella pneumoniae; identical to SEQ ID NO: 156015

SEQ ID NO: 242110 - DNA, 348 bp, Klebsiella pneumoniae; identical to SEQ ID NO: 156014

SEQ ID NO: 242111 - DNA, 285 bp, Klebsiella pneumoniae; identical to SEQ ID NO: 156012

SEQ ID NO: 242112 - DNA, 345 bp, Klebsiella pneumoniae; identical to SEQ ID NO: 156011

SEQ ID NO: 242113 - DNA, 300 bp, Klebsiella pneumoniae; identical to SEQ ID NO: 156010

SEQ ID NO: 242114 - DNA, 1269 bp, Klebsiella pneumoniae; identical to SEQ ID NO: 156009

SEQ ID NO: 242115 - DNA, 822 bp, Klebsiella pneumoniae; identical to SEQ ID NO: 156008

SEQ ID NO: 242116 - DNA, 231 bp, Klebsiella pneumoniae; identical to SEQ ID NO: 156007

SEQ ID NO: 242117 - DNA, 984 bp, Klebsiella pneumoniae; identical to SEQ ID NO: 156006

SEQ ID NO: 242118 - DNA, 879 bp, Klebsiella pneumoniae; identical to SEQ ID NO: 201320

SEQ ID NO: 242119 - DNA, 603 bp, Klebsiella pneumoniae; identical to SEQ ID NO: 156004

SEQ ID NO: 242120 - DNA, 429 bp, Klebsiella pneumoniae; identical to SEQ ID NO: 156003

SEQ ID NO: 242121 - DNA, 483 bp, Klebsiella pneumoniae; identical to SEQ ID NO: 156002

SEQ ID NO: 242122 - DNA, 441 bp, Klebsiella pneumoniae; identical to SEQ ID NO: 156001

SEQ ID NO: 242123 - DNA, 1047 bp, Klebsiella pneumoniae
atgctcccgacaaattcaagcataattatttatattttaaaattaaattgtggtgtggaaatgaatgctaaaactaagacaaaaatgataattgcctttattgcggggttttcgctatcttgtgcagcattttatggttataaaaaaatctcatctaatggcccggtgtgggatagggttggttcaaaaatatttgggaattttgatggcgatgctgagatagttaaaatacaatcctcaattgataacacttttcagaacgcttacttttttagttcaaaatctgaaaaacctgaaccattaattgtcagtctgcacacgtggtctggggattacaatcaggaagaccccatctataaactagccaagaaaaaaggatataattacatacatcctgattttagaggagcaaatgataaacctgatgcatgccttagtccaaaagtaattcaagacataaccgacgccataaaatacgctaaagaaaaaaccaatgctaataatgtttatctggttggggtttccggcggtggttacgctgctcttgggtactatatgagtggcgatcagaatataaaaaaagctttcgcatgggttccaataagcaacctgaaagactggtacatccaatcgaaaaatgacaaaaacaagtacgccactgatgttcttaaatgttcttcagatggagtggagaatgaaggttctttttcaaaaatgttatctcgctcaccaataacaatgacaaggaagaatttctatccaatcgatatatatgcagggataaatgatggatataaaggcagtgttagcatcatgcaatctataaatttctataacaaaataacaagcacagataaaattacagaccaggagattatatctttggtctcccgtcaatcagaggcattaaaggatatcaaaattgacgacagggatgtgtttttatcaagacaagataataacgtcagcattacaatttttgatggcgtacatgaaatgcttagcgaattcactatgtccgagatttcaaaagatgcattgcaataa

SEQ ID NO: 242124 - DNA, 504 bp, Klebsiella pneumoniae; identical to SEQ ID NO: 156044

SEQ ID NO: 242125 - DNA, 273 bp, Klebsiella pneumoniae
atggggtatcgaactaacaattatggccggggccaggcgctccacggagataaaaccaccacaggcgcgaccgtccttacttggggtcagtttggatatcgaaaattattgtactataaggacttccccggcatgtcaaagccggtatttatggtttctgtctgctcttcagtaaaaataaaggggagagactgcggtactataaacggccatgatgaatcgtcatcgattcgggccctgatgaaagacgcgcgtgaggttcttgttcgttaa

SEQ ID NO: 242126 - DNA, 1023 bp, Klebsiella pneumoniae; identical to SEQ ID NO: 78996

SEQ ID NO: 242127 - DNA, 477 bp, Klebsiella pneumoniae
atgagtaaacaaatcattgatattggtattgctgaatcatcccgggtggagattgcagacggcctgtcccggcttcttgctgacacctataccctgtatataaaaacacattactatcactggaatgtaactggccccatgtttaacagcttacatttaatgtttgaaaatcaatacaatgagctggccactgccgttgatgatatcgctgaacgtatacgctcgctcggatgcttcgcgcccggcacatatcatgaattttcacgtttaacagcggttaatgaagataaggatattccggcagcaaaaaacatgattgaaaatcttgtccagggtcaggagaccgtggttaaaactgcacgctccctgttcccgctcgttaataatgcgaatgatgaagccacagcagatctgcttacacaacgtatccagttacatgagaaaactgcctggatgttgcgtagcctgcttgaataa

SEQ ID NO: 242128 - DNA, 438 bp, Klebsiella pneumoniae
atgaattgttatcttgatgccagaaaggcccatacctgttgtatggtctgtagttcccgcgacaacaaccctgatacggtgaacttaatgttttcagagcacccggatggctctgtatgtgcggactacacggccaatcacaggcatcaggggtatacgggtcttttacatggcggaatgacgagtaccctgctggatgcagcaatgactcattgtttgttcatgcagggtgtgcaggccctgacggctgaactgacggtaagattcatttcacccgtttgtaccggagacaaactgatggtatgtgccagactgcttgggcaacgcagggggatttacctgcttgaagcatggctgacaaaaggacagcagacagtggcacgtgccacggcgaaattcattgttccgtcgcaggatattgctctggcgcatcgctag

SEQ ID NO: 242129 - DNA, 168 bp, Klebsiella pneumoniae
atgcgtgccagggtgggcgtcagcatcatcacggaaacgggcgctgttgccattcatgagtttatttcatcacgggcggtaatttttatcagacccgtattgtgtataaaccaggagccggaatgtgtggaggaggcagtaatgatgccgggggagcccctcagctga

SEQ ID NO: 242130 - DNA, 462 bp, Klebsiella pneumoniae
atgatcacagccattccagtgaatgacgaccgggtagcaaatcattttaccaaagcgagtcaccttgtcctggtggatgagcgcggtgtggagctcagccggacagaaaatcccgcgctgggcgcagattgttcaggtaaacggaagctggttgacctgctggttcaacagcaagtcagccgcgttgtggtccgtaacatcggggaacggatgctgggtaaattactggggcatcagatcgcggtgtaccagactgactgcggtcgtcgtttgttcactgaactgtgtgatccggatacccgtgttctgactgaactgaataagccggagcagggacgccagtcctttcatcatgaggcgaaagggaaaaaatgctgtcactctgacgggaacacagcagaaaatgcgtgccagggtgggcgtcagcatcatcacggaaacgggcgctgttgccattcatga

SEQ ID NO: 242131 - DNA, 321 bp, Klebsiella pneumoniae; identical to SEQ ID NO: 188807

SEQ ID NO: 242132 - DNA, 228 bp, Klebsiella pneumoniae; identical to SEQ ID NO: 201331

SEQ ID NO: 242133 - DNA, 351 bp, Klebsiella pneumoniae; identical to SEQ ID NO: 6245

SEQ ID NO: 242134 - DNA, 1008 bp, Klebsiella pneumoniae
atgaagtttttagtcactggtgcggctggttttattgggtttcacatcagtaaacgtcttttgaatgatggacataaagtcgttggggtcgataacattaacgactattatgatataagtttaaaaaaatcacgtctggagcaattgaaatcacctgcctttgattttcataaattggatctggctgatcgcaatggtatggctcagttgttcaatgaagagcagttcgaccgtgttatccacctagcagctcaagctggcgtgcgttactcgctggaaaatccgttcgcttatgctgattcgaacctgattggttatctgaacattctggaaggctgccgacataataaagttgagcacctgctctacgcctcatccagttcagtctatggtttaaaccgcaagatgccgttttcgaccgacgattcagttgatcatccggtttctctctatgcggcgacgaagaaagccaatgaactgatggcccatacctactcacacctgtacggtatcccgacgacaggactgaggttttttaccgtctatggcccatggggccgaccggatatggcgctcttcaagttcacaaaggccatactggaaggaaagagtattgatgtatataactacgggaagatgaagcgcgacttcacttacattgatgatatcgttgaggcgattgttcgtattcaagacttgatacctaagcgtgatcctgaatggacagttgaggaagggtccccggctactagctcagcgccatatcaagtttacaacataggcaatagttcaccggttgaattgatggattacatcactgcactggaagatgctctgggaatggtcgccgagaagaacatgatgccgatccagccgggcgatgtcctgaatactagtgctgagacacaagatctttataaagctattgactttaaaccggaaacgccagttcacagaggcgtcaaaaaatttgttgattggtataaagaatattatcgatacaactag

SEQ ID NO: 242135 - DNA, 732 bp, Klebsiella pneumoniae
atgagttatgaaggtagagaagtcttaaatactatacttattaatttgtctgattatcgcaatgtcgatatcctcgctaatatgagccagtttggtgtattcattagctgccgtgactttagaagtggcactaattttgcggtagagcataatccttatctacttggccatgagaatgtcttttataattcagtttataatagcttaaagtttgcagatctatgcattcttttccgtatgagaacgaatcctaaccaagaatcagctactttgtttggcattcttggagaggtcgaaggaaacaatggtcaggacttgaagagaccggccttctggggaaggaaaggtttgtatttgtcttttggtattggagtcaatcctaaacccaagggggaaaaacgttctaatcaatttcagcttaatgactgtacttgccagtgggtaaacgctgctgatggttataaatttgtcgctatttttgagtcagaacaccatcttgttacagattatctcgatgcaataggtactattgaacaccttaataaatttggccccaaccatccttttctaacacattatccagctcggcacattctaaacattgtgagagatggctgggataaatcagttgatatattgattactgaactgcgacgttatcttgcgcctaacgaattagcttcgctaggaacaaatccagtaataccctttataccctcattcaaacattaa

SEQ ID NO: 242136 - DNA, 552 bp, Klebsiella pneumoniae; identical to SEQ ID NO: 156033

SEQ ID NO: 242137 - DNA, 237 bp, Klebsiella pneumoniae; identical to SEQ ID NO: 156034

SEQ ID NO: 242138 - DNA, 291 bp, Klebsiella pneumoniae; identical to SEQ ID NO: 156035

SEQ ID NO: 242139 - DNA, 771 bp, Klebsiella pneumoniae; identical to SEQ ID NO: 156037

SEQ ID NO: 242140 - DNA, 588 bp, Klebsiella pneumoniae
atggtcatcagcgaaataccccgttcatttctattgacctctttacctccatgtaatcaaattgatggaataataacggttacgagagacaaactgatgacggtgttatctgcccctgaaatgcgctttggaaccaaacaggatgttccctttatcatagcggtgattcgcgacggtatgcgggatgggtattttaactttgatgatgatgacggactgtctcagttcgaaagtcagatctcagaagccattgccaggcgggaacggggagagaattgcgccgatttcttgtttgtctttgatgctcaacataatggcgcagcgataggttttgccctactgacgggcaaaaatggtgcaaatggacttgcttcacatctggaaatcaggatgtttggtgttaccaggagtcaaagacaaaaaggatttgggcgctccatgttgcaaagtattctggatgctactcccggccataaagtggaggcatcctgtcttcctgcatcagttgtcatggccaggatgctgactaatgcgggttttcacgtcaaagagataagcccgtttggaaagcgtactttcagacgctaa

SEQ ID NO: 242141 - DNA, 579 bp, Klebsiella pneumoniae; identical to SEQ ID NO: 156040

SEQ ID NO: 242142 - DNA, 891 bp, Klebsiella pneumoniae; identical to SEQ ID NO: 156041

SEQ ID NO: 242143 - DNA, 1266 bp, Klebsiella pneumoniae; identical to SEQ ID NO: 156042

SEQ ID NO: 242144 - DNA, 240 bp, Klebsiella pneumoniae; identical to SEQ ID NO: 156043

SEQ ID NO: 242145 - DNA, 702 bp, Klebsiella pneumoniae
atgaaaaatattaatgccctcatagggcagggcttaactcaccctattgacagccagagagagtttattaccctacacaaacaggaagttcgaattgattcacgagtatttgctcatcgtatagggattaaatcaactaaccttcatgcacttattcgaaaacacaaaacagaacttcttgaactgggaacactgcccacgtttgaaacagcagcagtgaaaaagggaggggctcgtggaattaaacatgagcgctgctttttgttgaacgaagctcaatttgattacatgtgtcgtgttgttcgtgggcgcgatcctttgcgaatgaatcaatttaaactcgatgtaaccaaagcattttctaaacgccgtaccgttgaaccccttcgtcgcgaatatttgcctggttatcatgaaagtcgtgatggtcttaaggccttgggtgcgcagcgtcatcattacatcaatttggctcgagccgaaaatcgcgtagctggcctgtcggatggtgagcgtggatccgccgacgagcagcaattagggttgctggtagtaatacagaaaattgaacaagcggcttttaacgaagcggtgcataacggaatgagtccgggggatgctgtacgggaagtcgcacgcagaatggatacatttgcgtcattactcagcacaaaatcgttactggggggagaaaatgtttaa

SEQ ID NO: 242146 - DNA, 699 bp, Klebsiella pneumoniae
atgaaacaagaacttgaaaccatactgcctgagtttggtaaggcaattcgtcctcacgtttatagttacgtaacagcaagcaaaaatgccaatgccaagcacgtcctatttatggctggttcgcctgctgcgggtaaaactgagctcttaaatcgtcttttagaacaacatggcatcacaaacattgttcgaattgatgctgatgattttcgctggtggttcccctactacaatgaagagaactctgtggactatcagaagcctgcctccagaatggtcgatttcatctacaaaaaagcgctatctgaaggctatcccattgttatggactctactttctccagtataggtattgcggagagaaactttgatctggccctgaatgctggttatcaggtggcactgaattatgtctattttgatccggcttacgcgtgggtttttgcccaagcccgctctcgtaaggttccgttagaggtccttaaagcgaactttttcaagagcagagagaccattgaacatatgctcgcgaaatatgcaggccaatttacactcaatgtttatcatcggcgggaagatcctgaaaatcatgggcagttcgtggtcgactatactcctaacgtgacccttgcaacctggactacctcccatagctgcccatattcagacattggcgatctagcgcatttaggtgtataa

SEQ ID NO: 242147 - DNA, 624 bp, Klebsiella pneumoniae
atgtctgttaaaactgaagccattaaaccagctgctgaaatttcgttgttcgatgcattcggacctaacgtgagcgagcaggtacaagctatcaaccggaaggccgctgagctttctatggctgatatggctcaggtaatgggcgtgacattatcgtctaggaagaaacaggaagtaacagctgagagcgaagatattctcgatttgtctcaatggctagcagccagtgcacagaaatatggagtttcttttggcatgaaggcatacacttctgttgaagttaagaagatgcatgttccagactttcgccagatccttcctgtaagtgcaaatatgttgcatacctattcaccattcggcagaacgggcctgcaaggaattcatgatttaattggtgctgtttcatctaaacttcatcacttgcaaggtgtcggagttgatgagagcacgtttaaaatacttatccgctacgaagatgcgaaaacgggtgctccccgcaatgatatagttgaagctgagtcgaccattagcccaagtcctttaacagggagcaaggtccgtgtaaaaaaacttcgcagaaaaggtcatgaaatggcgatgcatgcactaattgccaaaaaatag

SEQ ID NO: 242148 - DNA, 1140 bp, Klebsiella pneumoniae
atgaagattatacatataaaggtaactggtctttttggaaatgaaaaaatatcattttatgagttcaatgaagacataaatattttcactggaaaaaatggctctggaaagaccaccatcatgaagcttgcatggtttattatgagtgggaatattttactcgcccttcgagaggttgactttaaaatatgcgaactaaaaacaagcgactacacttgcactataacaaaaactgcccctttatattgtaaggttgaattaaaaacagaaaacgaaacatttaacttcgaagatgatcaaagcgatgaggatggtaacattttcggtgattctgcagaagaaaaagccaatgaatatttgaaggataaaggaagctcaattttcttcccaacctttagacgaattgaaggtggtttttcattagaaacatcaaccccaagaaatagaaatatctttggttctcaaaaatcagatatagatgattcacttagtaacctatcaaaaaaactatctcacaatgatcatttatttatttcggctatatctaccaaagatattaatagcatgctattacaacgatacgcatctttctcagaaagagtaaatatatatcaacaaaaagtttcgagaagtgttatagaaaaaataaaacaataccaaagttctgaaagctccattgtaactgcagactcattactttcagaaacaaggaaggaaatagaaaaaatagaagaagttagaaagaaaataatgaaacctcttgatgcagtaagcggtcttgttgaaaggttatttcaacactcgggcatttcatttgggaaaagactcaattttggcactgcagcaaatgcagtaaacagtgatgtcctttctgctggtgaaaaacaaatgttaagttttatttgttataacgcatttcataaagattcagtaatatttatcgatgagccagaactaagcttacacgttgactggcaaaggcaactttataatatactaaaaaaacaaaacccaaccaaccaatttatatttgcaacgcactcgccattcatatatggtaaataccctgataaagaagtgttaataaatgaagatagaggtgataaagaaacaaaatcagcagaagatgactgggcttaa

SEQ ID NO: 242149 - DNA, 762 bp, Klebsiella pneumoniae
atgaaaaaaaatgaaaatcctcggccatcgttagatgagatttatgagaccttaaaacgaacgtcactcccgacagttttagttgaaggcgttgatgatatttacttttatcgtagagttgaagaagaactgtccgatattggagttgatatgcttccggttggaaacaaggatggagtattgagattatatgaaagaatactatccaatcctatatcagcaccagtggcatacgttgttgataaagatgattgggtatattttgggatacctgaaaatagaagtgaaataatcacaaccaatggttactcggttgagaatgatttgtattgcgatggtgacttgatatcattactaactatttccgagaaagaaaaattccataaagacatgggattgtttttaaggtggtataccttatcactggttagaaataaagttcacaatcaagaaaatgtctcttacagagaacatccaaataaagttcttgatgatccaaatttctatgcgaattccttaaaactaaatgaaggtgaggattacccagaaaatctgtacaataaaatacacagtgaatatcataacatgcttcgaggaaaatcattgttagcattattgattaggattttctcaagcaggttggaaggtgccaaatatagtaggcaacagctgatagagtttggcgcttcaagaaaaaacgagaactttcgaagaatatgcaccagcataaccaaagcgtttaattcgagagatcctatttaa

SEQ ID NO: 242150 - DNA, 777 bp, Klebsiella pneumoniae; identical to SEQ ID NO: 184754

SEQ ID NO: 242151 - DNA, 441 bp, Klebsiella pneumoniae; identical to SEQ ID NO: 184753

SEQ ID NO: 242152 - DNA, 162 bp, Klebsiella pneumoniae; identical to SEQ ID NO: 144504

SEQ ID NO: 242153 - DNA, 1362 bp, Klebsiella pneumoniae; identical to SEQ ID NO: 184751

SEQ ID NO: 242154 - DNA, 1899 bp, Klebsiella pneumoniae; identical to SEQ ID NO: 201329

SEQ ID NO: 242155 - DNA, 1230 bp, Klebsiella pneumoniae; identical to SEQ ID NO: 201330

SEQ ID NO: 242156 - DNA, 984 bp, Klebsiella pneumoniae
gtgatctactattccgcgcagctatttaggggaaaatattatgacatcagagaactcaaacatgccgcaatactcggattaagttatgttactggggcacgtcctgtgcagttggcaaaattagctgttaaagacttgcgtcttgatacctgtgataatagcaccggactatttcgatacagtattctgctaccttacgtcaaacaacgacgccttacgaccgaccgtttactgctggctattccaccggaaattggtgcgataattaagcaatatgtggagcgaacccagttattacctgatgataaaatgttcgacatgggagtgtccgcccctgcttttgcctctaagtctataagccaagcaattctaaacttcagcccacctgattatcaaactgccgttgcttgcggcgaggcagccctaccaacaatcacatcaaccgatttacgccacaacgttggtcactcactagctatgcaaggagccagtgcggaggagattgctcacattcttggccattcatctctagttgtagcaaagcactacatcctggcgacaccagccttggcattgatccgcgctaaagctcttggttctaaccccgtctggcaaaacatggtggctatgatgttgactgggaaattggtcacttcaaaagaatggcaaggtcgacgtgtggttggaattgttggggaccggctgcactacgagatcggcggttgttctagagccgatgacgaatgccctttctgtgaagtccgttgctgttatggttgcttatattaccgccctttcctcgatggtcatcaccaggacgtattagaaagcgtctctaaagaagtcgatgagctaatagctgtttctgattgcgtcgggaatgctcacaatccactaatttctatccacgaaacaacgcagatcgaagtcaagtcagtaatagcccgttgtcatttgcatcacgtcaaaggttgtgaacaatga

SEQ ID NO: 242157 - DNA, 2364 bp, Klebsiella pneumoniae
atgaaaaaaaatattgagaactttgacacttttattacggaacaaaaagcctggttcggtgagaatctggcagcagattttgcagagtcatgggatagccgtacatgggtatgtgggcgcaaaggctccggctggttacgtggcaatggtgatagtgtattgcgtttcgatgaaattaatcggctcaaagggatcgacgagcaccatactttatccgagccttatcagctgttcatgaaagccatgttggtactcgtctaccgagctagaaatcgcagtatttcccctgcggttgctgttgcaacgctggttattttgaaacgctggtactgcgctctcttcaagttaaccgggcaaacgcatcccatctatctgactacagatgtcgtacgtagcgcaatggatactctgagtgctgcatcccggccaggtgatcccaacgttgccaattacaaggggcgttgcgttaagattcaaaaattagtaaaccatcacgccttcacattagtaacactgcaatatgtatccgatgatcgttataccaatcagactaatttgacccgaaaagcccgggaaacaatcgctctaaaacaaaaagacaagctggatgatacggccactgatggtgaagatgctctgattacaattagagggttcctcaatatagtgtcattaatccagcgagtcgaaagcagcactgaaaagattgctctcaattgccttctgttactgatcgtcaccggatttcgttctgtcgaagcattcaatctcaggcaggatgcgttagtcaaacgacaaatagatagccaaaatattagtaggcacctgaaagataaggggttaccggattattttcttggcatccgttatattggtgttaagggagcaggtgaacgaacacattgggtcgagcccttagcggtccctttggttgagagcatattcagctcggttaagtcgctaacagttgagttacgaaagcatctcgcaaatttacgctcaaaagaatttgctgattatttacctgaggcaatctgtgaatttgagggtgaactcgttgaactcgatgatattgtagaacacatagcccagtcctcatcagagcttcgtggtcgtgcaggattacgtgataaagtgtcgaaagcgttatcaaaacgaggctgtatcccgactcaagtcattcttggaacacgtaatcagaaaggaaaatattactcaaaatcagaccttagcctttttcttaaaaatgaatttggtgataacagcgaaaatactccctgtactcacgcatggatagaaaatggcaaaagatatgaggttatgtatgaggatttattgttccttttccctaaaggatctctgactttaaaaagagggttggagctgaaaacaacaccacagccacttagtaatgctggactaaacaaatttctcggtaacgttgacggtcattcttcggtcttcagtaaatataggctgctcgaagatgatggccgccccacccagctccgtactcatattcctcgtcacaatataaatacttttctcgctattgctgagatttcagaccacttacaagcgatgctgatggggcgtgttgatatcactcaaaatcagcattatcagcacctggctctcaaggaacggcgaaaagcagcttctctaacccctttagttccaaccgtaccggagcagtcagcatctagtgctgttgacgttgattcacctctcgatgcggtaaagaaaagtggtttaatgacgtttaatcgcgtccagagcctggaaataaatataaaggcaaacctacataccttcgatgaccgtaacgatgttgcaggcttcattgaagcgtccttaggtgatggattattcgaagacattgccgctgcgtttgaagaaatcagtaaaaacgaagggccatcgcaagcatctgaaatggtgcaaaggcacgctgtactgcatccattgaaattgggttcttgcatgagagacgttaacttgtggggatgcccttatcgaatgaagtgtcaggcattgaagccctgtgagcatttcacgttgaccgggcgtgttgatgaatactccgctgttgtattcaaaggtagggcattaaacgaggccaaacttgcttttgaacagtataccgcagccctttctgacaaccagctagtgcaaggcaatattgacgatagtcttgcacagctagatgcactaagtgagcaattacgcagacgctcaaactcgttggaagcaattacctcacaggcacttctgtcaggagaaataaaggtggaaggtgaaattcgtacactggctcaattatttgctatcgagtaccaaaaaatcaaacaaggagaagactga

SEQ ID NO: 242158 - DNA, 138 bp, Klebsiella pneumoniae
atgcgtggtaaagaactggatactcagatcgagcatgagctccaactgatgctgattgaagggtttgataaatcgcctatttcggctaaaagcttgcatgccagacttaaatcaaatgcatcatcaatggcggcttaa

SEQ ID NO: 242159 - DNA, 753 bp, Klebsiella pneumoniae
gtggtgtcatcggtatcacagtcagccaagataccgttcagtaatgcccgtgcttcagttgcaacatcattaatgaggtttttcatcagggttacttatcgcaaatcggtttcagggaattctgccagacagaccgtcgcgagacaattttttatgcccgcaatagggggcgaaattatcggatctaggaatttcgtcagccgcgagggttgcgttaatctttttttatataaagaggagctaaccatgaataaccagaaatacagtgcagttatgaatgagtggaattttaagtatgatgctgctgaacgattcagtgactcacactttctttacatccataatttcatgaacgatcaaagtcagttgcttggtattgttatagctgattttttggaggttcctcaaaatgagcttattcctcttcagaccgccctggataaccttgtaaatttattaaaggttcagacgtccaggtcgttaacggttgaagagggtcttgttcttgcacaatgttttactcattacctcaggcagacacaatcatatgctgcggtttcacgtatttgttcggttggtcaaaaatttaattttttcctgaacatctatccaaataaatgtagtaaagagttttctttacgattattcgcaatcaccacactcaatgaaattataagcgtgtctgaatttgttgaaatggcgcatagtacgcaacaaagtgatttgattaaaaaccctggttattttgtctga

SEQ ID NO: 242160 - DNA, 204 bp, Klebsiella pneumoniae
atgcatggcgggtacgggcattactggtgcgaaatctctattaacgatgaactcaacattgttgatatatcggctgatcagtttggcttcgaaggagtgatcgttaagagcatcaatgaggcagaaggctggccacgttacatcccagggaaccaggatatcgtaaatgcaggagttgaggagctcttcaaccacggatattaa

SEQ ID NO: 242161 - DNA, 1191 bp, Klebsiella pneumoniae
atgaagaaaaaatcatcgtcatggtcaccagctgaagatctgaagcttgtaaaggggctaaaggagggttactcgtttgcagcgcttacgtccattcttggatacaatcaaaggataattcagttaagatgtatcgagctggatttatacgtactcgaaagagaaaatctctctgagcctagcgaaattaccctcaagcctaactcttcaatcagagtaccaccggctgcggcagcttcaggcataactcttaaaaccctgctggataatggatgggtagcacactgcatcaatggtgaaaatgtcctgtactctccagactggtggcgcacaagaaacacttgcctgctagcaccggaagatgaggatacaggccagccacatcagaaaatatcttcacacctcattatcggtaaaccgtggactcctgacgatactcgggccttacttaaggcgatacaaaatggtatcagtaaaacagcacttaccgaacttaccttaagaagccatcaatcaactcttcagcaacttatagagcttgggatgattactgtgggcgctgaagacgattcatcgagtacggttatatggttaaataaaaaaataagttctgcgaaattatcaaagaaacgttttcttgaagtcctgccactaatcgaattcggctggtacattgatggattcgaccttagcgccccagattggtggagcaagcatcgagtgcttaatgaaattatctatgaagccgtagcaggtaaaaccatttcaaattacccggccagaactgacattggttgtgatagtgaaaaatcacaacaaaataaggaaagttcagtgcctgaacggaaccaaagagacccgcaaaaaccagccaaatgggtacgtggaaactataagtttttaattacacttatatctgagcatcgtgcaatagaagtgattgccaagaaaatgaataggacagatggcgcgatcaggtcacgcctacagcatatcggtatgacgcgttacgagaaacccacaaaaccaggtgaaaaaggaagtgttattaaagccacatcaatttctatagataccttcagaaaccaacctttttttgtgaagagattactcatagagactggatggtctgaaaagaacaatgaactgcattgcccggtctggtggagcaattacccacacaacgtttaa

SEQ ID NO: 242162 - DNA, 189 bp, Klebsiella pneumoniae
atgtttgattattttaacagaccatttgacactttcgactgggtgctgattataggatgcggaatcctttttgtcgggcacattatctggaaagttttcttcagcgatgaaggccgtaggaaaattgacaatgaagcccctcctcctatcatgactcagaaagtagatgatgagacggatgcaaaataa

SEQ ID NO: 242163 - DNA, 183 bp, Klebsiella pneumoniae
atgaagatatttgatatgactatgttgacatccttttttggtgatgacatttacaaattcctagataaaaatttagggaatgatgcatattatgtcggtttgattatattatcctcactgtggattaccggggccataatgatatcaattatgttctcaggtaataaaaataaaattcggtga

SEQ ID NO: 242164 - DNA, 1710 bp, Klebsiella pneumoniae
atgaacctaccgacagctgtattagcgaataacgatgaaaatgaatcagacgtcctcagcctttatgctaatcccgtagacagtcaaagtggcctcattgaacatgacggctttcaaaaactaaatgccatgcgcgatctgctggtggaatacaacacaacactgaagcacatgcaggccatgtatgatgcagtgatgcggaaccggcatgatgaagcatggcgcatgttctgtgattcttgtgacaattccatcaaatatacgctggctgtagaaaatttgttctgtatagaacgggcccgctgtgctctcgatgaaaagtactggcaaaagctgctcgatctgaccggcgtaaaaccatttatgcccaccgaaagatacgatgactggaacgaaggattaagggcatggcgaaaatcatcagaatcaaattttgagaagcttaagcctgtacccttcaacgaagaaagtatcttttctaccgcattcgcattgaatgaagagaaaaaagactacttcgcccagatggttcatggtgtgtttgaaaagctctccgctctgcataagactaaccgtgcccagggcttcagcaacaaactcatcatagccaactgcttaccaagcagagataaccgcagatcctataactatctcaactattttaatgacctgcgtaaggttattggactgatgtatgggcgtagtggtgctgaggatgtgaattctactgcggtcaaagagtacatgatgagtaaccctggcgaatgggtcagtattgataacgatagtcttaaagtgaaggggtttattaacggcaacgtgcatatcctgattgaggaggaaacatgtgacaatctcaatctggtactatctcatttaatgccagactgcattcctctcgatcgccgacacaccaccggccatagctccgcaagaactgtaaaaatcaatgaatatcggtcgcagttgatatcattctctgctgttaactccttagtatcatatgccaatgaccattttaacgcgggcaaacaccagtcaccggggccgcacacttttatcctgcgggacaatcagtctgtaagtgagaaaaaagagctggtgagcatatgggagtctttgggtgctgtcagaagatatagagaagtatatgactttgactttagcccggttgaagcattcaagctactagccttacatggttctatccctgaccgctatacgcaccagttctatgcaacgatcggagaactccagaaacgagcgattgatgaatgtatggtggcttcaggtatgcgcttgctggaaccgagtatcggacttggtgcgctactgaaagggttaccagagggggtggatgttaccggttttgatatacaccccgcagctgtagcaattacaggcctgcgctggaacgtcacccttaatgattttctattggttaagcctgagaataccggattgtttgaaagaattctgatgaatcctccatttagcgaaacacgctggattgcacatttccaacatgcgatgagattcctgaaaccgggaggacgcttgatagcaatactgccaggaagcgcaaaggagcatattttaagccgggaagccgggcctggttacgacatcaatatactgggttgctatgacaacgcctttgaaggaaccggcgaatccataaaacttttctcagtagatgcccatgaatag

SEQ ID NO: 242165 - DNA, 675 bp, Klebsiella pneumoniae
atgatgatctcatatcaggaacttgttcgcaccttccctagcttaacgagacgagttgaagatcgccttaaatgcgcacttatcctcggctacctcaagcccggtgataaggtggtaacaaaaaacatcgccgatgctatgaaaatgagcgtcacgcccgtccgtgaaagcctgatacgtttgtctgccagtagtgctcttgctttgaccccatcacatgcctttttcgtgcccgtcatcaccagtgagcagttcaacgaatacatgagaatgaggcgattgattgagccagaactggcagaaaaggccgtactgaatatggatgacaagagctttgaagaatgcctatctatgtgccaaaagctgcgttcagcatatgatcgaagggatgtttatctggcacaccagctcaacctcactctacggctgaagctttacatacacgccgatctgcctgaatttttcaaaatcgtcacccaactttggattaacctggggccaactctgagttacacgttcgaatctgactcggaggagaaatggccaatatttttctcgtcgcttgaactcgcactttcaaacagggatgcaggggcagcagcagatgccattagagagtcactggataaggggttgcggatctacctgagcctgttaaccgagcaaggtgagtaa

SEQ ID NO: 242166 - DNA, 387 bp, Klebsiella pneumoniae
atggaagaagataaacgtttactcgtctggctccggcccggcaataatccagaagacggtaaagctcttgatattatggagcgcttaccccgacgctcccggggggaattttaccgtaaggcactggtaatagcctctgccttgcatgagctcgaccctcggttaattaatttgctggcagcgcaaactacgacatcgtttaatgccgaaacgctgagcaacatcctgtcgcaaacgctgggcatagccgttgaacggaattcttcatcagtggaaacccaggccacaggtatccgagcagcaaccaccattgattcggataagcctgctgagcagaaagaacaaattcctaaaccctccctgatgatgcaaaacctcaaacgttga

SEQ ID NO: 242167 - DNA, 963 bp, Klebsiella pneumoniae
atgatgaacatcgcttgtgatgacggctcaacgaacgtaaaacttgcttgggttgagaatggtgaaatcaaaacccatgtttcgcagaatgccttccgcgaaggctgggcaactccccttgcatttggtggtaaaactatccacaactatcttattgatgggcggaaatttacccacgacattggctcaacatctgcaattacaacaacccatacctctttccagttcgacgctgttagtcgtgtagcaattcatcatgctcttttgacgtccgggcttgagccacaggacgttgaacttacagtgactctaccggtggccatgttcttcacgagcgatgcacagttgaacgaagctaacattgaaaagaaaaaggccaacgtcatgggcccaataagcctgaataacggcgaaacttttcatgttgtaaaagttaacgtaatgcctgaatcagtacctgcggctgaatatctgattgaccctaaaacaaccacgcagcttacacgaaccctggttgtcgatctgggggggacaaccctagacctggccatcattcagggggcaatggagggcatatccgatatctttggcaacagcgatgttggcgtttcacgagtgacgaaagctgttatggcagcgctccaggatgcccagtctccaagcagttatgccattgcagatatcatcattaaaaaccgtcatgatagagatctgattgcttctgcggtcaatgatcactctaaaatcgatgccatcattgctgttatcgattctgagtcgaaaaatctggccgaagctgttgcagctgatatccgtcgtcagaatagcgtccacaaaatcatcctggccggtggcggtgctgagctcatccattctcatattgtcgagctattccctaagctggatgtcatcaaagcgcctgacgcgcagctcgcgctcgtcaaagctatggcaagcgtctaa

SEQ ID NO: 242168 - DNA, 1779 bp, Klebsiella pneumoniae
atgccgtctcagtacgcattacgggaaccgatcaaagaagctgcacatgcaagccagtcgcccgccgctgccggtgtaagtgcgaacgacattgatgatgagtatgagtacgcaattgcggatcggcaggggaggataatcgagcgaattaatgcggattttatccatcgctttattttcccaatcatcagccgacaagcgaaattgggtagtgccaaaggtctgtctggtattttttatcaggatgatattgcgctgggcctcgacgcctctggcaacgtgactgccggatcaactgaaacagggacgagcaacgacatgctttacggtgttgtcgattcatcaggtcgatgccttttccggtttggcatgaataatgagttcgttcagaacggtactgagtattcaactgactctgatatttcggatgatctgtacaagctactgaccagaacagggcagtgcctgtctcgttacgatgcgcgtggtaaattccgggcggttcttcatgaggacgtaatcagacagatatcgcaagagttcggcgtgtcggaattcaaaaaacggatgttggccgaccgggtgcacattcagatgtgtggtcagtctctggccggggggattggcagtaaccgaatttcatccgctgccaccgctactggttggctgatgccgtcaggcgggattgaggacgggcagacgttatctgttggcctgacaggtctcccgctcacatcttcctcctttgtgggaatggaccctacggttgcaaaaaatctgtacgagaatccgctgtatggcgtctgcgcccaactacaggggatgctgaatgcagaaagcgctgcggtgtctgtcagcgggtcggcatcatggcacggtgaatataaaatcagccaactggataaggaaggtggctcacctcagtatgatgtggctgttgctcagagtcgcgcctatgccgggtactcatcaacagaggcaaaatcattcctttcccatgttatgtgctggctccagggggagagtgacattaccgccggtacttcgcctgatgaatacctgcgcagactcaataatctgattgcagattatcagaacgacgtgggtcaggatatgccaccggtaatggtcacataccagacgggcagtcatacccgccgggcaccttattactcgcctgatattccgcacatccagttactggcagcgaataccaacccgtacattttcatggcctgtccaacctatgtatttccgtacaactctgacggagtacacatgccgggcaacagctaccgatggatggggtgttacttcggcaaagctattttcaatattctgactaaaaacgcctggaaaccgctacagcctgaatctgtttaccgaaacggcagggttgtaactgtggtcatgcacgttccggtttctccactggttctggataccgatatggtcagcaaccctggtgattacggctttgaggtctggggtgacacagacggcgcaaagaaaactattcagagcgttactgtttcaggcaaccgcgtcacgctggttctggatgccgacccggatcagacggttgtcgtgaagtatgcccagggtacacagggtgcaaacgccgggccgaatacgggagcgcgcggaaatctgcgtgattccgattccacccttgcttactgccgtgacgtgaccgcaaccgatccgaactcgccgtacaaactttataactggtgtccaattttttccctgaaggaggggttctcatgggtacaatga

SEQ ID NO: 242169 - DNA, 1320 bp, Klebsiella pneumoniae
atggatgtaaaaatctgtctgccagcactttatccgcttaggtatctagttgaccatcttgagtatcgctcgctttcaactcaatcagcttctctccaggcgattaagtttttttatgagttctggtacatgaagcatagagccacattctgctatagcttttactgctcgggacatgaccctgcaatcgctattcaggagatgacagatttttttcaatacttagaaaatggtcgcatggtcagcttcgcaccacgattactgccatttaaacattctagcggcatgacaaatgcttctagagtacgtgcagtgattagattcataggctacctgattgctacctatgtatctccgtactatcgaaatgaaacgcccaaagaattgtctcgtcatgcatcccgtctcaacactcgattgctgatatgtaaagacgactttaaaactctggaaagaagcaatcagcggtattattctcgagtcactcaaggatttcagagcatgactggtgatatggttgaaaatgtatatcgcatagtcgtaccgagttcaaaacataaaaataaccttctaaaccccttcccttcaggatttattcaatttcgcaattatttaattatacggttaatgctcaactatgggttgcgtgttggtgagttgttattgttagagtgctcatcggttaaagctagtatcagtggagataaatttagcttaatcattagtatgcctcaaaatatgaccgatccaagaacacatgcaccatcattaaaaaatgagtactcacatcgagttttggaactagataaagcagattatgaatttcttattatttacatgcagaaaattaggagaaaatcaataactcacaacttcatatttgcatcaagacaaaatcctgaaagccctttatcctataatgcagtacatttgattttctctgagatagataaggttttttcacttaactatcctgaatgtaaatcagcagagcgctttgatgctctaatgaaatttacacctcatgttacacggcatacatgggcttacttaactataaagaaactatataatttacaaaataaaagatttaatggcgctggtaatgattttgtcaaaaactcactttcaataggggtgatggatgaggcaaaagagactctccgtttgctgggcggttggagtataaaaagtcaaatgcctgaactttatgcaaaaagatttttatctgagcaagccaatgctgaaaatatccatcgattattacaacatgattctgagctcgattacttgatgaaggagttgtttgatggatattaa

SEQ ID NO: 242170 - DNA, 600 bp, Klebsiella pneumoniae
atggatattaaatataataaacagtctctatcagactctagaatgtttgatcgaaatctatcttcaaaactagaatgtttagtcattcctaaagatgtttttttgaaatctagcagcgattttgatgataagcatattcacaacggggaaaataaatgggttttttattattcaggaagcaagcgatatgtttacttcaagcttgataagttaaccaatactctattgaagtacttttgtttcaaatatgcatccacgatgttcccaactttcttaccagtactgtcatatcagtggacacaagcattcaattactgtagtgaaaatggcggttttagattgaacactttgcgacagtatattgaaaacgatgacctagatgccaggggcttctattctatattattcggactgaagatcctttgctctgaagagtttcctggatttactttggaagactatgaggatcttgagtttatacccagaccaaatgcgtttaactgggatatttatcaggatattgacaatctcctcgatccttttgaaaaaaacatgataagtaaaggattatttgaaatggcagcggcgttggctaaatag

SEQ ID NO: 242171 - DNA, 1155 bp, Klebsiella pneumoniae
atgtctaatgctattgatattggtatagttgccgattggttggttgcttacgcgggtgctgaaaaagttattaaagagttcattgatctttatcctgggtctgaattatattctgttgttgattttttatcggatacatcacgagaacagttacataacaaaaaagccaaaacaacttttatacaaaaattaccattctcaaagacaaagtatcaaaaatatctaccatttatgcccttggcaattgaacagttggatttgtcttcacatgaagttatactttcgagtagtcatgcagttgcaaaaggtgttttaacgggacctgaccaacttcatattagttacgtacactcaccaatccgttatgcatgggacttgcaacatcaatatttgcaagaagcaaaactgaataatggagtaaaaggacttcttgctaaattgatattgcacaaaattcgggtatgggactatcgtactgcaaacggcgtggatcattttgttgcaaactcaaaattcatttcacgaagaattaaaaaagtatatggtagacattctgatgtaatatatcctccggttgatgtagagcgttttttattaaatgaaaataaagatgattattattttacagcttccagattggtgccttataagagaatagatttgattgtagaagcatttagccatatgccagataagaaattagttgttattggcgatggttctgaaatgacaaaaataaagtcaaaagcaacaaagaatattgaaattttaggataccaagaaaattcagttatgcagaactatatgcgtaatgcaaaagcatttgtatttgctgcagaagaggattttgggataactccagttgaagctcaggcatgtggtactccagtgatcgcatatggtaaaggtggtgctttggaaactattaggcctataggtgtagatatggctacaggaattttttttcataagcaggatgttgcttcaataattgaggctgtctctagttttaatagcgtttcagaaaagcttgagcctaataactgtagaaagaatgctgttaagttttcgagagaacgattccaaaatgaaatgaaaatctatgtcgagaaaaaatgggaagtatttaaacaatctaaaatgatcgaatattaa

SEQ ID NO: 242172 - DNA, 663 bp, Klebsiella pneumoniae
ttggcagcatcacctgacgccccgaccctgaacaccctgtttgttgataaaaacctgcgctatcacggactgatgcaggcattttcgcgcactaaccgtatctatgatgccaccaaaacctttggcaatatcgtgaccttccgtaatctcgaacaggtcaccattgacgccatcactctgtttggtgataagaacaccaaaaacatggtactggaaaagagctacaaagagtacatggaaggttttaaggatatcgtaacaggtgaaacgaagcgtggctttatggatgtggtggcagaactggaacaacgtttccccgatccaaccgccattgacagtgaaaaagagaaaaaagcgtttgtgaagctgtttggtgaatacctgcgggcagaaaacatcctgcaaaactacgacgaatttgccaccctgaaagcgttccagaacgtcgatattaatgatcccgtcgcaatagaaaccttcaaggccgaacattaccttgatgtgaaatacagattattcgcctgccgccagagcgaaaagtccaggattatcgttcagtgtacaacgatattcgtgactggcaacgccgtgaaaaaatggtcgcagaaaaggacaaatcaaccaccagttgggaagatgtggtatttgagatcgatttactga

SEQ ID NO: 242173 - DNA, 879 bp, Klebsiella pneumoniae
gtgaaaaaagtatttggagtagtctgccataaagttacaaatcctctggtatatacagtgaattatctttcatcattcgatgagaatgaagttttaatacatgttgatgctaattcaaaaattgaagacttcctttttttgtcatctaaaaatgttatatttgtcaaaaatagagtaaaaatcaaatgggggggatacagccaggttgctgcaactatagaacttctaaagactgcgtcagccaattgttttgactatttctttttaatatctggtgacgacttgccatgcaaaacaaacaaagatattaatgattttttgaatgaaatagaaaataaaaatattgttcacttcgattttcgaaagagcggtatgttagaaggggaaagtagagtaaagtacaaatatccaaaaatatttttaaataaaaataaaagtatttatcaaaaatctttgtgcaagattttcaagatatttaaaggtattttcttaaacaaacaataccttttggcgaggcgaaagggaattgttttttataaaggatcaaattggatttcacttaactttaaaacggtcaaggatattgttgtttttttaaatgaaaataaatggtatcaagagatatatggttcttcactatgttgtgatgaggttttttttcatacattaataaaatatttaaaatttgaagacatatatgttaatggtgatagatcgcacgatttaagatatatagactggagtagcggaccagatttcccaagaactcttgatgcttctgatgtgcagaaaataaaaatgaggaacgatatttttgcaagaaaatttcgttcagatatatcttatgatgtttttgcaaaattaattaataatgattga

SEQ ID NO: 242174 - DNA, 339 bp, Klebsiella pneumoniae
atgaccacttctacctcctataacaccctacaatctgtattacagacataccacgataattacgccaccaccgtgctgctccttgtaaacgaaatgcaacgcgacagaacgcctgaaagcgttatggcggcgattaaagcgcaagatttagcgcaagcaatgctggagcatgttggcgacgtagcgagccgtatagccagccaggaacactccacgctaacacaggatgaggctgatagtatttcagaagaaatttctgatgccctgatgctgctattccagtgcattgaggagacgggcgaaatggcgctcgaactggcgccgaacaacaaccactag

SEQ ID NO: 242175 - DNA, 207 bp, Klebsiella pneumoniae
atgaaacaattaatcgtgctaacgctggcgctcataagcgtacaatctcatgcaggacagataacaatggtcagtccacaggaggaacagacggagaacggaaaaacgctatgcatctatgagaatgccaattacacatttacgtacaccactaaaggctcttgcccctataccaaaacattcaatacagaggattcagagaagtga

SEQ ID NO: 242176 - DNA, 645 bp, Klebsiella pneumoniae
atgacaacaaagttaggttggttaaaatatattcttatctatatcgctggatttctgacaagcttcagtggagtcatggatagcctggtaaaaatccctgtttcatatcaagagcttaaaaaaacttatatttacgacagtgcgtttttaactggccattggtcaaataatgcagaatatttgctcaatagtgaagaattaggtttagattttgaccaaccttcaattgttttagatatgcaggcttccgaggatgggagtacaaatggcactattctaagtgagcaattatgtgatgctatacccttaactatggttatttctctggaggcagatgctccaacttttagagattttttcttggatagggtgttttaccttaagcaacttcattcagggaagatggaaacacttggcgttctgaagcttgtccgagaagatagaaaaaacgggactatcgaatttgaaactgttggtgatggtacaggtgcattaccaagaaagattgtgctagcaaagaatctacctgaatatgaggaagattttgaaaaaatttccagttactgtgagaaatccccaatgaaattttgggaaaaatatttccaggaagaagctaaaaacaagaaaacaaaagtgtcagaataa

SEQ ID NO: 242177 - DNA, 2316 bp, Klebsiella pneumoniae
atgcaagtacaacattatacggaaccatcattaaatcaagaaatcattgctttattcaaagcctctcagttgatccctttttttggtagcgggttcactatgggggttagggcaaaaaatggtaaagttcctgatgctgctaaacttacggagttaataaagagtattgcgatagaaaaggagtctttaactacagcggaagttcaagagattaaaaatatcacgcaattaaaaaaagcgttcggccttttaaatatggaggattatataccaaaagcaaaatcaaaggctttattgggtaatgttttctcatcgtgtgagataacagatcgtgaaaagttgaaacttattggcttggactggcctcatatttttacatttaacattgatgatgcaatagaaaattccactaggaaatatagagtcctttgcccaaatcgttcagtccagagagagtatatatcatctaataagtgcttattcaaaattcatggtgatattactgagtttatcaagtatcaagagcaaagtttaatatttacttggcgtgagtatgttcatagtatagatgaaaacaaatctatgttgtcttttttggaggaagaggctaaaaattcagctttcatttttataggatgtagtcttgatggtgagcttgatttgatgcatttatctaaaactacacctttcaaaaaatcactatatattaagaagggacgtttgggtctagaagagagaatcgctctttcagagtatggtatcgaaaaagttataacatttgatacttttgagcaaatatatcaatggttaaataaaattctgcaaggtatagaacgcgaaacgccgacaagaaccttcgagcttgatgactcaaagttaactaaagatgatgctatagatttctttgctaatggtggcccagttacgaagatgaaaggtgatgttagagttttacggaactcgattagtttttctcaacgtagtgcttgtgattatgcaataaaaagcctccgaagtaataactttatcttgataactggtcgacgctttagtggtaaatccgtcttgttatttcaaattatagacacaaaaaaagagtatggtgcctcctactattcctcatcagatacatttgatccatccataaaacaatcattgattaaatttgaaaatcatatttttatttttgattctaattttttaaatgcacaaagtatagacgaagttttaaatattaaaattcatcatacaaacaaagtaattttatgctcaagctttggtgatgtagagttatatagacacaaactaaaagataggagtattgagtatattgaagttaagttgaaaaatatttttaatcgagcggaagagaaataccttaataatcaactatcttctgagggcttgcctttatataaaaatgcggagacattgttgaattttgcatatagatattatcaggaatatggaacacgattagattcctcaagtttatttaacaaaaagtttgatgataactctatgtgtattttgattttgattgcagcttttaataaggccacatttggacatataaacagtttaataaagcattttgacgtaaacgattttatttctaaaaatgataggcttttagagttggaggttaccggtcctgagcaaaatggtgtattagtttgtaactcaccatcctggctcttgaaggttattagtgactatatatctaataatccccaggcatataaggtggtctcaaaaatgatcatatctctcgcgtctagcgggtttgttgctgcatcaaaaaaccttataagttttgataaactaaatgaactaggttatggtaacaatgtccatgtttttataagagacatatataaggaaatagcatatgtttaccgagatgatacgcattattggcttcaaagagctaaatcagaacttatatcggcaaatacacttagtgaagttattgatggaatgggttacgcaagtaaagtaaggttagatagtgctgagctaaaaaaccaaacatattacagtgccacattggtcttagctcaactgtctgcaagggcattatctttaagtgatgaaaaaaaatatgccttaagtttctttgagaatgctttggaatccattgagaattatgaaaataactctaggcatgtaaataaaatgatgtataaaaaagatggtggcgttaaatatgcaatagactatcttaaaaaaacacctccaattgagctgcttccccgaaaggttgagctaaaagaattaattggattctatgaaagtcgcaaaggtaataaataa

SEQ ID NO: 242178 - DNA, 498 bp, Klebsiella pneumoniae
atgagtcattatctgcagattaacggccaacggcttatcgattccctgtatgcacttggcgaacatggtgcgctgccaggcggcggcgtatgccgcctggcagcgactgccgaagataaagccggcagggactttgttgtagcccgcatgaaggcgctgggcctgagcgtgtcaattgatgctatcggcaatgtcaccggcgtttatcacggcgaggagacgttgccgatggtgatgatggggtcacatatcgataccgtcgccaccggtgggttatacgatggcaactacggcgttatggccggccttgaggtgattgccaccctccaggatgccgggatccgcacccgacgaccgttggcggtaaccttcttcactaacgaggagggggtgcgatttcagcccgatatgatgggcagcgtggtgtttgccggcgagtatccgttggcgcaggcgctcgcggcaaaagatctcgacggtatcacgctcgatgggtaa

SEQ ID NO: 242179 - DNA, 186 bp, Klebsiella pneumoniae
atgacttctacagattttatggaagagaaagaagtattcgaattactggggaagaaaaaaacagctgtatggcgtttgcgtaaagagcatggttttcctcagcctgtattaacatacccaacccgttatagtcgtaaagctgtcgtacgctggattgaagagggtggggttaatcctattggttga

SEQ ID NO: 242180 - DNA, 294 bp, Klebsiella pneumoniae
atggatactaacgaattgctggaacacattgacgccggggactattacgaggccagtttcctgctcaacgaaaaatgcccaactgctgagcgcagatttaagcgcctcacaaaaggcctggcggagttactcaaagacgtgcagaaagagttccctgacgcgaattattacaccgcctccggtggttttaacttgctgcttggtagcgcaactgactgcggttccactgagggtaatcagttgattgccgtttcagccagtgaatatctgagtttaggcgacggagatttctaa

SEQ ID NO: 242181 - DNA, 690 bp, Klebsiella pneumoniae
atgtctagacaaggtacgttagatctgttgcaagaagtggaagaatgccttgaaacaatgaaaaaaagtcagcaaatcaagccagtaaaggtcaagtcgatattagaaaacttgcgaagctcgttagagtatgttgctaatgattcttatgataagtatgttggggcaaacagcacgactgtgcgtcctaagatttatttcccatatggagagcaaaagttcgtagacaattttttcttaaagacactgaatataaaacaaccatcatcagaaccattatacaaaactttcaactcgatacaagattatcatactggtaaaaattggctgaaaatgatgtgtaatcttacaaatgaagttaagcatagacaacctatccctcttaaagaagatagttttgttaaagacatcagtgttagcgtagacggttttagcttgattcaagccgacggttcatccaacttcgttttcgagaataactatgtcaatggtaagaaaatacaggatttcagtctcaaaaatggaaacttggaagtaagtggaaaaggggtgcctctaaacattgttataactgaagaaaaaaaaataaaattccatggtaataattatgaagttattcctttcattgaatcatgcataataaacattagaaacttcatcgttgaagcatatgatgaattagaaaaataa

SEQ ID NO: 242182 - DNA, 549 bp, Klebsiella pneumoniae
atggtcattccacttttacttacataccttttaaacccagcatatgcaccaaagctgtttttagcatttacttgtccgcatacatatccgtcacgaccaacgatctggtttttgaaggttgcagattcggggtcttttaattcagccttaacactagggttgcttgctgatataacattcatgttgttgtatcttttctgcctatcgttctcgctaattctcattagctcctcatggttctcatacctctccccccacaaagggaccatagagttaacaaaaaacaagacaaatacagaaccgagaattatcaaaagagaagcaatttccctgccaatcttatccatatattttaaaggaataaccaaaacagcaaaaagaaacacaattgatattggttgccttaacgcaataataaatgctatagcaaaaactactaaagataaaacgcccaatattttttcattttttatcccaataggtagaaaagaactaaaatcctaccattggttatgtaaaacttcagctatcattgtttgttcaaactga

SEQ ID NO: 242183 - DNA, 1860 bp, Klebsiella pneumoniae
atggcatttaatcctcctctggggagcactactcctgcggttttcattgataatgttaaacggcttgagctgctcattaacggccctgctgataatgttgcagaccgcgctggggacccgctttattcatggcgggaaattcagcgtagcttggttcctctcggtcggcagtatatgactctagcagatgcgctagctgacattgcaaacattcccaacgggtcttctacttatgtccgaagccagggcggagaatccatcgcagatgagtatataaataatggcggcgcgctggaaccaaccggccgtaaaatgccctctcagagatttgtggcggagacaattacggcattgcagggggtagttacttctgtttctgtattagcacaggcggtgaatattaacgaacggaatattctcgatatctattcttcgactgaccgcaccgaagacaagctgacaggaatgctgtccggaatttgttcgctgaccgacagtgtgtcggaaatttatccggagctgccgtctgaagaagagcgccttcgtcttttgatgctcgcctgcggcacggcggaaatactgaacgctctggatgggtttgatccccaatcacgaagcggtggcggtgattcactgatacacccgaccattccgggattgtacatgctgcccgagcccgccgggctggtacatgttaatgtcgatatccagacggtgccaacgtcaaaggaagcgccgcccgtaaaggggatcgccagcgtgtcatgcggtggtgggataattcagttatattgtctggtatcggtacagggcgcaacgtcatcaaattacccaaagaaaaacttaaacattgagttttatccggacagtaattttgatgatactgtcgatgtgaaaatcggctcgcttctgccccacgatgaatgggtttacaaggcgaactggatagactttacgcacgtcagaaacttaatgtcatatcgcctgtggcatcgtgtcatgaattccagaaatggatttccgaagtgggacgttgataattcatatctcggcctgaccggcgtagcatcagcaccaaccggtgcgaccgggcatcctgatggtttcccttgtgttcttaccgtgggtaatgaattttacggtattggtgatctaatgattggcaagaaaagagcaaactacaacttaccaaaaaatgacccgttgaaaattcaacttgattttggtgactggttcgacataacaaaattcgataatcctgccgcgtatgaatttaaagcaccaaaaaaccccacggatgaaactaagaatgctattaatagttgggtcgcattctgcgcactagcaggtgaagatttcaataatgcgattaacgctaagcttgataaaaataatgttattgatttcattcttttcattcagcttattgctgccaccgacctgattcaggacaatcgcggtaaaaacgttcagtttgtgtcctatgatggtgtgaaatggttttttatgccttatgaccttgacaccacctttggcctttactgggacggaaagggaattcatacgaatacttcagacgatatgtttaccggctctttctggaaaaaaatcatcagttattactcagccgatatcaatgcgcgataccagtttttacgccggacaggggtttacagtgtcgatacgctctatgagatagcgaacggcctttcctgccgctattcggaggccctgtggaaggccgagtcaaaaaattggaccgttccatcaggcgggtttgccacgctagaacaaatttattcatgggccaccagacggttaacatggatggacactaaatacagctactcagataattaa

SEQ ID NO: 242184 - DNA, 1212 bp, Klebsiella pneumoniae
atggctatcatttcaagtaaagaacagattaagcgcagtatcgaagcggcgtcaagaggtcggcaaaccgctatttttacacctggaggacagctggttgttgttaatatctttacgcccgaaacaatcgagagcctcatgccccagctgaatattaccggaacgcatcctgcatttttggttaatggtaaaaaggtcagcgccttgcttgttggcacgttcgcatgcgcactatcaaataatgaaggggtgagtcaggcgatgactccgatagccccggcaaactacttcaatgcggcaaatgccattaatgcaatgggtgataagtggcatatgatgaacatccatgaatattcttttttccagatgaagtccattaagctgggtatgcggccaatgggtaatacggctgacgtttttgacaaaatgttcggctgggattttgcagaccataccgcctatgggcagcgtgttgacggaaaggcgccaggtacggttcttgacgaatctaccaacggtaacgcaaataaaatgaccactatttatacaggttcaggtcctgcgtcattccggcatgacagaacctataacggggttagcgatcttgtgggtaacggctatacgttgttgcctggactgagattcgtgggcaagccggatactggctacgaggtacagattttggggtcagatattggcatgatggcgaatatgaccggagacccgttgaatctgacatataatggaaacggtgactggaaggcaattgatgccagtacaggtaacctggtttcacctacctatacaggctctctggtgaccggaaattatcttccgactaccaacaacgccattaaaatgtacccatccgcgaaggttagcaacgaaactctgggtaaaactggatatcatcttccccttctcgataataacggtggtcaccgtctgggcgacggtcttgtgtggcgttcggggttgaatgctgcggcaatagcgcgcctgcgtcaggttggcgcactcccgcatgcagaggtcagcgttgcagggaatgtatttgccggaaccaatgaaacggtctcaatgtatccgactgccgctgcaaattgcctgattttgttgtctcctccttccgggctctacgggatggtgttcacaacgaatttatatatggacaggccgcagcgattacgggtttgtagctactttgagtag

SEQ ID NO: 242185 - DNA, 741 bp, Klebsiella pneumoniae
atgaataatatcgataaaaaggttgtcgtcattacaggtgcgagcagtggactgggtgaagctacagccctgaacctggcaaaaaaaggcgctattctggtgctgtctgctcgccgcaaggagcgtctcgaccagctggctgcccggattattgctggtggtggccaggctattgctgttgaagctgatgtgacgcgtaaagcagatgtccagaatattatcgacaaagccattgaagcttttggccgtgttgacgtgatggtgaataacgcgggtctgatgtcgatagctccactcagtcttgccaaaaccgacgagtgggatcgcatgattgatatcaacatcaaaggcgttctttatggtattgcggcagcccttcctgtttttgaaaagcagcaatccggtcatttcattaatctggcgtcggttgcaggtatcaaggtattcagccctggcggcacggtgtatagcgggaccaaattcgcggtgaaggctatctctgagggtctgcgtcatgaagtgggtgcgcatattcgcacgaccactatctgtcccggagccatcgacagtgagctgaagctggggagttctgaccagaatagttcaaacttcgtcatcgacttctataaacaagctattcctgccgattcggtagcaagagcgattgcctatgccatcgagcaacctgccgatgttgatatcaacgaaattgttttgcgcccaaccagtcaggaattctaa

SEQ ID NO: 242186 - DNA, 900 bp, Klebsiella pneumoniae
atgcaaaacaagctggagatgctgcgtattttttgcgtggctgccgaatcacgaaattttaaggaagcggcgatgctactggggatatcaccccaggcagtcacccgggcagtaaaggaacttgaagagcagcggggagaaattttattttaccggagtacccgacaaataaagataactgcagatggagaacgtcttgcaaaacaggcgcgccaggcggttgactctcttgattcgctgttagtaaaaggcgttaaggataaaactgatgaaatgggggggacggtgagattaactatgtcttcggtattaggccgaaaactggttgttcctgcactggctgaatttgcgcgtcagtacccggatattgtggtggactgtgtgctgaccgactcgcacagcgatgttatcgatgaacgtatcgatataggtatccgttttggatttttgcctgacaaccggtatgtggcgcgcgaactggcaaagattcatttttaccttgtcggtacacctgagctgattgataaggttggaatgcctgccagcatcgctgagctggattcctatcctctgacggcattgtttgatcacaagacgggtcgctattggccctggacatttaccgaaagccgcagcttcatcccgtcgaaacctcgctttattgccgatgatcttgaggctgagttccaggctattctggccggtgttggatttgggcatatgccgggatttttagttctgccgtggcttaaaagtggcaagcttattcagatattcaccgaggagacgtcacccgtctggcggttgtacctttaccgccctcagcgtgggccaacaccattgaggatcagagcgctgtttgactatcttgtagacgtgctgggtgaactggaaacctga

SEQ ID NO: 242187 - DNA, 1020 bp, Klebsiella pneumoniae
atgtcatttaacggcctgatggcgagaacctggcgctttaactgcaccggagaagccgacgtccttgaactcgaaaacctgcctgttgccttaccggcagcaggtgaggtgctgattcagatgaaagctattggtcttaaccgggcagacaccatgttcagacggggtacttatatcgagaaggccgtatttccctctcgccttggttacgaaggtgctggcgtggtgctggctacgggcgaaggtgttaagcagttctctcctggagataatgtttcagtgttgccttctgacagcctggcgcgttttggcacttgcgcagataagctgctgatccctgaaagctatctggtgcataaacctgacagtctgagctgggaagaagcctcatcagtatggatgcaataccttaccgcctggggtgggatcatgcatgccggggaattgacaaagggtgcgtccgtactggtcactgctgcatcaagcagtgttggcctggctgcggttcagattgcagaagctgcgggggccagagtgattgccagcaccctgacggtggagaaaaaggaacgtctgcttgccttaggtgtgaaagatgtcattgccagtgaagatgaacctgacctctatcaggcgattgtttcgcggttggggggtgagcatcttgatatcgtgtttgatgctgttggtggacctcagattgaacatatcgcacaggccatgtccgcaaaaggacgtatggtcatgcatggtgcgctgagtcctgatgtaacgccttttcctctgcgactggcattacgcaagagtctcactatgcggggcttcctctttttggaagtgttgaatgatccagccattcgggaaaaagcaaagcgttttatcctgagctgcatgggggccggttttctgaagccacagatagataaatgctttaaatttgaagagctgcgggaagcacaccagtatctcgaatcaaatcaacaaatcggaaagatcattgtcagggttgagcctgtctga

SEQ ID NO: 242188 - DNA, 996 bp, Klebsiella pneumoniae
atgaaccagacaatgactgctctcgtactcgaaaatttcggtgatgataaatttgcccgtaaagaactcccggtgccacaaccacaggctggtcaggttctggtgcgtgttcatgccagcggtgtaaacccgattgattataaaattcgtcttggagaggctccgtacgccatgcctcagctccctgctgtacagggtactgatatggcaggggaagttgttgctgtcggtgaaggcgtaactcagttccgtgttggagatgaagtctacggcctgaccggtggcgttcgcggccttcagggttcactggctgagttcattgctgcagatgcagacctgcttgccatcaaaccacgtaacctttccatgcgtgaagccgcagctctgccgttaacgttcctcacggcatggtctggccttgttgataatgccaatgtacaggctggacaacatgtgctggtacagggtggcgccggtggcgtaggtaacatggttgtccagctggcaaatgcactcggtgcaaaagttgctgcaaccgtatgtacggcagatcaggagctgattacaacgctgggcgcattcccgctggattacacaaaggtttccacgcaggacatcattgagcaatgcaccgatggtgaaggctttgatatcgtttacgatacggttggtggccctgtcctcgacgcctcactttccatgacgcgctattacggccatatcaccagctgtgctgcatttggtgaccataacctggcaacgtcatcgctgcgttgtgcaaccctgtcgggtgtctttattctgctgccaatgctcacaggtgaacgtcgtgctcatcacggtgaagttctgaaaaccgccacccgtctggttgaagaaggcaaaattcgtccggtcgttgatgctcgtcatttctcactggaccaggccattgatgcccaccacgcagttcaggatggttcagcttccatcaaggttgtgattgatgtcatttaa

SEQ ID NO: 242189 - DNA, 414 bp, Klebsiella pneumoniae
gtggaaccacctcgtaaacgtgaagttctggtaaaaataacccacaccggtgtctgtcataccgatgcatttaccttgtctgttgacgatccggaaggtgtcttcccggcggttctggggcacgaaggtgccggcgttgttgtggaagtgggtgaaggcgtcactagcgttaaacctggcgaccatgttattccgctttacaccgcagaatgtggcgaatgtctgttctgtaaatccggcaaaactaacctgtgtatctctgttcgtgctacgcagggtaaaggactcatgtctgatggcaccacccgtttctcttacaaaggtcagccgcttttccactatatgggctgctccaccttcagtgaatataccgttgtcgctgaagtgtctttagccaaaatcaatccgcagtga

SEQ ID NO: 242190 - DNA, 213 bp, Klebsiella pneumoniae
atgctctccagcctgtggatatccagcccggtgtcatattgcgtgccggcgagggtggccaccagcgcctcggtggccgggtggccacaggtggcgctcatcgaggagatggcggtatcgacgccgtcgacgccggcttcaatggccttcagcagcgccatctccgccatcccggtggtggcatggcagtgcaggtgcagggtgacgtcatag

SEQ ID NO: 242191 - DNA, 981 bp, Klebsiella pneumoniae
atgagccatcaactcaccttcgccgatagtgaattcagcactaagcgccgtcagacccgaaaagagattttcctctcccgcatggagcatattctgccatggcagaatatgaccgctgtcatcgagccgttttatcccaaggcgggcaatggccgacggccctatccgctggagaccatgctgcgtattcactgcatgcagcattggtacaacctgagcgacggtgccatggaagatgccctgtacgaaatcgcctccatgcgcctgtttgcccgattatccctggatagcgccctgccggatcgcaccaccatcatgaatttccgccacctgctcgagcagcatcaactggcccgtcaattgttcaagaccatcaatcgctggctggccgaagcaggcgtcatgatgacccaaggcactttggtggatgccaccatcattgaggcacccagctctaccaagaacaaagagcagcaacgcgatccggagatgcatcagaccaagaaaggcaatcagtggcactttggcatgaaggcccacattggtgtcgatgccaagagtggcctgacccacagcctagtcaccaccgcggccaacgagcatgacctcaatcagctgggtaatctgcttcatggagaggagcaatttgtctcagccgatgccggctaccaaggagcgccacagcgcgaggagctggccgaggtggatgtggactggctgatcgccgggcgtcccggcagggtaaaaaccttgaagcagcatccgcgcaagaacaaaacggccatcaacatcgaatatatgaaagccagcatccgtgccagggtggagcacccgtttcgcatcatcaagcggcagttcggcttcgtgaaagccagatacagggggctgctgaaaaacgataaccaactggcgatgttattcaccccggccaacctgtttcgggtggaccaaatgatacgtcagtgggagagatctcagtaa

SEQ ID NO: 242192 - DNA, 345 bp, Klebsiella pneumoniae
atgctgaagctgtctgaagagcagtgtgctgatgtggacaaaatggaagatgatgattttgttcgcgataccgcgcaaacgctgaagaagaaattcccggggattaacgaaccggatgaaacgttccgtgtgcgtctggggaaagcattggattatgcgaacacgctcccgttgaaagaaaagaatgtgaagcgagattttctgttcctggaggcattctggccgggtttctatctgaagcctgaagtggacaaatggctgagaatgccaaacggttactcagccgaccagcgggttaaagattataagcatgtgatgataaacagggaaaggaggaggctctga

SEQ ID NO: 242193 - DNA, 774 bp, Klebsiella pneumoniae
atgaagttagatttcagaatagaacatgagtttgatcgcagtcaatcaataaaaccagttgagctcgcaactctttttcaggtagttacaaaacaattggatgaacttttaggaactaaaagattatggtatgaacaaggatattcaagaaagcaggctctgcaatacaaaatatttactgaggatggactatccgaagacgttcttggccgttgggagaaggagtataaaaaagactatccgaattggactgctggtatttgggatggaggggctgatgaagatagtgcaggagtggattgttaccagtcatattctagtactcaccgcaggaaaaatcctctaagcttggttgtaagtttttctatagaagtgaatcaaacaagtcttaacactgagaaaatgcttggctttttaacttctctgttacactcaactgatggctgtacttattcttgtgtagaatctggtggttatagtttttccgaaataaaccttaaagaaaatggttacgatgaggtatataaaaaagtatttcccgatagaatatcttgcggatggatgttgttcatacctgccattattttacctgacttgattccagaagcagccagagttgtttctgtcctcaagggtgacaaacagatcggaacaatcgttgtttcaactgaagaaatatttgatggtaacaacaaagaacatatcggcaaagctaatgatattgaaattaagttgctagatcttggtttgttaccgttgatgacagagctttaa

SEQ ID NO: 242194 - DNA, 843 bp, Klebsiella pneumoniae
atggcctatggtttcaaatcacgccaagcattctgtaaccaccttggtatttcacaaagtacaatggctaacagatatgcacgcgataccttccctgctgattgggttgttatatgttcaatggaaactggcgcatcaatcgaatggttagcatttggtttagatgctgaagaaggagtgccagttccttcgccagaacggcatgctgaaaaacagtctgcagatgaattttgcaatgaagttcacacccccacgataaagttcgataatgaaaaccacatggatttcactcgagggggtaaagcagcaatagagcgaattgttaaggcttacggttacaaaacgcgccaagccttagccgatcaccttggtatctcaaaaagcacattagctacacgatacatgcgagacatttttccggcagactggatcatccaatgctgtttagaaacaggagtgtctctcgagtggttatcttttggtaaggggcattccaatcaaacaaagctaagtgggttgcttacattagactgctatgatctacgtgacggcaaacttactgatcaaagagaattaatcgtttcgagcgaaattttacctcaaaatttaaaacatccctatatagttaattccgcaaatgattcatatatcattagcaaagaggagtatcttagcgatggtctatggttagtatctattaacggagaatttacttttagagacatatttaaacttccaaacaatcgcatccgcgttgaaaacacaaaatatagctttgaatgcgataaagaagatttggaatttaataataaagttaaaggaataattagaaaaagggtttaa

SEQ ID NO: 242195 - DNA, 1050 bp, Klebsiella pneumoniae
atgagctttacgaaaactattgaatttgcaaactataccttaaattttggagaggacaaagttctcttagatgcttttgattgcattgtttttccttcatttttcgcacaaaaatacgttagaaaatttaaagatacagaatatttctttactgacacaaaaattattacgttagatactacagattcagattttattggtcctatagttccaacaattgcattgtgtggccgcattataaaaaagaccatatttaaacgagatcaaatatttcaagatggtcaattaattcgagatcacaggacgctagaaagtcaccccagctctatttttattcttatgcttaatgagcacagattaatgctttgcaaagaggtttctggagcccctaccctagaagaatttgaaaatactagcaagtattgccttgcacagcgatataattcttttgtggattacgaagtaaaaaaaaataaaagaattagaaagaaaaaatcatacattgatcgactgtataaaaaagatatttatcgtaaactaggagcccccaaattacgggttacccccttaacagacccaagatcattgagcaattttgttgaactcttttctgttgttaatagattatcaattgagttattgccaacaaatagtgaaaatatatctcttgatggcttctggaggaaaattgaacaagaaaaagaagaacttaatagtagtaaagctcaattagtatacacaaataaaaatgaagatggtttaaattctgaggccgtcattcaaaaaacaacaagtgcaacccgaatggccaactctaaagtaattataagtggtaaagatgaacacggagcaaggctatcagggaataatgatagttttactctaaaagcatcaaggccacaacttagttctgatttggaaagagctgctcaagaggcgtattctgcattcacagaattaaaggatgaaggaaatattattattccagaacgtgaagattatactaaaattttttccaagttaacatcaataatttctaggtggctatag

SEQ ID NO: 242196 - DNA, 606 bp, Klebsiella pneumoniae
atgaaatatacattcaacccagaagatctgaccaaagagcgatctttgcatgatgtttacaaattaactaaaaaaataaaggtcaattcatttgacttttatttcacattattgttagtgatattattatctattaatgctttttgtctatcttcatcaccagagttaatttcatctattagacaatggacacctttagtattcggattcactacaacaacattaggttttttaattactggatttacaatatttgcaaccataaataaacctgaacttttcctttcattaatggagtataagcatccattatacgggataagttacttaaaatatgtttatggcgtatttatgagagtatttatatatttcatattttggtctgttatctatcttttagtccttcttttcgggcaagaaaatggattggctacaaaattactcagagccttaatgttttctcattgcactaaagttgttggagttcaaatactatatatactcgtaggaagcagtgcagtgttccttgtattaactttaaaaactttcctgttcaatatttatgctatgttaatgcaatctctacgctgggaagtagaaaggtaa

SEQ ID NO: 242197 - DNA, 312 bp, Klebsiella pneumoniae
atggcgttttacagtatcggtgaagtcgccgaacgttgcggaatcaatccggtcacactgcgcgcctggcagcgtcgttacggtctactgaaaccgcagcgtagcgaaggcgggcatcgacaatttgatgaagaagatatcctgcgtatcgaagagatcaagcgctggatagagcgcggtgtatcagtagggaaagtcaaagcgctgctggaggataacctgccggcggcgcgcgacgaatccgcgcatcttcaggaagagatgatgtccattctgcgttatagcagcccgccagaatccgcgccaaattaa

SEQ ID NO: 242198 - DNA, 1335 bp, Klebsiella pneumoniae
atgagttctgccaagaagatcgggctatttgcctgtaccggtgtcgtcgccggtaatatgatggggagcgggattgcattattacctgcgaacctggccagcatcggtggtattgccatttggggctgggtgatttcaattattggtgcgatgtctctggcttatgtttatgcccgactggccactaaaaacccgcagcagggcggtcctattgcctacgctggcgaaatatctccggcattcggtttccagaccggtgtcctttattatcatgcaaactggattggtaacctggccatcgggattaccgcagtttcttatctctctacgttcttcccaattttaaataacccggtgccagcaggtattgcctgtattgccatcgtgtggatctttactttcgttaatatgctcggcgggacctgggtcagccgtctgaccactattggtctggtactggtgcttattccggtagtcatgaccgcggtcgtcggctggcactggtttgatgtcgctacctatcaggcgaactggaatacctccagcaccaccgatagccacgcggttattaaaagtatcctgctctgcctgtgggccttcgttggcgtagaatccgccgccgtgagtaccgggatggtgaaaaacccgaaacgtaccgtgccgctggctaccatgctgggcactgcgatggccggtatcgtctacatcgccgcgactcaggttatcgccggtatgtatcctgcttctcagatggccgcgtccggtgcgccgttcgcaattagcgcctctaccatcctcggcggctgggctgcaccgatggtatccgctttcaccgcctttgcctgcctgacttctctgggctcgtggatgatgctggttggccaggccggtgtacgtgccgccaacgacggtaacttcccgaaagtgtatggcgaagttgataacaacggtattccgaaaaaaggcctgctgctggccgcagtgaaaatgaccgcgctgatggtgctgattaccctgatgaactccgccggtggtaaagcctctgacctgttcggcgaactgaccggtatcgcggtactgctgaccatgctgccttacttctactcctgtgttgacctgattcgtttcgaaggcatcaacatccgtaacttcgttagcctgatttgttcggtactgggttgcgtgttctgcttcatcgcgctgatgggcgcaagctccttcgaactggccggcactttcatcgttagcctgattatcctgatgttctacggtcgcaaaatgcaccagcgccagaacaacgcatcggataacaacaccaccgctaacgcgcactaa

SEQ ID NO: 242199 - DNA, 150 bp, Klebsiella pneumoniae
atgaacgaacaagcaaataaaattctaatcgaccttttgcagagagccgcgagcggggttgatgctgccgtgtcttttagccaggctcaggttcctgacatcatccggcagttgatggtgtggaaggcagcggcttacggcatgcggtga

SEQ ID NO: 242200 - DNA, 225 bp, Klebsiella pneumoniae
atgagcgaacgttccagctatacaacccggactgaggggtgtaaccgcgtttgttccgtgttcagcatcattctatgtagagggggcctaactttcgataaactcttttactccggtcttatcacacggattgttcaacagatagaaaatggatattttatcgtggaattctcagtaaacaaagaaagcatgtaccgcactaatttaacagggcagcagaaatga

SEQ ID NO: 242201 - DNA, 1872 bp, Klebsiella pneumoniae
atggacccattacttaatcaaatagttattagtggtacaggcgaagcggtaaaagtcatgaccgagaaactcctctcttctagatggcttaaagggacagaggaggccattgggataattgaacaattagaccaacctgaaataaggtctaaatatatagagaaacatgtgtctaatgcgctacgcatgagaacgctccaccaacgagaacatgatatcttgcttgatgatatctacttcccgttaacaattgtaaacgtatcaaataaagatgaattcatagttgacaatgagtgcatcataacacactcacggattttaaatattattggtatcgcaggccaaggtaaaagcaccatactaagaaagttatttcaaaatgaaattagattaaataacagaatccctttttttatagagttaagaagaattgaaaaagggacattgatagaatattttaaatcaacacttgagtcactcggtgttgatataaatcgtaccaacaatcatgttgaattgcttctacaatccggaaagattgttttaatgcttgatgggttcgatgaagtaaaagctaactcaaggtacgaaatgctttctcagataacagagttgaatatacgatataattgccccgttatagttacaagccgtccagaaactgaagtgtgcagagagacatccattagtaacctattagttaaagagttggacgaggaaagtcaactaggaatattaaaagtattatcaaatcaatctgaatttgttgaattatcaagtgtaattagagacaacccacaactcaaagaaactctcaaaacacccatcttgataaaccttttatatgtatgctatccatattgggatgagttacccagtaacgttgttgagttttataacaagctttacattacactttatcttaaacatgataggatgaaatcttgggctcgtgaacgtaaatcaacgcttaacacagatgattcgctatggtgtttttctgccttgtgctatttttcgatgagagatgaagtttttgaatttgacacattatcacttaccaaatatgcgaaaaaatccttaagcgctgctagtttcgatgtaaaacaatacgaagcgtttgtagatgatatcattaatattacttgtttaattcagcaggatggtttagaccggtatgtatttctccataagtcagtacaggaatatcatgccgcttatacaataagcaaccttcccaaagaaataaaaaaacaattttacgattcgattacagaaaacttattgtctaatgataaattcgataatgttttgacttttttacattacatagataaagatgccttccagaaatatatatccatcgaatatttcgaaaggttaggcctggcggctattgcagaagctgaactgaataaagtgtgcgattttattattagtaaaataaaaaaaatgtgcctatatgctgagaaaacagaaaacgagaaagttacatggcaattggttgcgttaatctcttcagagattggagttgacctcttgccactgatgagaggagggcagcgcctacatgatgaatttttagatgaatcgatactcgaagccgcggctggaagttttcatatttctgaactcgaaaagtatgaatattcctatgttgttaatccgataaccaaaaaaaattctataactaagtttagagtaaatcttgccagtttcatgatagcaaataatttacttttagatgtcgctgaaagattaaagaaagttacatctgaatactatcattgtgtttacgccccattaattgaagagaggaaaaagaaggctcatgcattatataaagaatttgaaataaagcgcgagccctga

SEQ ID NO: 242202 - DNA, 1455 bp, Klebsiella pneumoniae
atggatttttcagaactaaacatacaacgcctttttggtcaagaggcggctgaaagtgaagaaatagatcgactaaaagaatactattttaaaggaaaaatttattcaaaagtcattgttgacattcctttaagaatattggttgggcataagggaatcggtaagtcggctttatttcaaattggcatggatgatgaaagaaataatgggcggttaactttcattataaaaccagatgatatagcaggtattggcggtaaagatgaggattttttatccctcattactcgttggaaattaggaataaacgaaatcataactaataagattatgacctacttcggtttattcgacgaggacaaaagcataatacataaagcattgggggcgggtgtaactctattagatgttttgagtgaaacaatcaatatcaaagataaagttgatttatccaggataaactccgaaataaaagccaaggcaatacgtaattttttagacacaaacaaagtttcaatttatatagatgatcttgaccgaggatggcaaggaagattagaagacatacagagaatctccgcactacttaatgctgtgagagatatttccagtgaaaatcgtggtgtgtatttcagggtaaacttgagatcagatgtttatttcctttcaagaacatcggatgagtctaccgataaaactgaaggctctgttatttggttcgactggtcaaaccatgaaatatttgcacttctgataaaaagggttgcaacatataatggacattatggtgtaagtgataaagaacttctacaaaaaaaacaatcagacttgatgaattacttaacagatataattgaagatagatttacaggaagaggtaagtggtctaatgcacccatgcataaaattttaatgtcattgattagaaaaagacctcgagacctagtaaagcttttaaccctcgcagctaggcaggctcaggatgatgaatccccaataattaagacgaaacatttgcaggcaatactagatgaatattctcaaggcagattacaagatacaattaatgaatttgtatctgaattaccagatgtcgaacgcttaatactgggaatgaaaccctcaaaacgacaacttaaagcatcagagaattataactactctacgaactccttgctggaaaaaataaaatcaatagaacaacaaggcatattcaaaggaagaaacaataaaactctatcaacaaaagaattagcagcattcttatataaaataggttttattacagcaagaaaagttctgccagacggaacaatagacagaaaatacttcgagcaaaatagatatctttccagcaagtttgctgatttcggctatgattgggaggtacaccctgcgtacagatgggcattgcagccagacaatatttttgaccttcttgatagcatagattaa

SEQ ID NO: 242203 - DNA, 564 bp, Klebsiella pneumoniae
gtgacacaaacaggtgttgatgatgtcgcctggctggacgtcagcggtgatgaaatgccgccctcgccggttcaggtgaatgctgaatgttgctcacggtgccgatggcccgctcagcgacttttccggctccgtgaagcagagaacgacacggtctgcgcaacctgctggataagccataacctggacaccgcgtcagcacacaagggggcattgtgctggtttccaggccttcatgccgcagacgtcgtgaatctgcaacggactgcctgtatcgcggccatcgccggtaacagcaccgcgaaaaaacaggggcagcgggtactgcgatggatgctccgacataaacgggaaaccgagcgcgcctgggatacgtcccgtccagctgaatttgcggcggtgatgtcccgcttacacccggacgaccgtctggtattccgtcagcggcttgcaggttgccacctggttctccctgccaccgtgttcagcgatctctcattgctgctacctgccggcatggacgctgacacctttctgaacactctcacacttcccaggctgtag

SEQ ID NO: 242204 - DNA, 720 bp, Klebsiella pneumoniae
atgaatgaatttaatcatcccgccacagaaaaggatgaccagccggacacgtcggccatcgtgcagcatgagaaaccaggcctgaaatatttccttctggaaaaacagtacatcctgggactgaacggtccctggcttatcggcatgctgaccgccgccacacttggcgtctggtatctttttggcacagtcgccccgtcttcatcagatgaactgaatgcggcggccggttttgaagacgttcccccggcagcctcacagccacagaacaggtcactgtccccgccgatgtcacagccagccagcgataacgtgaagcaggaagtggccacgatggtgaacggcgtcaaaacctacgcggaaaccaaccgcaccgccattcagcggctggccggtaccgtgaaaacattgcagcagcaggctgacgccgcgcagcagctgcagagtcagtatctgaatgaaatcagtgtgctgaagtcgcgggtggcaacgctggaggtggagaaggtcaacaccgcaacgtccgccccccatcgcccgcgcctgctgacgtcaggtatgaaggtcagttcagtccaggacggggccgcgtggatcttctggaaaaacaaaacctgggccgtccgtgagggcgataccctggctgacggtaaagtcagcatcatccggatcgattcggcaaaccgccaggtattcacgactgaaggcgtgattcgttaa

SEQ ID NO: 242205 - DNA, 312 bp, Klebsiella pneumoniae
atgaacaaagtcctgtatctgacactgtctctgctgacatttcccattattgcctctgccagtagttcggtaaacgatgttgtttcggagcagtatctgatatccatcagtaatcagctcaaagaaatttcatccgatattaaacttcagaacaccatgctggaagacaaacaccacaaccgctgttactgggaaggaaaggcctattcagcaggggctattcatactgacaacgcccagtcatacgtttgccgtgaacaaaataatgcccgtgtctgggaacttatgagcgccgacggctccgctaaataa

SEQ ID NO: 242206 - DNA, 204 bp, Klebsiella pneumoniae
atgtcatcatctgcagaaaaaaaaacaaacgtaatctatataggttcaacgcgccgcagaaaaatagagaaagcggcaatttcactcagtgtgcatgcaggaaaacctatatctgccgcaaaaatcacacaggaggtactggatatgtatttagaatcctatattaaggattttatagaaaatacccctccggatgacgactag

SEQ ID NO: 242207 - DNA, 201 bp, Klebsiella pneumoniae; identical to SEQ ID NO: 230099

SEQ ID NO: 242208 - DNA, 252 bp, Klebsiella pneumoniae
atgactgacaatgccgtcctgttaggcgaaggcttcaccctgatgtttctcggcatgggctttgtactggtgttcctgctgctgctcattttcgccatccggggaatgtccctcgccgtcaaccgcctgtttcccgagccgcccgccgcccccgcagcggcgccggccgccgtcgcgcccgccgacgacttcgcccgcttaaagccggcgattgtcgccgccattcaccaccatcgccgtcttcacccttaa

SEQ ID NO: 242209 - DNA, 1383 bp, Klebsiella pneumoniae
atgagtgggagaaaattgccggaggggtgggttgtgacaaacctgcaaaatattgccaattggggttccggtggtacaccatcccgcagtcatgacgagtattataacggcaatataccttggttcaaaactggtgacttagggcctaaattaattaccgaagcaagtgaatacattaccgatgctggcgtaaaaaactcaagtgctaaatattttcccaagggttcagttgccattgcaatgtatggcgcaactattggtaaaacttctatcttaggtattgacgcaaccacaaaccaggcttgtgcagttggtaccccaatagaaggtattacctcaagtattttcttgtattactttttgctcaatgaaaaaaatgcattcataaaaaaaggtaaaggtggagcccaaccaaatatttctcaagctgttttaaaagaacatcctttatgtctaccaccttatgctgaacaaaaaatcatcgccgaaaaactcgatacgctactggcgcaggtagtcagcaccaaagcacgtctggaatgcgcatttaacaaaatagaaatgttcaaacgtgcggttatggattttgcggttaaaggtgatttaactaaagaatggcgtaataagaatgaaattaatgagtgggaaataacccaatgggaaaacattctcttggataaaaaagattcatttagaagaggtccttttggaggcgctctcaaaaaagatatattcgtagagagtggatataaagtgtatgaacaatattgcccaattaatgatgattgcagtttttcccgttattacataacagaggaaaagtttcatgaaatgagtaaatttgaggttcattccggtgatttcctcattagcggagctggaagcatagggaaaatcacattagtacccgaaggttgtgagaaaggaattattaaccaagctctattacgtgttcggattaacaatgaaatttatgataagaaatttttcctgactctttttagatctccaatgtttcagaaggttattattgaaaacagtactggctcagcgatgcaaaacttaaaaagtgttaaggagttaaaacaaataccagtacctttaccctgtttatccgaacaacacgaaatcgtccgccgcgtcgaacaactctttgcctgggccgacaccattgaaaagcaggtcaacaacgccctgaaccgcgtcaacagcctcacccagtcgatcctggcgaaagccttccgcggtgagcttaccgcccagtggcgtgcggaaaatccggatcttatcagcggtgaaaacagcgccgccgccctgctggaaaaaatcaaggccgaacgcgccgccagcggcggtaaaaaaaactcacgtaaaaaatcctga

SEQ ID NO: 242210 - DNA, 339 bp, Klebsiella pneumoniae
atgactaccgtccattctattgcagatccgtgcgatccagaagtctccccaacaaataaccgtcatcttaccgtgagttatgcgacgcgccacccggattacacccgcatccccgccctcaccatgaagggacagtggctggaagccgccggtttcgccaccggcaccgaggtggatgtgaaggtgatgaacggctgtattgtgctaacggcaaaaccaccgcagccggaagactctacgctgcttcagtcttttcatcgggtaggtaagctgtccgcccgtaagcagcggcaggtgcaggactttatcgacgtgatttcaggtaaacgttccgcctga

SEQ ID NO: 242211 - DNA, 3153 bp, Klebsiella pneumoniae
ttgcgagctatagggttacccgatggttacaaaagtgataaagggtacgcagcctgtttcacgttgttctgctcagagtggtatcgaagagattatgaaagggagtgtggatgggcatgggagccaatttataaggcgataggcatatcagcatcttcttcggaaatggggaaaataatccctaaaggcttggatgggtactgggggcgcccggtgcggttctatgatacagaaagacgaaattttttagggtctttatttagtgaaggcggtctacctttcaggttactaaaggaatctaatagccgttttcagtcgatgttctctctcattcttaatcagtacgaacaggcccaatcatctaacatttctacgttcatgctagttcatgcagcggtagaaaaatcatccctgcctgtcgttttcaaagaggatacttccgttgagcttattagtcggatggctgaacaattagtatctcttgttcaaatttatgatctgagtaatcatactgagcctgtaaaagaacttgaacgtgttcatccgaagtggcgggacagtttccctgttcctctcgatgatgatacgggtaccagtttccttaatggacttttacaaacagcttctattgaatccaaaccccgcctccaaaagaataaagcgactctctgtcagtttttatggtcagaaaatcatcctgaagccgtccagaccgtcatttcgttgtctgaagaactgaacttttcacttgaaagcgagccttcaacaactcgcttcgagcttgctatctacgaagatggtaatgagattgctagcttgggtcccgcctatgcaacgctaagtaactcgcaagcaaaaataagggttcgtaagcgcgaaattaaattttatcgaaaagctcccgatgtaagcttgttcattgtcgcgagagctggggggatgcttgtcggctctaagctgttggagggaagtgaaattgcagtgggagatgtgcctttagtttttgtttctgatcatgatgaatggttgctacagggacaagcctcttgcagcgtacgtggcagtcgtgtgcttattgttctaccaaaggatggttgcctggtttcagagcatgagggttatgaccctgacctttcggctttgggatgccgagctataattatcaacggtcgacaggatatcactattaaaggtgaagaaacgtaccggataaagacaggaagagatcaagttattcaggctgggttctctttccagggaaaacggttgaattggtcaagctacccggatgaagtcttccttgggattcccggaattaccaaaaatcctgaggatcactcagagcatcattataaacgctttttcaacggtacgttcatagatgattgcaacgcgcaagagaagatgggaactcagtttctttcagtgcgtaacgataataatgaaacgttactgcgtaaaaaaataggcattcttcccaatgattttaacctggaaataaaaaacggagaacaagcaaacgaaggctctatcattattacaaccaagcattcttgctggtatggtttgaaagaaaaaacattggaggttgataggaagcgattccccggtggcacagaaataataatgaaaactgagggaattcccccagcatcgattttattacaaataacgccaaaccttgctgcaaaccccattattgtttctctccctttccctgcccgaggttgtcttgccttcgataaagatgaaaagcctctcccaaaaaatttaacgattaacgaccttctgggagccagagcataccttttcggtaaaaatggcgaacctacgcgataccaacttgaactacgtttacgctctcgtagcggaatgcaggcatggtatgagtggcgctatagtgcgggagaaagcccggtagagcttactttatacagcttaagggagcatattgacaatttactttccctggagaaagggatcgatcaaacggtggatatgcgtattgaaggcggaggtagctcctttacctggcaaatcaggcgctataaatatagccttgagtatgatcgggaaatgcagcttcttctcgctaattcagtgagcaatcgtacggggcagatcccttcacccgttattatgttactcagtgagcccgaaagaaaagcaataccactcgtatctagaatgagtgaaggtgtaccggttggtgaattcgaattaagttcgacgatacaaaataatggcccatggctggtgttgccgaaacaaggtgaagaagcctcattccggccatgctacattgcaggtgaaccggtaatccaaagcgatactacggcaatacaatccctgcaaaaagcaacgcagctatttaatccccggtcagatgtaaataccattacgttagttctggaacaaatggcgagcgaccctgcacactcgggatggcagttcttacgtaacttatacgatcagtttggatatttaccgctggctacctttgaggtatggcgtgccttggtccagcatccacaggcattggcaatgtcactgtttaaatttgagatgtccattgattatctcagtcgtattgaaagcgagtttcctgttttctgggagtttttgcctattactgaggttaaacatgcctcgatgcgttttcgcgcgtttctgactcataaaggtgctccggaggaaatgcagataaagttactgggtcgaatgttccagcaattagggactgtatttccaacctatgccagcgaagtgcaattatggttagaccaagggaaattaccaccgacttttccggcacaaatgataaaaggcatcattcatgagtggtatcaggagctcttacgcgaacatggtgaatctcgttggccagagtttggcgggccgagtctttttcgttggtacacatcgcaaaaggatcccattatagaggtttcacccgataccagttatcgatattccgtcactttgctccccatatttgctgccgctgttgcatgtggtaaaacaacatttgacagcgtttttgaaaataaacctggtgccgtatttttcttaagacaagtcagagattttgactcgcgatggtttaatgccattttccagtattgcttattgcgtaatgtggctacgaaataa

SEQ ID NO: 242212 - DNA, 879 bp, Klebsiella pneumoniae
atgaatatgacatcctcacaaaagaactggcttattgccataacgccctggctgtttgtctttctctggagcacaggctttgttgcagctaaattcacagttcagttcagcgggccctttcacctgctgttcttacgcggggcgttttcctgcctgatattcctgttacttgcactggcattcaggtcacacttcccttcccgtgcaggtattgtgcgcaatctgattgtaggactgtttctgcagagttttttcctcggagggtgtttttacgcgattcgccggggtatgccggcagggattgtggctcttatcacgggtcttcagccggtgctgacggccatactggtatcagtgctgcaacgtcagcacctccgcccgcgtaaaaggtccggaattgcggtcggctttgccggagtatatctggttctctcacctggccagcacagcttttcattaaatccagcggcttttggatcagtaattatcggtctgctgggtgtgaccattggtgcgctttatcagcgtcgcgcacagggcgaaggccatatcttcgctaacacgtttttacagtacgtcacgctgaccgtctctatgggcctgataagcctgctgtttgaatcaacatctacacaatggagtttgtcatttgcgctggggcttgcctggctggttattggcgtatcagttctggcagtgatgcttcttatatttatgattcgtagtggtgaagcaacaaaagtggcgacctatttttacctggtacccgtactgactgcggctgaagcctggctgctgtttggggaagctattacgttacctatgctgacaggcatggctgtaaccgttgtcggactggtttttgtcatccgggaatag

SEQ ID NO: 242213 - DNA, 858 bp, Klebsiella pneumoniae
ttgaatatcttcccgatgagcatgcaaactgtaaaattatcagactctcctgtagatgacctacttgccgagcttcttactctggcacgttcacactttccattaccctgtgactgcctgagagcggagcagacgcatcaggtaaaaaaattcgaagtagaaggcgctaccctttccttcccacttgagggggaatttcgttaccgtgaaaacgacgaatggcgcagcgtgcttcccggtgagatccttgttatccccaatgcacgcagtattgatatcgaatatgcgccgtctgatcaaagcggtgaattcgttgccctgagcgtggttcttaccgaagagcagcttgaagcagcaagattgctgctgtcggctccgcccccacaggatactggcagtattgcagctgtttcagtgtcgtcactgctttcccctctgaccagatggactcaggctatgcgtgaaggaaagcggccgctctccctgcatgcaatggttgaggttgtgctgtggctgtatgccatgggacaccatgcattattgcgtgccaggcagcccagcctggccatgaagatccgccagatggtagccgaaaaaccgggtcattcatggaccgctgcggaaatagaggaaattacgggtctcagtggaccaacgcttcgccgccatcttgcgagcgaatctactagcctgcgttcagtcattgcggatgcacgtattggtgcagcgctcaggctgctgatgacgtcggagttgccggtaaaaactatcgccgcacgggtgggatacaagtctgcagcgagctttagcaggcagtttacggagcgttatggagttgagcctacaggttttcgctga

SEQ ID NO: 242214 - DNA, 309 bp, Klebsiella pneumoniae
atgctccagggggatcgtcgccatacgggaacaccggcagatggtgtgatatcccgggagcaaatcgccctggttctggtcagtgccctgacccaagacgaggcaaaaaataaaacgttcgagctggtggctgaacgaggtgaagcacagcagtatcttaccccactgtttgcagatctgctggctgatgatccacaaaaaattaatggggttctggacatagacaatatgcctcagcgtgaagaacctgagtgcattattaacgagcagaacctgtattcaagaaaattaaccaatctacaaccctga

SEQ ID NO: 242215 - DNA, 990 bp, Klebsiella pneumoniae
atgcaaaaacgttatctgggcaaatctcgactcgaagtctccgcacttgggctcggctgcatgggcttaagccacggctatggcccggcgaccgatactcgtcaggctatcgagctcattcgcgcagcggttgaacgtggcgtcaccttcttcgataccgctgaagtgtatggccccttcctcaatgaagaagttgtcggcgaagccttaaaaccgtttcgtgaccgcgtggtcatcgccactaagtttggttttacttttggcgacgacaacaagcagcagattttaaacagccgtccggagcatatccgtgaagcagtggaaggatcattacgccgtcttaagactgatatcattgacctgctataccaacaccgtgtcgatccggatgtacctattgaagatgttgcgggaacagtgaaggacctgatcgctgaaggcaaagttaaacatttcggtctgtccgaagcgggcgcgcaaaccattcgtcgtgctcatgccgtacaaccggtcactgcgctgcaaagcgaatactccatgtggtggcgcgagcctgagcaggagatcctgccgttgctggaggaactgggtattggttttgtacccttcagtccattaggtaagggcttcctgacaggagcgattaggccaggaaccacttttggcaaggatgactaccgcagcaccgtgccgcgtttcgccgagcaggcgattgaagccaatgaaaagctggtctcattgctgggtgaactggcggcagagaaaggcgtgacgtctgcacaaatcgcgctggcatggctgctggcacaaaagccgtggattgttcctatccctggtaccacgaaactgcaccggctggaagaaaacctgggggccgccgacatcatcctttctcaggatgactcgcgaaagataacccaggcgcttgaaaccattaaaatcgtcggcgaacgttattcccctgaacatcaggctcgcgtgggccgttaa

SEQ ID NO: 242216 - DNA, 1206 bp, Klebsiella pneumoniae
atgaactcaagtaaaaccgtcactgccgatccgctacacattcctaaaatagcgaaaacgtcattcaaaatattgggggcaataagcgcagctcatttattgaatgacatgatacagtcgctactcctggctctgtatccattgctacagcctgagttttcactcagctttgtgcagattggcctgattacattaacgtttcaggtcacgtcttccctgttgcaacctcttattggcatttatactgataaatatccacaaccgcgttctttacctgtcgggatgggatttacactcgtaggtctgattatgctctcattagctcaaacctatcctgaattactgattgcggctgctttagtaggtaccggttcgtctgtattccatcccgaatcgtcaagagtagcaagaatggcttcaggcggcagacacgggctggctcagtcactattccaggtcgggggtaatcttggtagcgctttagggcccttactggctgcgataattattgcaccgtacggcaaaggtcatgtggcatggtttgtgctggcagccttgctagctatgattattttaatgcaggttagccgatggtacagggtacagactaaaaacacagggcctgcaaatgctgcaagtgaaatatcaccttttccgagaaaaacgattatcactggcatcagtgtcttgctgatattgatattttccaagtttgtatacatgtcaagcttgagtagttactacaccttctatctcatcaacaagtttaatttgcctgtgcaaaaggcacagctctatctttttgcttttctgtttgcagctgcagccggaacggtaattggagggccactaggggatcgcttcggaaggaaaaaggttatatggtgttcaatcctgggcgctgcgccatttagtctttttctgccatatctgaatctggaaatgacctgtttatttacaataataattggtctggtactttcatctgcattttcagcaatattagtatttgctcaggaactcgtacctggccgcattggtatgatctcaggtctgttctttgggtttgcatttggcatgggtggacttggtgcagcagggctaggtgttattgctgatcattctggaatcgacacggtcttccaactatgttctttcctgcctctgattggattaatgacagtatttttgccaaagaaagagtga

SEQ ID NO: 242217 - DNA, 1194 bp, Klebsiella pneumoniae
atgattatgagtcaaaatgaaagcaacgttgatagcatcaacgacgctcagcttgctaaaaagctgagttccgcgaaatggtctacacgtgtagcattttttatagcaggttttagcctctcctgctgggcacctttagtaccttatgctcaacaacggatccatgctgattctgccatgttgggttcaattctgctttgcctgggacttggtgccgtggttggtatgcctactgcgggtgggctcgcaggtaaagtcggcagcaaaaaaataatccttgcgggtgcgtgtggtttatttattgctttgccattacttgcaatggtttctacaccaatagcactgggcctgaccttgcttcttttcggagcgtcaattggcgcaacggacgtcgcagctaacattcatggcactgaagtacagaatgcagctggccgtccaatgatgtctggctttcacggcttctacagtatcggcggacttgcgggcgcaagctttgttacgttactgattgcttcaggactggatatcaaaatcgccgctggtgcagccgcgctggttgtattgattagtatctctttagctgcatcgggttttttcaccaaccgctcgacagaagatcatccacttttcgtggtgccaaaaggcaaggttattgggatcggtgtgctcgcaatgattattttccttgcggaaggagccatgcttgactggggagctatcttcctgattcaagtgaaaaacgtggcagctggtgtggcaggaacaggatatgtggtgtttgcaatcgctatggcgttgagccgctttatcggcgaccgcgtggttaccattatgggtgaaaaatccatgctcctttccggagtggtattcaccgctattggtatttaccttgcgactgttttcaacacttacgagtgggttcttgctgcaatggcagtggctggttttgctgccggtaatgtcgtccctgtactgttttctttggctgggcgtcaaaaatcgatgccagcaacactggctatatcagcagcaagtattctcgggtacctaggggtattgcttgggccagcgttgattggttatgcagcgcattttattggtctgacgaatgctttcatttcactcagcgtcgttgttctgctttcggcttccatagttacagtagttatgtcgaaaacagaagataactaa

SEQ ID NO: 242218 - DNA, 792 bp, Klebsiella pneumoniae
atgtcgataaatcgccaaaattcagctaaccctgataatgctgctgctctgatcgtaggtcagacagaaatttgtgaaccttacacaacggcacaacatagtcatcagcggcatcaattgatttatgccacccgtggggtggttcatatgtctactgctgttggggagtggatcttgccaccgagtcgtgcgctatggatcagcggcggcactaagcatgcacttacggtcaagcgcccggcagaaatcaatattctttatattgacccagttatctatccattcactagctttgctcaatgttgtgtcgttgaggtcaccgccctggtacgggagttgattgcaacctgttcccaacatgcctgggattatgaaactaatacgcctgaatacaggctttctacagtcttgatcgaccagatcaaaaagcttgatctctctccgcttgatttgaatcttcccagagatgagcgcgcgctgagagtgatagagctcttaaaaaaagacccgggaaaccgggatcctcttaacgtgctcgctcgcgaagtgggggcgagtgcacgtacgattgagcgcattttctcaaaggaaacgcatctatcttttggcgcatggagacaccgtcaccgtatgctgttcgccgtcgaaaagctggcttacggtgaaaatgtcacccgagtcgcacttgaggcaggctatgaatcatcctcaagctttattgcctcttttcgggcgatgtttggcactacgccatcgcgctatttccgatttgaatcagcggcttcgaattag

SEQ ID NO: 242219 - DNA, 1950 bp, Klebsiella pneumoniae
atgatttctcttcgcttatccaccttacccgtcgcggtgataacggccagtatcttagtcattttcaacgtaaatcacattttaccgatagagttgtgggctgcttacagtccttttaatacacattacgcggttgaaataaccttacttcagtacagttttttaccccgttcagcgatgtctgtgatgatcggtgcagggcttgggctggccggtctgcttttccagcaggtgctacgtaatcctctggcagaaccctcaacactaggtattgctaacggggctcagctaggcatgacaatggcgactctctggggttgtaatataatttctccaggtacgggttcgctccttggcgctgtttttatgggggctgtcatcgcgtttatgacgcgaggaaaacagctttctccggtagggttgattcttatagggttagtcctgaccctttactgcagcgctgtcagccaactgattggtctgtattttcacgaaagattacagagcgttcttctgtggggaacaggttcgctgacgcaaactgactgggcagtcgtcctgcgcctgcttccgcagttgttgatttctttcatcattattctaacgctacatcggcccctgacgttacttggcatggatgaaatgatgtccagaaacctggggcttaagcttcagctcatacggccctttgcgcttctggtaggcatataccttacggctactctggtgacatctgttggcatcattggattcatcgggctatttgcgcctctaattacaaggctacttggtgttagacgtctggtaacgctgatcatgatggtgccagtaaccggcgcgctgttgcttttcatttcggatcaaatcgtcattttactggcatcttactggaaggagatccctactggcactgtcacggccgttgttggtgcaccagggctcattttattacttcccaggctcaaagagcgtatgtattcaacagccggggaatctgaaaactattcagcttccaaaagaagcctgaaaaaatggcttttgtcaggtgtaattatgctttcagccctgacgctattagcatcagggctggggaaaaatgctaacggctgggcctgggctacagaatccgtgctttcgttccgaatcccacgggtacttggcgcgttttctgcaggaatcatgctcgcccttgctggttgtattattcaacgcctgaccggaaacccggtagccagcccggaggtcatgggcgtaagtaccggtgcggcagcaggtatggtgattggaatgctggcatttcctggaaacataacagcctggtattttcctgcagcctgtctgggttcagtggccacgctgatcattgttaccaccatagctggtatcagagatttttctccccaacgtatgatgttaaccgggatggcactaaacgctgcatttctggctttactaatgcttatgatttcaggtggcgatcccagaacctccatgctgctatcgtggtttgcgggttcaacatatggtttaacggctgaaaaagctattagcgtgtctctggctgcgctagtgcttaccttttgtattccgctggttcatcgatggctgtcattacttccatttggcggggttgttgcgcgttcattaggagtgcccctgtcactgagccgtctcgcgttaatgtcacttgcggctgtgctaaccgccctttccactttcattgtcggcccactaagttttgtcggccttatggctccgcatattgccagatatctgggcttcaggagagtgacgggacagttggcaatagcaggcctggcaggagccagtctgatggtcgtatcagactgggtaggtagaatggctgtgtttccatggcaattacctgcgggcttaatcgcggcattagttggcgttccattctttttatggctaattcgaagccgctga

SEQ ID NO: 242220 - DNA, 918 bp, Klebsiella pneumoniae
atgttcagtaataacccctcccctgcagtggcagattttaaacgtcggcaatttttaaagtatctggctggcttatccttattcctggggttacctgcggtcggtaaaagtcccgctccctcgcgcgatctgcagcgaatagcagccacagaatggctggctgttgaaatgcttctgacgctgggtgttatgccctttgctgtatcagaaattgagaattaccgatcactggttaaggagcccgtcttgcctgatggctccacggaactcggtttaagaacagagccaaatacggaacttttagcagcgatgcaacccgatcttatcgtttacgcggaaggttacggcccttcaccgtcagtatataactcgattgccccatcttttggtcttgtatacagcgataaaaatggcagaccgctcacaacgtcctgccaatccctgacggcgctctctgtccgattaggtcgatacgacagggcgaaagcaataattgctaccatcgagtcagaaatctctgcactgaggcttaaatatgctcaaaagaaaagaagaccactacttttaatgtcgcttgttgaccagcgacatgctctggtttttggacaaaatagcctgtttcttgaggttatgagcaaagcaggtattccgggaggatggcagggagacaccagtttctggggaagtgcggtcgttgggatagaacaactaataggtctgcaagaaaccgaggttatttgcttcactgaaaatgatgatacaacaatggcaaaccttgcagataccgcactctggaagatgatgccttttgtaaaagaagagcgtttcagacgggtgcccggtatctggtattacggaggtccagtaacagcgctgcgcttttgccatctgcttgatgcaattctggaggagatatga

SEQ ID NO: 242221 - DNA, 795 bp, Klebsiella pneumoniae
atgaacaatacgataaaacacaatgcgctatttctattgtcagaagcagcatttcaaattaacggacaacaattattatatccatcctcggtcactatcccaggcggggaatttaacgccctgatagggcataatggctcgggtaaatcaacgctgctcaggctatttggcaaacatctttctccttcaacggggagtcttatatttcagggacgtcctgtcgagcaatggggacatgctgaatttgcgcgcgaagttgcatacctacctcagcacctccctgccgcacagggcatgacagtcagggagttggtttcattaggacgctatccctggcatggcgcactgggccgatttacccaatacgatatgcagaaagttgatgaagcaatcgctgacacaggactgtcacgactctctaagaggctggttgactctttgtccggcggtgaaaggcaaagagcatggattgcgatgactcttgcacaagacactaaatgtcttttacttgatgagccgacctcagcgctggatattgcccagcagtctgaaatattgtgtctgctaaaaaaattatgccatctaaaggaaatcacaatcatcgcggtactgcacgatataaatatggcagcccgatattgcagtaatcttctcgcgcttaaatccggacatttaattgctctgggttcgcccgctgagattgttacaccggcgtcattaaatactatttatggtattcagatgggtaccttttcccatcctgttgaagggcatcctgtctgttatgttcagtaa

SEQ ID NO: 242222 - DNA, 2205 bp, Klebsiella pneumoniae
atgtatcgctcttctgtaaacgcgtctcgcaaagtatctggactaagccccctttttgtaaccctgaaaatcgccttactgtcagctcttacagcaaacaccgtatacgcagaagatagcattctggtcagcgctgatgctgaaaaaaacagcagcgaagacccctggggagcaactcctgggctggtatccaaaaagtcggctacgggtacaaaaaccagttctgatataaaaaatatcccccagtccatttccgtgatcacccgaaaagaaatcgatattttgcagcctaaatcgttaaaggacgcgctcggatatacgccaggagtaaccgtatctgacagaggtagctctaacgcttttgatatggttaagattcgtggtttttcatccggacagggacaaaacaactatctggatggcctcaaactcactggcgacaactggaacgagatgtcgaccgaaccctatttgctcgaacggattgaggtacttcgaggccccgcctcagttctgtatggaatgagtaatcctggtggcattgtttcgatggtaagcaagcgcccgatctacactccagtacgcgaagtgcagtttaaaatgggatcgaataacctcatgcaaactggtttcgatttcggtgacacgctggatgacctggggatttacgccttcaggattacagggatggcccgttcttccgatgaggaacaaagcctttcaaggcagcggcgtttcgcaatagcgccttcttttacctggcgtccggacgaaaacacaacgtttacattcttgtccaacattcagaacgaacctgaggtgggatattatggatggatgccaagacaaggtactttagatccgttgcctgacggggttagactgcctgacgattttgacgacagcgcacccaataatacctggtcacgttaccagcgatccgtaggatatagcttcgaacgggtattgtccgacaactatacgttcaggcagaacctgcgttattccagagtcaaaacgtcacagcaaagtgtctatggaagaggaatttgctccacgactgattgccctgatgtaccttctgccgatttaaatcacacgatctcgcgcgggcaatttattgataacgagcggatgaatagtttctctgtggatactcagcttgagagtgattttcacacagcgaatattgaccacactcttttatcaggtatcgattacagaaatttaaacaatgacatcagtaacctgtatggttctgcgacatctctggatttgtataatccagagcagaatgattttgcttttggtgacgcagaaccttatgcgcatgacaagactcgtcagacaggtatttatgtacaggatcaggcgcagtatgaaaactggttgctcacgctggggggacgctatgactggtcacgtcaggaaacctatcttcgccagacaaataccggtatctcccgaaacgaccatcagtttacctggcggagtggattaaattacctgtttgataatggcatcacaccttacatcagctacagccagtcatttgaacctaacagcttcgggttatcttcaactcctccggtctcctatgcaccatcacgaggtgaacagtacgaagcgggcgtgcgctatgtgccacatggacgttctgccatgctcagtgcagcagtatatcaactcaccaaaacgcataatctgacaacagacccagataaccctctgtttaaagtggccgctggtgaaattgaagtccagggtattgaactcgaagcgaaagccggattaacggataatctgaacttaatttcctcatacagctatacacacgctgaatataccaaagacacacaactaaagggaaagacgcctgatcaggttcctgaacatcaggcttccctctggctcgactacaccttcagtcagggagcactgaatgggttgacccttggaagcggagggcgttttattggctccagttggggggattcagagaatacgttcaaagtgggtagtgttgccgtctggaacggactggttagctatgaacttagccagctcggactgagaggggcaaacattgctcttaacgttactaatattctggaccgaaaatacgtttcaagctgttttgccgactatggctgtttccgtggcgctgggcgccagatgacagccactgccacgttccatttctga

SEQ ID NO: 242223 - DNA, 1239 bp, Klebsiella pneumoniae
atgaaacagatagatcaaaaaaagaacattctcatttgtggatcaggtattgccggaccaacactggcattttggttagctaagcaagggcataaggtcactgtcgttgagcgagcatcaagcttacgcttaacggggcaaactgtagacattcgcgatgaaggccgtgatgtggttgagcgcatggggcttcttaaagacatttcagaattaatgacaaatgaagagggtttgcgcttcgttgacagcaaaaatatcattcaggctgaatatccaagtgcaggtgggaagaagtcatttgttacagatatagaaatactcagagccgacttatcgacgcttctgctgaaatcgacacaagatgatgttgagtatatttttggagattacgtcacttcctgtcacgagaatgaagctgaagtcattgttaacttcaaaaatcatgctcagagaacttttgaccttatggttattgctgaaggtatgcggtcatccacgcgcgaactcgtttttggtaaggttcctgttcatcacattggtctatacactgcctattttgcgatgccttatcagcctcaggatgggacatgggtgcgctggaacaattgtacgggtggaaagtctattctgttacgcccggaccagggacgctcaacccgggcatatctgtatatcagaagcagtaatcgaggcattgaccttacaggccgaagtgccgttaatagcttcataaaaagcactttcaggaacgatggctgggaagcaccacgcatacttgaagaacttgataaaactgacgatatcttctttgaagatcttgggcagatacgaatggactcatggtccaggggaagagtcgtattgcttggggatgcggcttattgcgcgacgcctgtaagtggtatgggtaccactctttcaatcgtaggtgcatatattttggccaagtcactgttgaccagtgaggatcatcatgctgcatacaaagcgtacgagcaaaaaatgcgaccctatgtgcaacaagctcagtcgataaaaccctggactatacgactcgaacaaccttcaaccaaactgggtattgcgctattttataggtggaagcgactagaaaagacgaagctcatgcagttccttatgagtccttttgggcctaaaagagagcatgtggattttttgggcgctcccatcgtttacgacacagacatcactcgcacacctgagaaatcaactttgtag

SEQ ID NO: 242224 - DNA, 927 bp, Klebsiella pneumoniae
atgattaagcaaaaaactatcagaacctctgtttcaatgacaggcatagggttacatagtggattaaaagtccaaatgaatgtcattcctgcaggaatcaatacggggatcgtttttcgtcgtgttgatctgcacccagcagtcgatattcctttacgtgccgaaagtattaatgaaacgacgcttgctactactatcttcaatgatgatggtgtacgagtttcaacaatcgaacatttactctcggcaatatctgggttaggaatcgataatcttttgatcgaacttaacgcaggtgaaattcccattgtagatggaagttctgcgccatttgtatatttactgctcaatgatgcaggtgtcattgagcagagtgcccctaagaaattcctaaaaattaacgaagaaatacgtgtagagcttgacgataaatgggcaaccttagccccctttaacggttttcacctggattttactattgattttaatcatccagcgataagttcggacaataaaagatatacaaccaccttgaatcctgaagtttatatcgctgaaatctcccgggcccgtacgttcggtttcttgcgcgacgttgagtatcttcagtcgaagggcttgggtctgggtgcgagtttagacaatgcaattggccttgatgagttccgggtgctgaataaagacgggctgcgatacgaagatgagtttgtccgacataaaacactcgatgcaataggagatctttttgtctgcggctataacattttgggcgcgttcaccgcatataaatccggtcatgctcttaacaatctcctcatcagaagtgttctacaaaatcaacagtcctgggagttcgtacagttagatactgcgccgttttccgaagtgctgacagattccatgatagagcttgcttacgccagatag

SEQ ID NO: 242225 - DNA, 1095 bp, Klebsiella pneumoniae
atgagcggcaaagttgttattatcggcgcaggcgtgagtggtttatacgccgcgacattacttcaaaaggcgggtgtggcctgtacgatactcgaggcaagagaaagaaccggcgggcgtgtcctttcaagccagatgttagcaaacacccctgacggacttcatgtcgatatgggtgctacatggttctggcctgatatgcagcccgaactcgcgcgccttgttaatgcgctcgatctctctcttatcccgcagactcgcccgggagaaatgatgtttgaacgccattgccattctgcaccacaacgttatccatcgtatgaaacatcaccaccatcattcaggctaaaaggcggtatgcaggccctgacatctgcgttgaaaagtcagatcccgtccgggaaaattatgctcggccagcaggttatggcagtctccagtaagggtgaagaagtactggtgcagagccgagcggaaaatggtaaaagcatggcctacgcctgtgatcacctcctgctggctctgccacccgcacaggcggcaagaattgacttcaaaccggcgttgccagatgggctgcttacaggctggagtaagatcccaacatggatggctccccatgctaaatatgtcgccttatataataaagatttcctgcagcaacaaaatctctctggtgatgcaagcagtcagattgggcctatggtagaaattcacgatgtgtccgagccagaatcaggtatcaccgcgatatttggttttatcggtgtgccagcacaagcgagaaggaaagtctctgaagctgtacttatgcagatgtgccgggaacagcttgtacgattgtttggccagtctgcggcagacccactaagagaatttataaaagactgggcagccgatccttttacggcgacaaaacaggatttgcggcaggagtttgggcattcattacctgaacagacgccagtgaacggagtttgggcaggtaaaatgacggggattgccagtgaatggtcgccacaattttcaggttatcttgcgggcgcagttgatgctgcatcagagggagttaatcatttactgcagcgattataa

SEQ ID NO: 242226 - DNA, 345 bp, Klebsiella pneumoniae
atgtttttaaactggaatgaatatcgcagcggcctgctcgcaaccatcggtaaatttgccaaattacagccagaatttatgaaaggctttcagcagatggacaaaggcgcatctgagaataaacatctcgatcccaagacccacgaactgatcgcgctggccgtcgccgtcaccacgcgctgcgatggttgtctggccgtgcatgtagatgctgcggttaagcacggagccacccgagaagagattgcagaggcattggccgtcgccattaacctgaacactggtgcagcgctgacatacactgcacgtgccctggatgtttacgacagcctgccgaacaaataa

SEQ ID NO: 242227 - DNA, 915 bp, Klebsiella pneumoniae
atgagatcgctaaatcgcctgaaatggctgcatgcttttgaagctacagcccggcatggaagttttactggcgcggcacaggagctgggcgtcacgccagccgcagtaggccagcttgtccgcgcactggaagactgggtgggacatccgcttcttcaccgcacccgttcagggaaggagcgcctgacgctggttgatgaagcacaggaagccctgctggacatcacccagggattggacaaactggaatctggactgaacaaactacgcggacgtcgcgcgcgttcggtcgtcgtagtaaccgcctctcaggtactgatgatgaactggctaatggaacgactgaaccggttctcagaaacccatgaaagtatcgacctgcggcttaacgttacggaaaaactaatggacgtgtcgcacggggaggcggatatcggtatccgttgtggacagggggattggccgggcgtcaataaaacctggctgatggatgaagaagccgtactggtttgcagtccgcgtcttgttccggaaggcaaaataacctgtggcgagtggctggccacgcaaaagcttatttatgatgatacccctcaccccggcgcagattttccatcgtgggacgaggtgctccagactgtgaatgcccccgaggcacttgaaagcggacttcatatcaattccacctcagcggtgattctgtccgctctgagcggtcgtggtgtagctatcgtacgatatgctctggtgaagaaacttatcgaaaccggacagcttgcgcagctgcagcccgactatcgctggccgctaaaatggtcgtattatctggtgaccccgcagcagcaggttatgcgtagtgaagttaatatttttcacgactggctacttcaggacgtcctgtcggaaagtgaataa

SEQ ID NO: 242228 - DNA, 777 bp, Klebsiella pneumoniae
atgaacgcatctttctccggtaaaaaactgttagtggtcggcggtacgagcggtatgggtttcgaaacggcgaaactggttctgaaaaatggtggcagcgtggtgctggttggcaatcgtcaggacaaggctgaacaggcccgtcaggcgctttctgctgatggtcaggtctccatcatcgttgctgacctgatgaaagaagaaggcatgcagcacgttattaatactatcaacgcggaacataaagacattagcctgctggtgaatgcagcgggtgtgttcttcccgaaacccttcgtcgacaatgaaacgtctgactacgacatgtatatggacattaaccgtgcgaccttcttcattacccgcgacgtggtgcgcaatatggtagaagccggtattaaaggttcaatcgttaatatcggttcaatgtgggcgcagcaggccatcggtgccactccttctgctgcttattccatggcgaaagccggtctgcacgcactgaccaaaaacctggcgattgagcttggcgaaaaagggatccgcgtgaatgccgtttctccggccgttgttcacacgccgatttacgaaggcttcattccgaaagacgacgtgaaggacgtgatgaacagcttcgacagcttccacccgattggccgtgtgggtaccccggtcgatatcgcggagaccgttgccttcctgctttctgacaagactggctgggtcaccggcgccatctgggatatcgatggtggcgtgatggctggccgtaacgcctga

SEQ ID NO: 242229 - DNA, 471 bp, Klebsiella pneumoniae
atgcaaatccagaccgcaaactatgaccttgtcaccacatggcaggggggcatggccagccgcacgcgctgccagtctatgacgggggacaagcgtcaaagccacgttatcgattcagatgaacctgtcgcgctgggtggcgaagggcgggcgcccggccctcaggatctgatgctggcagcttttaacgcctgcatgacggccgcctttgttcaggaagccattagtgcgggcatcacgctgacccatcttgatatcgagacccgcggtgaactcctgactggaatgccccttatctgtaaaaaaaacactgatgcctctgttggcaggctgcagtatgccattcacgtcagcggggaagggacggcccatcaattcgaatgcgtccatcagcaggtcattaaagcctcccttaaccgttggttattggctcagaacatgacgatagagggtgatttgattcttatctga

SEQ ID NO: 242230 - DNA, 882 bp, Klebsiella pneumoniae
atgccttatccggcctacgttccttcctgcgggctcccccccaggaccggcaagcgcagcgccgccgggcggtcaggctccatacctgcgatagtgccggatggcggcatacatgccttatccggcctacgttccttcctgcgggctcacccccccaggaccggcaagcgcagcgccgccgggcggtcaggcgccgtacctgcgatagtgccggatggcggcatcaatgccttatcctgcctacgttccttcctgcgggaccccaccccaggaccggcaagcgcagcgccgccgggcaggacacttcaagctccgtacctgtggttgtgccggatggcggcatcaatgccttatccggcctacgttccttccttcgggctcccccccaggaccggcaagcgcagcgccgccgggcggtcaggctccatacctgcgatagtgccggatggcggcatacatgccttatccggcctacgttccttcctgcgggctcacccccccaggaccggcaagcgcagcgccgccgggcggtcaggcgccgtacctgcgatagtgccggatggcggcatcaatgccttatcctgcctacgttccttcctgcgggaccccaccccaggaccggcaagcgcagcgccgccgggcaggacacttcaagctccgtacctgtggttgtgccggatggcggcatcaatgccttatccggcctacgttccttcctgcgggctcccccccaggaccggcaagcgcagcgccgccgggcagctgtttcaggccaactccctcagttcaccgtcaggcgcagggccagatcctgcgggtaggggtcaaaatagttctgcgcctgcaggtagcgatccggatactcggccagatagtgcttaa

SEQ ID NO: 242231 - DNA, 2331 bp, Klebsiella pneumoniae
atgccccctgagaataatgtgaagggactttccgaagccgaggtgcaggccaggctggtgcaatatggctataacgaagtgcgtgaacaggctccgggccagctgcgtgcgatcctcaaacgtctgtggggccccatcccctggatgctcgaaattgcgctggtactcgaagtggctctggggaagacgattgaacccgccatgattgcaggatggctcgctttcagtgcgatctttggcggcattcaggaacggcgggcacagtcagcacttgacctgctgcgtagtcggctgaaagttaatgccagcgtatgccgtgatggcacatggcgccagataccggctcgagggctagtccccggtgactttatcgccttaacggcgggggacctggtccctgccgactgtatgattgatgagggaggcgtggatgttgaccaggcaacactgaccggggagtctacccaggagtcacacaacaagggtgatactctctattcaggatcgacgattacacgcggtaaggcgacaggaaccgtcaccgccaccggtacccgaagctactttgggcgtacggcagagctggtacgaacggccagctctgccagccatcttgaacagcttctgttcgctgttgtgcgctatcttgtgaccattgacgccgttcttgcggtcattctggccgttgttgtagtctggcgcggtgaagatttgttgcccctcgtccccttttttcttgttctcattattgcgaccgtcccggtgacaatgccagcagcctttacggtcgccaatgcagtggaagcccggcggctggtgaatcagggggtacttgtcaccggcctgtcagcggtacaggaagcggcaaccatggatgtgctgtgtatcgacaaaaccggtacactgaccataaaccagcagtcagttgccggcatagcggcacttccgggagagaatgaggacgaggtactggcctgggctgccgcagcctgcgacgaaatgaagcaggggcaacttgatatggcaattctggatgcgttacgacgccgggggggaataccgcatatccgtgagcaattcatcccgttcgatcctgccacgaaacgttccgaagctcgtgtgtgttcagacaatgacggatcgtccgttcacgtcattctgggttcaccgatggtcattgcatcactcgccgaatatcctcctgagttcaccacgatccagcaggccatggcggtgtccggcgccaggatcctggcagtcgcaaccggcaccgacggccatctccgtatccgagggttgctggcactagccgatgcactacgtgatgatgccgcagtcctcgtcagggatatccgggcactgggtatcagaataatcatggtcaccggtgatacggttgataccgccagagttatcagccaccaggcaggactcggtgaccgcttcggcgatgcagtcagggatctgcagacacctctccactttgatggttttgctaacttctatccggaggaaaaattccgtctggtgcagtccctgcaacagatgggctgtatagtcggcatgacaggtgacggtgtgaatgatgcgccggcactgaaacaagccgaagtgggcattgccgtacagacagcgtctgacgtggcaaaagcagctgctcaggtggtgttgacccaccccggtttagacggtgttgctgccgtcgtatcaggggggcgccgtgtgtttcgccgtatgctgacctggacaataacgaaaatagcccgtaccgttgagctggcggccctgctgaccatcggctatatcgcgacaggattcttcgtcacaccgctggttctgattgccgtgattgtggttctcaatgatgtggtgaccatcgcgctggcgacagaccggtcatggatttcttcatcaccggaaagatggaacgtgggtgaaattgccaggctgggaggtgtcctggccgcaggctggctggttctggcattcatgatcctgtggttcgtccttacccggttgcagcttcccgtcccgcaaatccaggccctgatgttcgcctatctaatgtatacggcccagatgacgatttatctttcacgaacgccgggccgctgctggtcactccggccaggccggtttgttgtgttggccacggtgggcaatatcatcattgccaccgtactggctgccggcggttttcttatgacgccggtgtcactggcactgctggccatcatgtttgctctggttttactggccacccttctgctcgatcagatcaaaatatggctcttcgccagaagacatgctgaggaatcatcgaaatgctga

SEQ ID NO: 242232 - DNA, 168 bp, Klebsiella pneumoniae
atgaggctgccggacaaagaaggccagtgccataccgatgataaatccaccaaccagattaactaccagggtgccaggtggaagattggggaaaagtgcattgagacgcatggacagtatccagcggatcacacagccgatcgagccacctatcactaccgcgaataa

SEQ ID NO: 242233 - DNA, 354 bp, Klebsiella pneumoniae
atgccagaaatcgcatccctacaacttttcaaaatactatctgatgaaacccgtctgggtatcgtgctattgctcagggagatgggggagctgtgcgtatgcgatctctgcaaagcgctggaacaatcacaacccaagacctcccgtcacctggcaatgctacgggagagcggcctgttgctggatcgtaagcaggggaaatgggttcattaccgcttatctccgcatatgccttcctgggctgctcaggtgattgagcaagcctggttaagccagcaggacgacgtacaagccatcacccataaactggcatcggctaagtgctctggcaggagtaaaacggtttgtatctaa

SEQ ID NO: 242234 - DNA, 324 bp, Klebsiella pneumoniae
atgacggtaaatctgccccgccaaaccagcaccagctcgttcaggcgtaacataagcgcctcgtatttgtttaccttcagctgggtttccgtttgggtctatgaaagagaaattgtcataagcaaatcgagcaatcacttcagatttgccctcgtcctccatctcaagaaccatgatgcgatcaacgatctcactgtcttccaacccgtctttgtcacgcaaatcgtcgatgtggctggcaatgaactcaggatcggtgaaggcaacttcttccactaccgctatgtgatgataatcggcgctatcgtaggttgtttccgttag

SEQ ID NO: 242235 - DNA, 1059 bp, Klebsiella pneumoniae
atgaataacagcatttataaacatctaatgaccggtgtgtcacatatgcttccccttgttgtcgccggagggttgtgtattgccctttcctttgtttttggtatacaggcatttaaagaacctggtacgcttgccgccgcattaatgatcataggaggtaaggcggcttttgccctgatggttccggtactggcaggatacatcgccttttctgttgctgatcgtcccggtctcgcgccgggtttaatcggtggcatgctggcaagtctgggaggcgcaggatttctggggggaattgtcgctggctttcttgctggttataccgctaaagccctgattgagaaaatcagactccctgcagagatggatgccctgaaacccattttggtcgtcccattgctggcaacattaatcaccgggcttatcatgatttacgtggtgggtggacccgttgctgcagccatgagtgccctcacaacatttcttgccagtatgaccacttccaatgctgtgctgttgggtatattacttggtgcgatgcagtgcttcgacctcggagggccagttaacaaagccgcctatacctttggtgtcggtcttcttgcatcacaaacatacggtccgatggctgcgattatggctgcaggcatggtacctgcattaggaatgggcgtcgcgacctggcttgcaaaatcaaaattcacgcaatctgaacgtgaggcgggtaaagcatcatttgttctaggactgtgttttatctccgaaggagcaatcccctttgcagctcgtgacccttttcgtgttatcccgtcgaccatggttggtggcgcattggcaggcggtttgtcgatgttctttggttgtaccttaatggcaccacacggcggattatttgtcctggcaatcccccatgcggtagatcacgtcgggatgtatctgttttctattattgctggaaccgtcgccactggcgtgatgtattcggtattaaaactgtcaagtgctgcgaagaatgagtcggtgacagccgagcaaggagtcgagaaaactgaggggtaa

SEQ ID NO: 242236 - DNA, 825 bp, Klebsiella pneumoniae
atgactaaacatttgaacaaagataccactatctgcatgtcactggccgcaagaccaagtaattttggtacgcgttttcataattatctctacgacgcgatggatctcgattacctgtataaggcctttactacccgggatttgaaagccgctatcggcggcgttcgcgcattaggtattcgtggctgtgcaatctcaatgccgttcaaagaggagtgtattccgatgctggatgaactcgatgcctctgcaaaggccatcaactcggtaaataccattgtgaataacgacggctatctcaaggcctataacaccgactacatcgccatagccactctgctgaagcagtataaggttcccaccgactttacctttgccctgcgcggcagcggcggcatggcgaaagcggtggcctgtgcactcaaagatgctggtttcagtaaaggggttatagttgctaaaaatgaaaaaacgggccctgaattagccggactgtatggctttgactggcgcaaagagatgggggatctgaacgctgaccttctcattaacgcaacgcctgtcggtatggcaaatggcgaggacgccgacaaactttcctttacgcagcagcagattgaacaggcacagataatcttcgaggtcgttgctctcccggcagaaactccgttggtctcctgtgccaaaagtaagaacaaggtcgtcattactggcgctgaagtgtttgcgattcaggccgtagagcagtttgttctctataccggtgtcaggcctgataatgaactgtttctgcaggcggcccgtcacgctcgtgccggagcctaa

SEQ ID NO: 242237 - DNA, 1764 bp, Klebsiella pneumoniae
atgaccagtcgacggcttgaacaacaatatctgcgcctgttagatattttcccggcacagaccggcagtacgaccctgcaggaactggcggataagcttcactgcagtaaaaggcatatgcgcagcctgttggtacagatgcagacattgggctgggttgactggttatcggttgcaggacgagggcataggtcacagttgaatctgctgagaaattcccatcagatgctggttgaaaaggccgacaagcttatcgatgaaggcagttttgacgaagcactcagtctgcttggcgaagaaaaacaactggtgacttcactgcttcggagcaagctgggttatagcatccgcaatgactaccagtcgcttagcgtgccgtattaccgcaccatgcctaatctttaccccggcactccgctgcgtcgttcggagctgcatcttgtcagacaaatttttaacgggcttacccgtatcaatgagaatactggcacaccagagcccgatctcgcacatcaatggcgtcaggttgacgaactgcactggcgattctatttgcgcccaggagtgttgtttcacgacggacgggagctgaccagcgaagatgtggttgaatcgttgacccgctgcgcgagcaatccgcttttctctcatattcagcgtatctgtcagggcggtgcactgagtgtagtggttgagctcagccaggcagacccacaacttccgcttttattgtctcacccgacagcgctgattttgcctgccgaccacgccttgcgtgcggattttgccgcacatcccgttggcaccggaccatatcaggtgagtgaaaataacgactggcgtctgcttctaaaagcctatgaccgctatttcggctttcgggccttgcttgatgaggtggaagtattgatgtgggctgatcttgccacgctgtcattaagtgataaaccggccaaatcgacagcagttaatgccgtgcccgggcagtctgccgcctggctgagttcaagcattagtgacgtggattatgctgccggtcgtgcggttaatttcacaggtaaaccgtctgacctttcaaacgagatgtttcttgagcgcggcgggtactttttactttgtgacagccgctccagccagtggcagagcattgaaaaccgacgctggctgcgcgaaaagctcaatccgaacctgttaatacagaaactgatcgagccgatccgacaattttgggtgccgacagggagcctgttacctgcatggtttcactgtatggatgccggtcaatcgcagccgccaaaaataccttgccggttaaagttagcttatcacgcacagcaccctgaataccggatgttggctggtgatatgagagatgttcttgccgattctggcgtcgacctcgaactcatcgaattagagtacgaacgctgggccacaggagaggtaaaagtggacctctggctgggaacagtcaactttcctgttcccgaagcatggaatgtaggggcatggttgttgggtatgcccttgttaaaaaaccacatttccgggggcaataccgtcattttcaaccagtggttgcgacagtggcgagaagaaacgttgacctctcagcaactggtgcaaaatgtggtgggggaggggtggttgcagccgctgttccatcactggatgcgcctgaaagggcctgagcaggctcaggggatccacctgaacaatctcggctggttcgattttaaatcaacatggatggagcctgagtaa

SEQ ID NO: 242238 - DNA, 1173 bp, Klebsiella pneumoniae
atgccttttgttgtgtatatcttcaccctgagcgcatttgccctgggcctggcagagtttgtacccattggactcagcgatgtcatggcttcgagcctaaatgtcaccgttgaacaggtcggcgcgactgtcactgcctatgcattgggtgcaacattatctgcaccaatcctgaccgcactaacagccagttggtccagaaaaaatgtcatgctcgtgacggctctggtatttaccctggggagcttcgtggctgcttttgcttccacactctccgcaatggttgttgcacgctttgtggctggcatcgggcatggattattcctggctgtagctgcaagcaccgcagcgaagctagcgggacgcggtaaagaaggacgtgccgtcgcagttgtcttcggtgggtttactctggcaatggctattggtgtaccactgagtacctggcttggtggtgtcatggcatggcggcccgtccttgctgttataggcgtatttggtgcaatcggcttcgctggtttgctgtttggtatgaaagatccggtccgcgcattacatggcgaacacagtgcctctgcaatgaaaagtatcgcagcattgctgaacccaacattactcagtgcagcactcgttaccgtactgtcttatgccgggtcgttcacggcctacacgtatattgcaccaatgctgacacaactgacaggcgtcgctgcggcgagtgtgggcattttcatgctcgtatacggtgtatttgctgctatcggtaacattttgggtggcaaaatcacagattcactcggcgtgaaccgggctaacattcttatcgtcggtggcatcattattattgctcttgggatgtgggtcttctcaggttcggcggtcatgatggggattcttgtggcactcctcggtatgtttactttcggcgctgtacctgccttgcaggcaagattgatcagcgttgcatccgagaaagctcctcatgctgcaggtgttgcatctggactgaatattgctgggtttaactcggggatagctcttggttccgtaaccggtgcttttacaatcagtagcatggggattgtatataccggccttgcaggtgctgttctgtctcttttgggacttctgctgctgctttcacaaattgccaagagtaaagcacaccattaa

SEQ ID NO: 242239 - DNA, 705 bp, Klebsiella pneumoniae
atgttaactcgtgattacattctgagtggagaattccaccgggcacatgaattaacactccctggtcatatgatctgggatcgtgaaaaaatcacagagtctatgctgacaacattgaaggagcgcccttctggcgctccagtctggatttttgcttatggttcattgatgtggaatccattacttgcagtggaggagatgcgtaaagcaactctttctggctggcagcgccgtttttgtatccgtctcatctccggcagggctgtcccggaaaaacctggccgcatgttatctctggataaaaacggagatgccgtggggattgcattcagactgtctgacagcggacttgagaaagagcttttgctggtctggatccgcgaaatgataacgggcttgtatcagccctgctggctgcgggtggttctggattccggggagcaagtcgatgccattacatttgtcagcgacagacatcactcactgtacatcagtaacagctcggtagaagatgtttctccggctattctccaggctcatggaaccatcggcagtaatgcagattacgtctatcagcttgagcaaaccctcgattcctggaatatcctggacagctatgtttctgatgtgtctaaatctctacgcgccattactcagagctgggatggttcttaccagaagaggggacatccgggggaaatttga

SEQ ID NO: 242240 - DNA, 141 bp, Klebsiella pneumoniae
atggcgctgaccgtggcggctgaacgctatcagcgatacggatttaaaaagctttttcaggtcctttgcaggcagggcaacgcctggaaccataagcgcgttcaccggatttactgcctgctgaaactgaaagaagtgtaa

SEQ ID NO: 242241 - DNA, 159 bp, Klebsiella pneumoniae
atgctgattggttacgcgcgggtttccaccgacgatcaacatctcgatctgcaacgtgatgccctgatgcttgcagggtgcgagcgtatttttgaagataaagtcagtggtgcccaggcagaacgcgaaggactggccagactgggctttgttgaataa

SEQ ID NO: 242242 - DNA, 210 bp, Klebsiella pneumoniae
atgttttcagctaaacgtattgtgttaatttctgctctggcttttatgagtgcaaatgcctttgctaaaacggtcagcgtgaccgattcgacgcttgaaggtgcagaggcaaaagtggctcaacaggcagtcagtgaaaatgcatcctataaaatcgtcagtgccctgtataaaaaccgcgtatacatgacagcagaactcagcaattaa

SEQ ID NO: 242243 - DNA, 1872 bp, Klebsiella pneumoniae
atgaaaatagaagccgatgtaaaaaatatatcaaaattaagcgattattattttttagttcccgattatcaacgtgagtatgtatggaaggttgatgatcaggttgaacagtttatcatggatttagacaatgaataccaaccagagcagaaagatcaaaatggttattttctcggttctgttattctcgtaaagaatggggaaaagcatgatattattgacggacagcagcggttgaccactattgtcatcactatgtgtgccttacgggatctattaaaagatagattggatacacttgacaaaaaagggctggaatatctgaaaactattgaggaatggctctctagttatgatattaatagtgaggaaaatctaattagactagatcttcaatatgaagaaagtcgaggatttatttcgcggttaattgaagggcaaaccaatacctttgcggaaacagcttcagtaaaaaaaatggctgacgcgtatgatcacattcgtgattatcttaaataccaattgcaagatagcttgaatggattaatctccttcgctcgcttttttttaacaaaagttgagctggttgtcattgaatcagagaacttaagtagcgcattaaagatcttcgaaacgatcaatcagcgtggtgccagccttaatgctatggatcttgttaaaaatttgattttcagtcagataaaagaagaacagttttcggcaataaagacaacatggaaatccatcactaataaccttgagtcttgcggcgaaagtgataacccgcttcgttttttacgttactttctgatggcacgatatcatcacgggattttgcgtgaagatgatatatataaatggatcatttcagctgagggggaactgtcgttgcagtataagacacgccctatggtcctcgtcaaagaattggaaaaattatcagaacgatacgctaacctggtcaatgcaacaaatgaagcagcctactggcgtgaaaatatccgttttccaaacgtaagtaacattggatatattaataaatatcgctcacgtcagcatttggttttactaatggcattggacattagttgttcagatgatgtaatggatttcttaggtgctcaacttgagagctttttattctttacaaatacaatggctattcaatcgaagacatatgagcaacgctttactcaatgggctgtaaagcttcgggatgtgaaaacgaaagcagaggttgcaaatgttgtttcagcaacacttataccttttgttgtggagcgtttagatgaatttaaagaacgattctcaattattaatgactataattttacgcctcagtatcgccaacgttatgtattgggtagattagagaatcatatccgccatctttgcggttttccggaaaagagccagcaggctattcagcagatgcaaattgagcatattcttcctcagacggtacgaaacgcccctgaaaacggggagttctctgatgtaaatcgaacaagttatctctacaaacttggtaatgtaacattattagagggtacaattaaccagtctgtcaataactgcaatgatttgagtgaagactggtttttgaaaaaacaaacagaatatttaaactctgaaatcatcatgactcgattactccactcccagtactcaattggtgataacactgcattaaatcgctttaagctgaaatatggatatgaatatcaagactggtctgcggaaagcatcacatcaaggcaacgcctgctgatggatcttgccattgactgctggcgatttaatgatcagagaatagatgcttatatagtaaataacctgggcactggacccggaaacgaatttacgctgtaa

SEQ ID NO: 242244 - DNA, 537 bp, Klebsiella pneumoniae
atgcacattattaatgctgaagaacagcacattaccgcgatacgcaatatctatgctcaccatgttctgcatggtacaggtagcttcgaaaccgaacctccggatacgcaggaaatgcttaaccgactaaggagcattcagtctcggggatttccttggtatgtcgctctgcatggcgatacggtcatcggctactgttatatttcccgttaccgcgaacgccatgcctatcggtttacagttgaaaattcgatatatattgatccgacttatcagcgccagggcgtcggaaaagcactgctcaatcatgcattaaaatgggccgagtcccagggatatcgtcagatgattgctgtcgtaggtgacagcgctaacgttgcttctgttgcgctgcatatccgcacaggatttactgaaataggcacattaaaagacattggtttcaaacatggccgctggcttgacacggttttgctgcaaatgaaacttggtgaagggaatcgtactctgccagaagattcagattttatgctctga

SEQ ID NO: 242245 - DNA, 1758 bp, Klebsiella pneumoniae
atgaatatgccatttttaaaagacattcccccgttcatcttcttcaccggtaaaggtggagtgggtaagacatccctggcctgtgctaccgcggtatggctggccgatcagggtaagagaacgcttctggtgagtaccgatccggcttccaatgtcggccaggtatttagccagactatcggccaccgaatcactgatatcagtactgtagaaaatcttgccgcgatggaagttgatccgatggctgcagcacaggcttatcgtgaccgcgtgctcgacccggttcgcgggctgatgccagccgatgtggtcagcagcattgaagagcagctctctggctcatgcaccacggaaatagctgcgtttgatgagtttactggtctgctgaccaatcatgagctgcgggaaaaatatgaccatattgtatttgataccgcgccaaccggtcacaccatccgcatgcttgaattaccgggtgcctggagcggttatctggaagcgaaccccgatgctgccgctcacctcgggccgctggtagggctggagaaacaacagcaccagtactccgatgcggttaaagcgctgtctgatgcagctctcacacgcttagttctggttgcccgtgcccaggcttcaacactgaaagaagtctctcatacgcatgatgagctgtctgctatcggtttgcagcatcagcaccttgccatcaatggtgttctgccgccgtttgcaggtgagaatgatccactggcgcaaagcattctggcacgggaagaaaaagcattacaggcaatgcctgataatctggccaatcttccccgctcgcagctgtatctgaagccatttaatctggtcggtctggaagccctgcgggagctatttacccagagcaaagccgcaccggctctccctgctaccacgttgaatgttctggatttaccgaaattgtcttcactggttgatgaactgagccaaactggcaatgggctggtcatgacgatgggtaaaggcggtgtaggtaaaacgaccattgcagcgtcagtcgcggtatcgctggcgaaacgtggtcataaggtccacctgactacatccgatccggcagcacatctgtcttacacactggatggctcgctgcccaatcttcaggtcagccgtatcgaccctaaggtagagacagaacgttatcgccgctttgtcctggaaaatcagggcaaaggattagatgcagaagggctggcggtgcttgaggaagacctccgctcaccatgcactgaagagatcgccgtcttccaggcattctctcggatcatcaaagaagcagacgaccattttgtcattatggatacagccccaacaggtcacacgcttctgctactggatgcaacaggagcctatcaccgggaaatggtgcgccagatggggcaaacgcatgacaatttgttgacaccaatgatgctattgcaggaccctgagaagacgaaggtgattatcgtgacccttgccgaaacgacacctgtactggaagcagcaaacctgcagcaggatttgcgtcgggctgaaattgaaccatgggcatgggtaatcaatagcagtctggctgctgcgaaaccgtcctcaccgttcctcgtaacccgagccagtcgcgaactgcctctgataaatgacgttacagagcagtttgcagagcgtattgcattaacaccgctgcagaatgaagaaccagtgggtgcagctctgctggcaaaaatggcaggctaa

SEQ ID NO: 242246 - DNA, 324 bp, Klebsiella pneumoniae
atggaacttatcagtgcgtcgacggtgctgaaagaacttgggcatgctacaaggctagggatttacaaaaaattggtcaaagcagggcctcagggactggccgtgggcgatctacagaagcaacttgagatcccagcatcaacactgagtcatcatatttcatccctgatatcagtatcgctggttcgtcaggaacgtcagggaagaactctgtattgccatgcctgctatgaaaaacttagtgcgctgatagcttttctgacggaagaatgctgcacaggcgcagagggactgcacgataccaataacgacgcaggagaataa

SEQ ID NO: 242247 - DNA, 255 bp, Klebsiella pneumoniae
atgcgtgatctgatccttcaactcagcaaaagttcgatttattcaacaaagccccagaacgtgcctggcatgatgataaaactcgtccccttctgccgtaacgctcagtttgcgggttgtacgatgaataagttttacacccagatcatgctctatttgctgtatcgctttgctcacggtggggcgatggatttgaagcacgtcagcggctttagagaaactcccctgctcaacaacctggatgaaaatatttag

SEQ ID NO: 242248 - DNA, 288 bp, Klebsiella pneumoniae; identical to SEQ ID NO: 182627

SEQ ID NO: 242249 - DNA, 909 bp, Klebsiella pneumoniae
ttgaataacgcagtactcgaacttttcaacgaccgcttaccgcacaagccgtacttttcggacgatctgcactttggtgtacgcattgccggtaaggaacgcgccattctggcgaaatacatccagttcaatcagcctcacgccatgttctggctgggattcgacgtcgatcgcgccggtgccgctattgactggagcgaccgcaatgcccccgcgccgacactgacgatcaccaaccccgaaaacgggcacgcgcacctgctttacgcgctggaaacctcgatacgcaccgcgccagacggaaaaatgaagccattacgctacgcagctgccgtagagaacgcgctacgtaaaaaattagaggctgatgcggggtattcgggactaatctgcaaaaatccgaaccacggacactggaaaattgccgtatggcagccggaactctacacgctggactggctggctgactctctcgacctgaacgccgcgaacgacaaagaaatcgtttccgactacggcttaggccgtaactgcactctgttcgataaaacaaggaaatgggcataccgcgccatccgtcagggatggcctgagttcgaacagtggctgaaagcctgctacgaacgtgccagtgcctacaatcttcaattctcagcaccactagatgaaaaagagattcatggaatagctaaaagtattgccaagtggacatttattaacctaaccgagtcctcttttaatgactttgtgagagtgactcatacttcagatgtgcaaacgttgaggggaattgcctctggtaaatcaaggcgagctggctctctggaggaaaaatccccatggatatctatggggattagtaggcgtaaatatttctatgataaaaagaaaaaactatcttccacataa

SEQ ID NO: 242250 - DNA, 294 bp, Klebsiella pneumoniae
atggaagtaatgaagtctaatcttccacaaaaaattgatgatataacaaccctaacaaaatactacgcagtaggttttaatgttcattatgtatacgaggttagtagatcgtcagtagagttcgactttaacgccatatcctctagattttttggtaaattcaagaaagaagaggtgtgcaaaaaaaattatatatatagtgaattgctagtatataactttgaatatcagttcctaggtgacaataaaacctttaaaataacaaagcctctatcttacttatgtggaagatag

SEQ ID NO: 242251 - DNA, 162 bp, Klebsiella pneumoniae
atgaacagtcaacagctcggccagcagccgatcttcatctggatgtgttatggcatttttgaaacagacctgtacgcggaaacgttcttttgcagacagaaaagtgtttcccctactgacggccactttgtggctttgttgaataaatcagatttcgggtaa

SEQ ID NO: 242252 - DNA, 906 bp, Klebsiella pneumoniae
atgaaaagatttccggataatttttactggggtggtgccatcgctgcaaaccaagtcgaaggggcatggaatcaggacggaaaaggactctcaacctccgatgttcaacctaaaggtatttttggtggagtgattccgcgtaaagaaaacgttagcagcatcaaagatgttgccatcgacttttatcaccggtatccggaagatataaagctatttgccgaaatggggtttacctgtctgcgagtgtccattgcatgggcgaggattttccctgatggcgatgaacaaactccaaacgaagccggtctcgctcattatgatcggttgttcgatgagttgcttagccatgggattacccctatggtgacgctatctcactacgagatgccgtggaatttagtcacgcgttaccatggctggggaaaccggcttcttattgacctttttgttaaatatgcagagacagcgtttgagcgctataaagataaagttaagttatggttaacattcaatgaaataaacatgtctctgcacgcacctatgactggtgttggattaccggaaggcagcagtcagtctgaaatatatcaggcgatccatcatcaactggtggccagcgctattgtggtagggaaatgccatgaaattgttagcgatgcaaaaatcggtaacatgctgctgggaggactattgtatccgcttacctgtagcccggacgacgttcttaaagctatggaagaaaatcgcggttggctgttctttggtgatgttcagagtaggggctgctaccctggttatatgctgcgttttttccgtgaaaacatgattgaactggatataacagaacaagaccgtgagcatcttaagacgaatacggtcgattttatctcctttagctactattga

SEQ ID NO: 242253 - DNA, 1863 bp, Klebsiella pneumoniae
atgaaatatcagtcacttgcagagttcataattaatggtgttggtgggcgtgaaaacattaaaagtgttagccattgtgcaacaagacttcgttttgaattgataagcaacacaaatgctaataaaaaagagcttcatgatcatgcagatgtaattatggttgttgaaagtggtggccagctacagattgtcatcggtaacaatgtttccgaggtgtatcaggcaattgaggctttaggggccacggacaagttacttcctgataatgttgaggacaatggtgataaatcaaaagaaaacttgttcagccgcctaattaacgtagtttctggcatttttacgccttttttgggtgtacttgctgcctcaggtatactgaaagggctactagccctttcagtggtctgtggagtaatgtctgaatcaagtggagcctttaagattttctcagctgccggggacgctttgttctatttctttcctctggtgctgggttatacggcgggtaaaagattcggtggttctccgttcctttccatggtgattggtggcgctttaatgcacccaagcatgatttcggcttttgatgctcaactacagttgggggggacgtcagacaccttttttggtatcccaattacatacattaattatgctggttcagttatacccgttattttcgcatcgtggctcagcagtcttgtcgagaagaattgtaataaaatactgccgtcagctgtaaaaaatttatttacaccgtttatcgcactagccgttgtcgtaccattctcttttttactcatcggtcccattgctacctggcttagcgagtcaatggcgaacgccttcctggccgcatatgagtttgcgccagctgtcgcgggtatcataatgggggcgttgtggcaggtctgcgttatgtttggcctgcactggggtcttgtacccgtgatgctcaacaatgtcactgtgttgggtcatgacattatgcagccattgctggtgcctgctgttgtaggacaattgggtgcagctttaggtgtgtttctcaaaacaaaggatccgaagttaaaaacgctctcaggttcagcagtgagtgcagctatattcggcattacagaacctgctgtatacggtgtcaacctaccgaacaggaaaccatttattttcggatgtattgctggcgctgttggtgggatgatcgtcggcagcttccgcggcagtatttactcctttggactgaccagtttctttacacttgcacaaatgatcccgcctaccggtatggatatgaccgtatggggagctattatcggtacgcttgtatcgctgatactttccactgtcctgacactgttttttggtttgccaaaggcagaacaggccataatagataaaaatgacaatagtgaaataattattcaatccccgttaacagggaaagttatcaacatcgccgaggttaaagaccacactttttcaagtgggttattaggtcaaggtgtagggattattccaacatcaggtaaagttgttgcgccatttgatggcgtaatttcatccctgttcagttctaaacatgcaatcaatatggttagtgataatggtgtcgaattattaattcatgtcggtataaatacggtcaggttgaatggtgaagggtttattgctcatgttaaatctggcgatagcgtcaaagccggagagcttttgcttgaattcgatatcgattttattcagaaggcaggatatttactggatacaccagtgttgattaacaatagtgatagttacaacgcgatacgtctgacagaagaagataaagtgaccagtaacgcattcttaatgagcatcaataaatga

SEQ ID NO: 242254 - DNA, 918 bp, Klebsiella pneumoniae
atgacatattccatcttacatttagcgaggaacaaccagagaacccgtctcctggctgatgacgtgaccaccctgcctgtcatgttcgccacaatttatggcatgaatgaactgagccggaaacgtccgggaactcaggaaaacattctgtgctcactgcgtttcttttacgtctattaccacaagaagcacaaacagacattcgactacgctttctatcgggccggatacaacatctcctgttttatcagggagcttgatggcttctttacttacctgctcggaaagcagcatctgagtaacgagcccgacatcattgctgctggctttatgcattctgcaatctccagagccaacaagtccacctatggtaaccacgtcagaaacgttggtcggttccttaagtatctcaactatcgttatatgaacctggcataccaggatatgtcaccagttgacgctcaccggctcaaccaggcaaaccgcagagatcttgccgacagaattaaggtcttcagtaaagttgaagtttccaggaacgaaccagcgcaccgatacaaaagcctcaccagtcagcagagtgtcgagctgacgaacatgttaatcccctccactcctgaattttcagatatcgggaccggtgaatggttcacagcagtggttaacccccaaaacccatttgagccggggtttcagcaatatcgtaactacctcatccatcggttgatgtttaactatggcttgcgtgttggtgaagttcaattgctgacgaaggattgtgtgggaccatcccttcctgactcacgaggtaacattcgcttcatcctggtaattcaaaatctgccagataatgttgatgacccaagaaaacaacaaccttcaataaaaactgaacattccctaggctttgttgaataa

SEQ ID NO: 242255 - DNA, 333 bp, Klebsiella pneumoniae
atgtttataaatttaaatgctcaagaggttgtggttgtaaatactatcgatatggctggagaggaaaaattaacagccatggatgtttataattctctacagtcaagtaataaaatcgcgcagtctaccgtgtataatatactcaggcgcctggtacataaaggagtgctaataaaagtactaactttatctaacgatgctttttatgaaatcaaaaaaatagaaaggagtaagcatatctcttacatctatccaagaaagatcattgaacttactgatactcgccttgataccttaataagggctttgttgaataaatcgaacttttgctga

SEQ ID NO: 242256 - DNA, 789 bp, Klebsiella pneumoniae
atgaagccagaacgaatgcctaaactttgggattttgatggaaatgatactctgggaccagttgcagggatgaagattggtatgcacgtggatgaacaacttccattccatgttcaccggcatggtcagcttgttatgtctctatctggcgctgtttcttgcgaagttgtaaacgaactctggatggttccacctcaatgctgtgtctggattcctggtgatatgccacatagtattcgtgctacaacggatgtcaggctatgtatgctttttattgagtctgtgttttctgcagtattaccacactgttgctgtaccatctccgtttctccattagtgcgtgagctaattttagatattactgaacagccatcagattatatgaagggcagtttgacgtttcttaaagcttcagtccttcttgaagaattgagcaagatgcctattgaaaatttttgtttaccaatatctaaagaacctagactaacaaagataatagagacatggctggcagatccttcagacagaagaacattggctgagtggagtaaatatctaggtatgagcagcagaacattatcacgattagtagtgaaagagacaggattaacttttggcaaatggcatcgacaattgcatttaagcattgctatgcgaaatctatctaaaggggactcagttcaaagagtagctaatgatttaggttatgattcagtaaatgcatttataacaatgttcaaaaatttagcaggaaaaccacctggaagatactttgcggatcgaggctaa

SEQ ID NO: 242257 - DNA, 1182 bp, Klebsiella pneumoniae
atggaacaaaaacatctcgcggcacaagtcaaaaagccagcgttgatacttatcggcttgctggcaattgcaacgactcttagagccccaatactgggtgtaggccccctggtgcaaacactccagtcagaattatcaatgacaagtactatggcgggtttcataaccgccttccctctgatagcgttaggactgattgctccttttgcaggaaaactgtcccggtatatcggttttgaaaaatcaattgtaatagctctgcttattatgattgttggcgtttgcatacgatccgcaggacaggaatggcaattatactttggcacagtgttgattggcgttagcatcgctataggtaacgttctgctaccaggaatggtaaaacgcgacttcccaaataaaattgccaaagttaccggcaattatggaatggctatcgggctttcagctgctttaacatcagcaacagcggtgcctctgatgaactattttggatggcagaccgcgctggtatgctcgttgattttccctggcattgcgctacttctagtgaccttaagaataggccgggaaggtaatctatctcccataacaacttcccttgggaagagcaacaaaaacgtttggtcctcgatcctagggtggcaagtgaccttattcatgtcactgaattccataatattttatgcaattgtgacctggttaccttctattttaacggacgcaggtaacaccagagaagcggcaggatctatacatggctttatgcaacttgcctcaatcgtgcctgggttagtccttggtccaattgttgccagaatgaaggatcaacgtattgctgcggctcttttgagcattcttcagttagtggcgctgggcggatttatttatcagccatcatttgcgtttatttgggcttttatatttggaatgggaagtgggggagcattgatcctttcactgatgttcatcggtctcagaacatccagcccacaagaagccgcatcactatcaggtatggctcagtgtgttaacttcctgattggagcatttggacctgccctggctggtaaaatgtatgcactatcaggaagttggctctcaacgttgtacgcagggattttattggctgcaattatggcactagttggtatctttgcaggtagaaataagacaatctga

SEQ ID NO: 242258 - DNA, 369 bp, Klebsiella pneumoniae
ttgctaaatatcctttgggatcgttatcaaaaaccattatttattgtcgagaatggtctgggggcaaaagacactctaaaagatgacttcactgtagatgatgattaccgtattgcatatttgaacaaccacctgtaccaggtatacgaagcaatagaagacggtgtcgacgtcatgggttacacgtcttggggccctattgatctagtaagcaactccacggcagaactaggtaaacgttacggatttatctatgtaaatcgcgatgataaaggacatggtgatcttgctcgttaccgcaaggcaagtttttattggtaccgtaatgttattcgcagtaacggagaaacgctggttcccaaattgtga

SEQ ID NO: 242259 - DNA, 153 bp, Klebsiella pneumoniae
atgaaaatcgttatttatgaagccgttggcatcgatgcggtcgctttagagaaaattgtaggtaagccggtaagaactgtgccgcagatcctggctgatgatgtaccgatcggcggctatagtgaattggctacattatcagtgacactgtaa

SEQ ID NO: 242260 - DNA, 555 bp, Klebsiella pneumoniae
atgtctaaatattcttgtatcaacattgttaaatccaaagcgaaagaactggctcgtgctaagggcattaagcattctgacgcattagagctgcttgccaaagaagccaaattctccggctaccatgaacttgccaaggtcgctcagcattctccaatggagcctcgcttgatggctgcagctttgggttgcaccgatttaaaagaagttatctacctcgacgaaccttattcatcgtttttagaagccgtagacgatgatatgtctggtgcaattgcatctacaaatgctgtcgacttcaccgtggaagatctgcatgtgaacgaagcgcaatatgatgacaacaccggtgttttggacgtagatctttcttttgtttatgaaggtgaattactgcctgatcgcgcctacacagagagagagttctcgattaacgctgttgtacagctaatcatacgcgacggccagtggagtcttgtagaggatagcttcgcaattccggacgaggactacggtactgatcatgtatgggatgacgaggctgagtggagataa

SEQ ID NO: 242261 - DNA, 642 bp, Klebsiella pneumoniae
atgtcagaaaatacccacgaatcagcatcctcatataaatctctgggggtgaggattggtgattcgtctgtagggcaaaaaggcgcactgattgacggttgcacgttcagaggggacgggtacgacgcggggatttacgtctaccgcggggcctcggtatcgattaacaataaccggttccagtactcaggcgtgaatatcaacgtcgcagagtgtacaaacctcgtcatgattggcaattcgggtaatggcgccgggaaatatattctaaattcgtcatctaccgttgcaacatggacagtactgaataacacggaatcgtttgaatcagtaacaaacgtcaaccccggcggactggtggcaaaaaatccaggttacagctcagcgactctgcgcagaatagagcgggtgagcagtccggtgaatgtcactgttgcaagcgggactgtctatcagcatgctgcgccagcgacaattccgctggcggcctctgttgaagtcggtggcgctattcctgcgggtcttttgtttagcgccgcgccagcatctacatcgctaatacgggctacattcttcaacccgacgggtgcagcgataacgctgagcaccacgatttatttcgatatcacacacccaaattaa

SEQ ID NO: 242262 - DNA, 249 bp, Klebsiella pneumoniae
atgaaggtgatgactgacagagtctttaaaggcattgaggtaaaaaattccagtgttgttgtcgggggaatacaaatcgatgacaagcacacaacggtaacattttctgttaatttttttgcaggggattctgctgagccattcgatggtgaaatcatgtcatttcattatgatgctgattccactgccaatctcattgatgagtgttgtagccacttgttaagtatagatgggtacaaacggggttaa

SEQ ID NO: 242263 - DNA, 867 bp, Klebsiella pneumoniae
atgaaaagaggagtggtttccttgcctgttgaaatgaagtcaacacccggtgggtttgttataaatgctgggttgacgccattagaattgaatttttttgcactttactgggatgagcttttgatacctgatagcaaatttttttccttcggtttagagaatgaaaaatcatatatagaatcaggttttcttcaaaggccactcatatccaatcagagtgattcctttgcttctgataattttatgaaagtgtttttgcaggggcaagagtattttttagacgaaaaaaggaggctggatcctgatagtgattggcgtttaaatttaataggtgaaagcctttgtcttgatgatgaaacaagtaaaaaaatgcacgcgtttaggatagagctttctaatgtgcttcctgttcccgatgtatctgtaaatatttatgatattttggagtttaagggaaagagaaaagatgaacttgatgcttttaatagttatctggatgaactatatctcgaggttttaaactctggtgattttaacttgtccaaatctaaagctttttcaaagcttaatttagctattgaggatcttgaaaagttaaataaagaaggatggcgaagcccgataagatttgatacttcagcggtttttgaaagtaataacggagatatcatcgcaggaatttcatcgctttacaccatatgggagtcgagtcaaggaaatatagctacagccttgtctgttggtattactgctgttttagggcagggatttgcaaggttgaaacctaaatttcaaagcgtgagaagaaagcctgatgttaatatggcgtatctgtcttctgcccataagtcaggggtcataaaatga

SEQ ID NO: 242264 - DNA, 150 bp, Klebsiella pneumoniae
atgcttatctggaattggtggggttacgcatatcccatggcatttatggggttcggaacaatgttgcaggagtggtttggtcatgattcggggggggccgttctgattatttccattttgctagggtttagattacaacagcgtaaatag

SEQ ID NO: 242265 - DNA, 663 bp, Klebsiella pneumoniae
atgatggccagtttctctccctctcttccacccagaggacgcctcaggctggatgttcccttggcgctggctcatactgtattaatcccaaacctcaagcatttccagacactctatccggatattgaagtagtgctggtttcatcggatagaaaaactgatttaattacggaaggcgtagactgccttgttcgactgggcgtgcttcaggattcaagcttcatctccaggcgcattggttatatcagaatggtcacatgcgcggctccctcttacctgcaacagcacggaaggccggaaacacttgcggatctggagcagcatcgggcggttaactttttcaacgttcatagtcgcgacgtgatggaatggacgtttatcgaaggcgggagcatcgtatcgcgacgccttgtgaacagcatactggttgataactccgatattctgctttcctgtggcctggccggtttaggcattatccaggccacatttgacgccctcgccccccatatcgcttccggcgctcttgaagaagttcttccgcagtacccttcagtatctaagcctgtctcagtgatgtatccggacaggcgctacctgtctccaaaagtacgggtctttatcgactggttcagtaacgttctggctaaacagatcagctga

SEQ ID NO: 242266 - DNA, 861 bp, Klebsiella pneumoniae
atgtccagagtagttacctttaaccgcaccggtggtccggaagttttggaagttatagatgtggaggtgcccgcaccagcagcgggtgaagttcagattcgcgtacatgctattggtcttaaccgtgcagaaatcatgtaccgtaacgggcaatatgtaattgagccggaattccctgctcgtcttggttatgaagcagctggcattgttcaggctgtgggtgagaatgttgaagagtttgctactggcgatctggtcagcgtgatcccttcattcatgtttaacgagtatggcatgtacggcgaactggttaatgcacctgcgcacgcagttgtgaagcatcctgaaaacctttcctttgaagaagctgcggcaagctggatgatgtatgtcactgcttatggcgcgctggttgaatatggcaaccttcaggccggacagaatgtcgtgatccgcgcagcttccagcagtgttggcctggctgctattcagatagctaatatgctgggtgcaaaacccattgcgctgacgcgcactgcagaaaaaagcgaaatgcttctgaaagccggtgccgccgctgtcatcgccactgcggagcaggatatggttgctgaaatcaatcgtgtgacagatggcgcgggcgctcacattgtttttgaccccgttggcggccctgacgtggcaaaactgactaaggtgatggcaccgcagggcatgttcttccagtatggcgcgctcgacagccgtgacatggttgtgcccgtatttgatattctcggcaagcatctgactctgcgtgggtatgagctgtttgaaatcacaactgacctgcccccaggattagatacaaccgtcagttag

SEQ ID NO: 242267 - DNA, 642 bp, Klebsiella pneumoniae
atgtcagaaaatacccacgaatcagcatcctcatataaatctctgggggtgagggttggtgattcgtcagtaggacaaaaaggtgcactgattgacggttgtacgttcagaggggacgggtacgacgcggggatttatgtataccgcgggtcctcggtatcgattaacaataacaggttccagtactcgggcgtgaatatcagcgtcgcagagtgtacaaacctcgtaatgattggaaattctggtaatggtgccgggaaatatcttctgaattcgtcatcttccgttgcaacgtggacgttactgaataatacggaatcgtttgaatcagtaacaaacattaacccaggcggactggttgcaaaaaatccaggttacaactcagcaactttgcgcagaatagagcgagtgagtagccctgtgaatgtcagtgttgcggctggggctacctatcagcacgctgctccggcgacaattccgcttgcggcttcggttgctgtcggtggcgctattcctgtgggtcttttgtttagcgcagcgccagcatccacatcgttaatacgggctacattcttcaacccgacgagcgcaactataacgctgagcaccacgctgtattttgatattacacacccgaattaa

SEQ ID NO: 242268 - DNA, 243 bp, Klebsiella pneumoniae
atgaacgttgtaaccaacagagtctttaaaggcattgaggtaaaaaatgccagtgttgttgtcggggggatacaaatcgatgacaagcacacaacggtaacattttctgttaacttttttgcaggggattctgatgagccattcgacggtgaaatcatgtcatttccttatgattccccagctaatctcattgatgcgtgttatagccacttgttaagtatcgatggatataatctaggttaa

SEQ ID NO: 242269 - DNA, 273 bp, Klebsiella pneumoniae
atgtcatttacagtaacgaaaagtattaagtgtattgcttcctatcctgaatttggcgcagagtcagaagtaaccactattgaaaaactggtgacattttctgccagacaggtagtcagtctagatgcagtaaataatgctcaggttgtttttgatgtctctgtggagggagcgagtattaccggagtttactatcactccttctcctattcaggggcggggggtccgattgaggaagcggaaaggagtctggaaaatgcactttccagttaa

SEQ ID NO: 242270 - DNA, 1014 bp, Klebsiella pneumoniae
gtgtggggttgtcagtttataacagacgggaccgccattagcattgataacgtagggctatcgtcggcatcatatcttccacctttggttcgaatcagtaataaccatttcaattgctatcaggctatatatgctaaagacataagtcgattacatttctcagtaaatgatgtgcaaggcaaatacagctctgataatccagtaaatgggtggattgaactgggcggagtccaggtatttgagcatagcgggaatgattacaatgctaccgctaaaggttcaggcactacaggggacgactgtccgtcagtgattcatcagtttgctagtacgttgactaatgcgtttttcaccagcaacggaaatacatatcagcttgacgccatgaccgggcccgcttttagtttctcaggcacagataatgttactgaaatacaggtgtcaaatgacaggttgaacgctgtggggccatgggtttcacgtgaatatttaaattacgtcagattatcaccggaaattactatcggaaatgctggtgcatctgtaggcctgggttacagtacgaaaggggctttctcttctggggtattatctctcggaacccgcccgtcgcaaggttttacatataatattcctgcgagtatcgtggcaaatagttcgggaatttctcagataaccttcccgtcgcaaatggttggcaaggaggtgaatatacttctggcagcagcaaacgtatcgttcacgcatggcgcaaacatgatatgccctgaccagaagtcgtttgtaatgactttgccaaatgtcattaaggtgtttgcgctaaacactacccagtgcgttattctggatgtgggtgggatggcaaaccgtcatacggatattacctcaatccctacatcaagaacatcgccaggatatcccggcgcagagtattttgattcatcaacaatgacactctaccgatacattgccgggtatggctggggtaaagttgcaataaccgccattagttaa

SEQ ID NO: 242271 - DNA, 960 bp, Klebsiella pneumoniae
atgaatactgactttgcccattacaacgaagagcaactacgcaaactcggtgagctgcacagtttactccgtcacagcgatatcggctcatcttaccttgccacgctcccggagccccgtagtgttgaggagttgaatcctccacaggaaatcaatgtgactcattcggtacccgacgtcgacaccctggtggatatttaccggcagcagcgggttgataaagtccatgtcagggatgagcattattcaaccaaaatcacccgaaaatatcccgggttcgttgtggtcagaaacaatcatgatcaggtgatgtcgctggtgggtgacatcaaccggcttcgcgacaaatttgctgaggctgtaaaagctatcactcattaccaggactcccggtcagaaattctgcatcaggtttacccgtggctggtgactttacaggtgtcccgtaatatccggatcgttactgagcaaattcgctccctggggttcacctggcaaatccctgtcattcataaatttacccggctggaaacggttatcgaccgcttgcgcagggagataactgagctccagccggatatcagtctgacaaaacaggatgttgaacggctgaaacaggaacgaaccgaagaaatcatgatgctgtcgttgctcaatgatgaagtgagtcatgacgatgaaagttcgagaaaatttcggctcatccgggaaagtaactttccggctgttaacgtcaatatccggtacaccagtcctgaagatccagatgatgttcatgggccgtacaaactcaactttcgcgcgcctttaccattaattttgttcagcgaaccgggacggtttaatccgttaaaaaattacgtaaaaggtgaaaggcagaagcgcggcgattttaatgaaaaatatcgttctgtcctgccccgtatagggctggtggaagtcatcagggagtcaaaatga

SEQ ID NO: 242272 - DNA, 1173 bp, Klebsiella pneumoniae
atgaatgaacagttcattcctctgaagccaaaatcacaacaagagattttagatgcactcaatgaatcaggaatcttcaaagaaaacaaaaatcgctatttgaagtgccttcaagctattcgtacagagcgattagactatcaacaaatcttaaaacgtctaaccgatgcgaaaattgtctatgctaaagaatatgcgacattgctcatgcgtattcatgatgcctacgttaaagaactacgtagcgcaaatgaaatcgactttgacgatatgattttgttggctactcaactggtgaaaacaggtgagtttaaacctaaatggaaacatattttagtagatgaatttcaagatatttcaatggctcgtttagagttattaaaggaaatttaccaaaaaggacctagaccaatctggactgttgttggtgatgactggcagtctatttatcgtttttctggtggtaaattagaagtaacgactcaattcaataaaatgattggttctcatacactgagtaaactagagaaaacttaccgttacaacaatagtattgctgataccgcagggcattttattatgcaaaatcctgaacaatacaaaaagaatgttgtgactcatgctcaagtaagcgaatcctgtgttcatttacatgattctttcgttgtaaaaaatggagaaaaacaaaacaatatcagtttaaaagcattcgagatttacaaaagaatccgtgagcaacagccagaggcatcgattgcagtccttgcgagatacagatacctaatcaaagaagctaaagatgtcattaaagatcaaaatgtgaagttctggacttttcatggttctaaagggttggaagctgattactgtatcttattaggattctttcaaggtaaaactggtttcccgaatgaaaataaagaagaagctgttattgaagcattattaccaacgcttgatgattaccctcattcagaagaacgccgtctcttttatgtagctttaacgcgagctaaaaaagaaagttacttaattgcagatgtgaatgctccatcggaatttattaacgaattattatcaccacaatataaacttgatatagtttctgatggtttcaaaagtaaatatagaaaaatctttaagtgtcctgtatgtagtacagggctttgttga

SEQ ID NO: 242273 - DNA, 1098 bp, Klebsiella pneumoniae
gtgcatcagcaggaagttctgcccgtccgcttccagacccaccttgttcgacacccgcgccgccatcggcaccgccgacacccccgcggagccgatcagcgggttgattttgtgccggctgaacacgttcatcagcttcgccatcagcaccccggctgcggtccccacgcagaaggcgatcacccccagcaccaggatccccagcgtctgcggctgcaggaacttgtccgccaccagcttggcccccaccgacagcccgaggaagatggtgacgatgttgatcagcgcgttctgcaccgtatcgctcagccgctccaccacgccgctctcgcgcatcaggttgccgaagcagaacatccccagcagcggcgcggcgtccggcagcaggagcgccaccagcagcaacagcaccgccgggaagaggatcttctcccgcttactcaccgtgcgcagctgcaccatgcggatcttccgctccttatccgtggtcagcgccttcatgatcggcggctggatcagcggcaccagcgccatataggagtacgccgccaccgcgatggcccccagcagctccggcgccagcttgcccgacaggtaaatcgccgtcgggccgtcggcgccgccgatgatgccgatggccgccgcctgcggcagggtgaagctgatgatgccgaagtagttcagcgtcagcgccccgagcacggtggcgaagatcccgaactgcgccgccgcccccagcagcagggtgcgcgggttggccagcagcgggccgaaatcggtcatcgccccgacgcccataaagatgaccagcggcgcgatgcccgagccaatcgccaccttatagaagatggccagcaccccggcggagtagcccatgtccaccgcgaggctctccatctgcccctgtaccgacggcagggccagcgccagtgcctctttgatggcgtggacgtccggcgcgcagtggagcttcgcggcaatcaccgccagctgcgccgggtcgtggtgagccagcaggctctccagggcggtgagcgccagcccggcctccggaatattggagagcaggccgccgaagccaatcggcagcagcagtaa

SEQ ID NO: 242274 - DNA, 537 bp, Klebsiella pneumoniae
atgttggggatgagcgaaactcaaaagcaaagacgtctaaaagaactcaaagaaatcgattctaaggccactaaagagcacgagaaggacaggaagaactctaacttcactcaggttagcccaaagggctgggaacgcgttagagagctttctaaggacaaacaaggctcaacaacaatccccctatacacctttctggcagaaaatatcgatgcttcatgtggtgcagtcgtagctgatcagcagttccttgctgatcacttgggtgtatcgacaagaacaattattagatggctcaactacttagagtccgttaatgccgtcattagaatacctgttgcaggcagggtctgtgcttatgctcttgatcctcatgaagtttggaagggttataacaccagtaagaactatgcggcattcgtaacaaaaactcttgttaatcatgacggtgacatcaagaggaagattatggctatgttcaaaggtcaagatgaagacggcgacagcaaagaccaatgcgatctgcctttggagtga

SEQ ID NO: 242275 - DNA, 141 bp, Klebsiella pneumoniae; identical to SEQ ID NO: 36145

SEQ ID NO: 242276 - DNA, 294 bp, Klebsiella pneumoniae
atgacggtgcgcgttgactgggaaaccggggtgggggatatggaaggatttcctggctttggcaatgatgaaaagtaccttgcctgggctaagaaaatgaaggcccagaaccggcagcacagcaagaccgttccgctgcccgactataacggccaggatgtgtgcggcattacggtgcactttttaccctgcgatgacgtgaaagtgaccaccagctgctggtcaccgagaaatgcgaactacccgataaaagagcccgtcaggatgaaggagcccgccgtctgtccgaagtag

SEQ ID NO: 242277 - DNA, 2289 bp, Klebsiella pneumoniae
atgagttacgactttagaaacctttcatccgcagactttgaggatcttgttcgggatcttatcggaaaagaagaagggcttcgctttgaagcattctgtgtggggcctgataatggtattgacggccgacacgcatatgctggaaagaatgtcatcctacaggcaaagcattatgaagggtcgtcgttcagtaaactgatgacagctatgaagcgtgagcgcttgtcgatagataagctagccccctcacgctatattctagcgacctcctgtaagcttactccagctaataagggcaagctcgctccgttcatagggccgagtttgaaatctgaggcggacatttgggggccagaagacataaatggtctcctccggaagtaccctgaggtactcaagtcgcatatcaagctgtggctatcgggggtgggtattttggaacaggttgtacgcgcagcggcccatacttttgctgcgttgacgatggaagagatcgaacagaaggttcgagtttacgcatcaaatcctagtttcagcgagtcattagaaacgttagagaaatataggcttctcatcatttctgggccacctggcgtaggcaaaacaacactagctgaaatgctttgctacacctttctgagcgaacaatgggagctagtccctatccgcagtctggaggacggcttttctgccattatcgatagtaaaaagcagatctttcttttcgatgatttcttgggaaaagttgccctcgataggcaggctttggcgcataaggattctgatttgatgcggttcatgaatcgggtgcgccgctcgccgaatgctcgttttatcctgacgacgagggggtacatatttgaagaagcccggagagtctccgagtaccttggagatcaacgccttgatgtgacgaagtacgtgctcgatgttggtgtctatactcgccgaatcaaggcacggattctctataatcatctgcttgtgtcaggaacccctaaatctcacatccaagcacttttggagagtaataagatcgcgaaaattgttgatcataagaattataatcctcgcatcattgaggctatgaccgatgcattacgtaccaacgatataaaatccaccaactatcccacagcctttattgacgccctgaataatcccagccagatttgggacactgctttccgtacgcatattgatcaccgctgccaacaccttctgattgcgatgtttttcctttcggaatacggcgttgcctttgctgatcttcattcgtctttcgataaactacataccacgatgagcactgcttacggtttgccacatgggcctaaggattttgaagaagcccttcgcattctggaaggtagttttattaaaatcatcaacatcagaggacctgtagtctcttttatcaatccttcgctcaaggattatctctcaacctatctgctggatacggacttccttattcgccttgttcccacggcggcctcaattgattggctgttgagtctgtggaacttcgtacatccgcgcggactcagtgaggtcgatcaagcgaaggttgccagatcctgtgttggcatgctggagatgatcgaaacacgtcttccttggtgtccgaaagctggtgacccccgctcacttgaatacaatgacgccgcaaattccaagaggctccgaatgataatggattggtggcagctcacgaatgaacaacgatttgccgacagtataatgacaattgcccgcaacccacagcagggtttcagtacatggtcggatggagagattttgattgacttcttttctctacggaatcaaaagggctatagccgacaatttatttacgaagatgaattattagagctccttgaaaaggaactcacagacactataagttatagttcaattgacatgctttcctcgtttattgatgcggtggacgcagcaagttggttgcctgatagcattactcttgctttaaggagggctgtgctcgacgagttcaaggataacactagccgcatttaccaggatgacagtgaatcctccttgtcggatcggatcgatgccctaaaaaaattcgctccgcgctttggcgtaccagatagtgtattggataaagccatctctgatattgaggagcgcataagcgaaatcgaagaccgcagtagcattgcctcctctccgaccttcccgtcgtccgacgacaagtatgaacaggagacgtttgacgatagcgctcttcggaatcttttcataacccttttggatcgttag

SEQ ID NO: 242278 - DNA, 729 bp, Klebsiella pneumoniae
atgatccaccttcacaacgccgattgcttcgacgtcttcccggaaatcgccagcggtaccgttgacctggtatgtgccgatattccctacggtaccactcagtgccgctgggattctgttctcgacctgccgctgatgtgggagcaactgtaccgtatcgcgaagcccagcgctgccattgtgctgttttccgctcagccgttcaccagtgtgctgattaacagcaatctgcgggactggcgttcggagtggatttgggaaaaaggcaacgccaccgggttcctcaatgccaaaaagcagccgctgcgagctcacgaaaacatcgaagtgttttatcgccgtcagccgacctataacccgcaattcacccacgggcacgaacggcgcacatcgaagcgtaaaaccgtcaattcagagtgctacggcaaggctctaaccctgacgaaatacgattcaacgagtcggtacccgcgagacgtgcagtttttctcgagcgacaaacagaccggcaattatcacccgacccagaagcctctggcactggtgcaatacctgattgaaacctacagcaaccctggcgatacggtgctggacttcactatgggtagcggtaccgccagcgttgcctgccagcagactgggcgcagcttcattggcatcgagaaggatgccgccatttaccgcaccgcatgcgagcgcatggggattaagcaggagcatgcagcatga

SEQ ID NO: 242279 - DNA, 681 bp, Klebsiella pneumoniae
atgaaatcatgcaagaaatgcggcgagaccaagccgttagcctatttctataaaagtgaccggtgcactgatggttatcgtggtacgtgcaaacagtgcgcagctaaaaccaagtgcttaccggcagcagagaatggtgttgttcccatcccgtcagccgatcggctaaatgagctattcgagttatcaggttccgacctgatggcaagaaagtccagagggcgcgtaaaaagcggttccgtttgcggctacaagcgaaaagatggttatatcagagtgaaggtggatggcgcattggtaatggcgcaccggatagtctggaagatgcttcacggtgatgagccaagctttatcgaccacatcaatggcgatcgctcagataatcgaccgaaaaatcttcgggctgtaacaagctctgataataagagtaatgagacgctcagggttgattcaacatctggctttattggcgtcacttggcacaccccaaccagcccaacaaaagcagcaaaatgggttgctaaaatcgccaaagaaggcagtgagaagcacatcggctactatatcaatctcaaagacgccgtccttgcctacaatgcggagtgtttgaggttgcacggcgattacgggctgcggaaaatagaacataacctgaataagctccgagaattggggctctga

SEQ ID NO: 242280 - DNA, 333 bp, Klebsiella pneumoniae
atgaacgaacaagaacagttacagcgcctgggtgaagaaatcgccggggcatatttacggcacctaaaagaaacaaccggcggtgacacggtgacttatgacggagttaccaagaccgttgtttttgaacaattggtcttcgggttggttggggtggctcataccaatgcgagaaagcatcctgacgatcctgttttgaaggacccccataagcatttatcacagatgattaacctcttctcgcgcccatacacgctaaccgatttcggtctgcgcgttatagaaatgatgaatgagaagtctattcataaagaacgcggggctttgatgtga

SEQ ID NO: 242281 - DNA, 2046 bp, Klebsiella pneumoniae; identical to SEQ ID NO: 197313

SEQ ID NO: 242282 - DNA, 660 bp, Klebsiella pneumoniae
atggacaacaattaccattcagaagcggaaaataaattctctgaatacttattatcactaggatataccaaagactctatattatacgaaccagcatttttctccaatgatggtaaaaacacacacagaccagactttgcaattatagatccagaaaagaaagaatatcttgccattatagaaataaagtcagacagatttgcacatagcgaaaaaactctaaatcaattaaaaaaatacaaacaagcaattggaattggaaaaatcccacttttcttggtgaccgtatcctcccggtctaataaccaattgccattttcactttattcagtcagtgattcaggtgatttagttgaatctgacttcaatcttttcccaactttccgggcccttaccgcggagcagtcagcagttaggaaaaatgatattcggcagaaaaaatccgaaacgatggatatgtttcaacaagttacttggtctcttgctgccgccttattacttatagtaattgcagatataagatttaattttttaaccactgagagaatggcactattaggggcttgtgttgcactcatagtaatcccatttgcacaaaaatttaaagggctgggcattgaatgggaaaaagttaagaaccccaatagcgaagagttataa

SEQ ID NO: 242283 - DNA, 255 bp, Klebsiella pneumoniae
gtgaccacactgacgctacagaaagcttttgaggcctgtcaggcaaacaaatccgcctggctgcaatgccgggatgaactgaagcaggccgaacaggcataccgcgaacagcttgccggtaacggtcacagcggccggaacctgcaaacgctgcgtgagattatcgacgtgaaaagtgggaaattaatcaggctgtcaggcgttatatccgctcgcatgaggaggtgcagcgcatcagcatccgcgaccttttaa

SEQ ID NO: 242284 - DNA, 339 bp, Klebsiella pneumoniae
gtgcagcgcatcagcatccgcgaccttttaaatgattttatgcaggtacacagcgcggagcaggccgctgcccttgcccctgagctgatgaattattcagggcagcattccgccgttcagcgctgcgtcatgcagcactcggtcgactatctgcgcgaggcgctacagtgctggctggtcgccggtgaaaaaattaattattcggtgcaagataattacattttaacggccctcggattcaggcctgatgcggtttcgcgcgatgataatcgtgaaaaattcacgcctgcacagaatctgaattacacccgccgccgtgcagaactggccgtgcagtag

SEQ ID NO: 242285 - DNA, 1095 bp, Klebsiella pneumoniae
atggctgctaacgttactcttgacgatattgagaatttagaagatgaatcttattatgaagatgacagtgagcaacatccgccgagtgatgtgatcgcttacaatgagttgagatcatgttctgatttagttcgcatgtacaatgaaggaactttgaatattcaaccagattttcaaagagatatcgtatggaatccatctgctcagacgagatttattgattccttaattaaacaacttcctatccctagcatgtgttttagttttgattataacagtcaggaatggcaggtaattgatggattgcagcgaatgacatcaataattagatttttatcggacccaagttggcaactttccaagcttgaagatatcgacagtaaaatatctggcgctcgagtatcagagtttcataagcaaaagactgagttgaataatttttataaaagagtacagaacttaacaattccagtcacggtgcttagatgtgatcattctaaactatcgcatatggagtatttgtttactatatttcatcgtttgaattctggtggtacaaggcttaataatcaagagataaggaattgtatttttagcggtgagttcaataatgctttgaaagaaatgaatgacattaatgagtggcagaaaatagctgggttaaatactaaaaattcaaatagatttaagtacgttgaacttattttgcgatttttctcattttatgataacaaagataaatataaagggacattatctaaattcctcaatggttatatgaagaaaaatcgtcatttaggaaagactgatatacaaatgaaggtggatttatttagcaggactgtagggttagtatgggggaagatattacaacccaatccggtgaggcttggtagttctttaatggaggctcttctatatggtgtggcaaaaaacattgatgctttagagcaagaaaccagtgctagcttaactaggcgttttgatgaattaagagcagatgattcattatcaacggcttttctaagcggtggtgtagctagaaaggaaaaagtcgatgcaagattagacgctgctctaagaatatttgggtga

SEQ ID NO: 242286 - DNA, 504 bp, Klebsiella pneumoniae
atgatagttaaggggacaatttacaaaacattgaaagatctagatcgcctctttactaaggaaaccgatcctaaaaaacagttattttattctaagcttgctcttatggagttgtgcggatggatagaggtaactatggataatatagttgaaggggtttataaaaaaaatataactgatcctgagcacataagaaaaattcaaaatgaaattaggaggaattctaattttcattatgaggataattttaaaaaaatgttagctcctgttatagggttgagttcaatcgagaaaatcgaaaaaaaagcaacgcagcaaaaactttttacactaaaagctactttgacttcattgaagactcctcgaaatgctgctgctcatacctttataaaaggtacaggtatgactattgatgctccatcagtaacgttagcaaatttcatcagtttgtttgacggatttaaagattttaaagatacgatgaaaacaataaaaattctctaa

SEQ ID NO: 242287 - DNA, 243 bp, Klebsiella pneumoniae
atgccagaaatcaccactgaacaaagcaaccagcttgagttgctggccgcactgagttacgacaccgcggcaacgaagatcgccgttgagttcatccagaacgacactttcaaacaccgcctgttcatccagcagtacagccgggtgtatggcgagcaggaagtggtagcccgtgccactaaagctgttcaggaatcggtggaagcgctggctgtaatcaatatcaccgtagcagcagaataa

SEQ ID NO: 242288 - DNA, 525 bp, Klebsiella pneumoniae
gtgataactttatatacagttgacaggactgggttttatttacaaaacaaaaatcctgaattattaaaaaggatattaaaccaaccagaactggatgattatattgccaatcttttccctgatggcgtatctcctcatgggttcaggtattttttggactctcggtgcgatgccatgttaagttcattggaattacaccttgaaatgcacaggcgagcattatatccagaaaaaccatcaagaatgactagcattttttgctgcctgacattagaagaggctttaatattcaggcaaaatcatgggcaatctgatttccccatttatgaagttgtttgtgacgaaagcaaaatacacataggtgacatggaggtgctcaagcatggtggttcagttcttatcctgtcgcatcatacctctttgtactggtctggaggagacctccgagagtttgcccctaaccatcgtccgttttatgaggttcttgtaccattacctgtgactatcggcaggcaggtggcttaa

SEQ ID NO: 242289 - DNA, 597 bp, Klebsiella pneumoniae
atgaccagttcagaacttttggaattgatcaaaaaagatgtaagtgatgtaaagcaacaaggttcagaaaccatcccggtcgataatttacttcactatctttcagaaatagatgtgacagagcagccagaggctaatgctttaactctcgaagggattaagcatcaaaactccacccaattggaaatattgaaaattgaaaatagctttcaaatagagtctttcaaagctgctatcagtattggtgcgaatgcttgcagaacatttttaataatgaatggaggtgcagcaatcgctctgttggcttttttaggaaatatttggaacaagaattcatcagttgaagctgcgtctgctatcgcatcagctctctatcttttctgtggaggagtcgttctggccggactttgttcgggcttatcctatttctcacagtgctgcttcgcatcatcatatcttggaactaaaaaattttatctttggctcgggcatacaataaatgctttagcttgtatatgcggcgccggttccatcttcatatttgcttatggttcatattgtgcttatcaatcaatgattgctcagttagtaaaataa

SEQ ID NO: 242290 - DNA, 192 bp, Klebsiella pneumoniae; identical to SEQ ID NO: 233181

SEQ ID NO: 242291 - DNA, 129 bp, Klebsiella pneumoniae
atgacctttccatgtgttgattcggcctatgagaagcaatttaatgttataggcatagtattgtatatttttttcgtcaaattctcgagtaggatcagggacaccattgtatacaacatcaccgggtaa

SEQ ID NO: 242292 - DNA, 1077 bp, Klebsiella pneumoniae
atggcggaaaagaaatattcagcggttctgacggaggccggagaggttgcgctggcagaagctgcgctttctggcctgccggttggtttcgcgctgatgggcgtcggtgatggtaacggcatgctgccagcagcgttagcctctcaggatggcctgattaacgaacgataccgggcgccgattaatcgcctggctatcgctgataactccgcaagcgtcatccgtgcagaaatgattattccgccgcaggttggcggattctggttaagagaagccgctctgtatgatgatgatggcgtttgtctggccgtggccagcgtaccggaatcgtacaaaccccagcttgccgaggggtcggggcgtctgcatgccctgaacctgtggattaaggtcagcaatacggcagatgtgaaaatcactgctgacctgtcgctggtcatggcaagcgctgaagatgttgagaaagccaaaaatgacgcgaaagattatgccgataaggtcgtcggggacctcgacacaaatattcagcaggctatcgctgatgcggttaaagcggcggtgagtaatgcgtgggaactggataaccccgtcggcaccacgcgattttttaatcagaacctgaacccgaatgagcgctggccgtggtcagaatgggtgtacaccggcgaaaataaaacgcttcgggtagcaaaagctgatggctcaaacgtcgggcagaccggcggcagcgataccgtcacgctccagcgtactaacctgccagccgtacagattgatgtcaaaggcgaaaccagcgagcaggaagaacagcgactgcaaacggatgatggcggcgcgcatgatcatgatggtgtgcccagcagggatgacccgtgggagattggcggcgatatccggcagctctttaacccggctcacacgggaaaaacagaccaggcccccgaccataaacataactttgtgatcccggcgcataaacacaataccagcggcaaaaccgacaacctcggcgagggtaaatcgttcagcgtggtggaagcccacaccctgctgatgtgctggagccgcgttgcctga

SEQ ID NO: 242293 - DNA, 1740 bp, Klebsiella pneumoniae
atgacgaaaattaccgaaacaattaagtgggctgatgaaatttatcagattgcccgtctggataaagttgaaggcggtgcaacgggtaccgctaatattcaggcaaagcagttagccgcccgtacacaatttctgaaaacgatgctggaagggtttaccgattatcgggaatccactttcttcaaaacagcagaagacccggacgggacgattgccgggcgtgccgccacgcccgccggtaaaattttccgcgtggctcaggggcctgaggctgatgagtcgtttattttctacctgaatgctgacggcgttgcagtaccggtcgcattctatgccgggaaagggtatgtggatcgccgaatcgtgccggggtcattcagcggcaagatgctgcctctggctcacggaagtaatgatgtcgtgccgctctggctggatgatggctgtctcgatgccgccgggttagggcctcaattacaggaggctgtggccggtatacccaatttgtgggcgcgacaatatctcccgcaaaaaaactttaatcctaaattctttcccgcctgctttggcgataacgacgttgtcccgctgtggtttgacgatggattccctgacgctgccgggctggggccacaattacaggcgtttattaagaatctggttggtgatagcggcggtggaaccgttagcggtgaagtgacagataaaacctttattcagggcgatacctaccggttgcagtataagtttgcgcgtttatttgtcggcgaacaggtagggattcattatgcctggacgggggattcctggacggaaaaaaacacgatccctctgtcgttcctgaatcagatgggcgggaagtataaagaccctggctggataagttgttctacgcgcggcgatggcgtcatgtccggtattacgctgaaaaccagcgggtttactgtctatgacggagacaacgagcataataatgccgcgccgcgttatggtgcaggcccggacgggaacgccatgtacaataccggaaccgttgcttatatgacctggtcgggggttaaagccaccgatttgacgctgttttattacgacggcaccgggtcattcagcgtcatcattgacgatgttacggtggcgaccatcaccggcggcaatacaggtaaggcgctggcgcataaattcagcggcctggcttccgttgcgcataccgtgaaaatccagactgccgggaatggcgttgtgtctatcctggggatgtacggtaaagatgcgtcgaatcagtctggtgttactgtctcccgcatggggaatggcggagcaatggcgtcggattatctcaactggaaagactggatcgcccctgtcgcgtcagctctggagattgatttactgtttatcgtgctgggaacgaatgattttcgtaagtccgccggggcagaacaatatcgcaacggcattcagacaattattgataaacacaaagaggcatcacctgatatttgtatttgcctgatatcgccgggacagtgcagcgcatcgggaacgcctgccctttctgaatatgataaaaccatgcgcgagctggcgctgaaaaataacatcaactttatcagcgggtatgaattattcccgaaacgatatgataactccgccggtgcatggcaggacacattacacctgagcagcaaaggcgcatatatcattacccgaatggctaaagaaaaattttatcaggagtaa

SEQ ID NO: 242294 - DNA, 1197 bp, Klebsiella pneumoniae
atgtcagaacatttttttgagtatgatgaacaggctgaaaacgaagatgatgttgaattggccgcggggacggacttctctgctgcagtagtcagtggcaccgactggacaacagaaaccattataaaccaaattaataaaaacaatattcagttgaacccggattttcaacggcgcgatgcttgggataaaacaaggaaaagtaattttattgagtccttgatattgggtttgccaatccctcagttagtactggcagaaaggaaggaacagagaggagcttatatagttcttgatgggaaacagcggttgttaagtattcgacaatttgccgctgataaaaatgatacggtttacgaacagctgaaattgagtggtctggaaataagaacagacctcaaggggaaaaacctgaatgaacttaaagatgatgcggatttttataatgatgttgcggcatttgaaaatcagccaataaggactgttgtaattaagaattggccgagtgaagagtttctttaccatgtatttttacggttaaatactggtagtgtccaattggcacctcaggagttaaggcaagcccttcatccgggggcttttgtttcttacattgatgctaatgcaccagataacgaagcgattaaaggcatacttaagttgaaaaaacccgacttccgtatgcgagataacgaattgttactaagatattatgctttaaagaatttcattactgaatactcaggtgatctgaagaagttcttggataatacatgcctgcaattcaataaagattggcctcgtatagaacatttggtttctgatcaatttgatcaactcaattatgctcatgagactattttgagtgtttttggaagtaatagttataaaaaatggtttgctgttgattacgagaggaaatttaacagggctattttcgatattatggcgctttcattttcttatccagaagttcgttctgctgttgctgggagggagggggaagttgaggaattatttagaaaactttgtaaggataactacgctttccttacatctattgaaaccacgacaaaaagtttgaagtcaacgcatactagaatttcagtttggttcaatgaactaaatagcttgttaaagactaatttgccaactttcgagctggatgattctactaatagaataaaagtggtgtga

SEQ ID NO: 242295 - DNA, 648 bp, Klebsiella pneumoniae
atggtcggttctgagcggtttattgctttgcaggagaggttagatgaattaagaaggcatttgctacctcctgagttttcacctataggtgaatacgatcctgttcagttagatatggctaaggggtaccgcctattgactcatgctgagttcgagtcttaccttgaggatgtctcgaaagagacagtgttgcatgcacttcagcaatggagacgaaataaaaagccgtcgatgacgatcgtttctttccttgcggcttatcatagttgttggtcggttggcgacgaacaaaataatcaggagttgattagtttatcccgggcaagaacgaatcctaaagaatcactcagtgaaataatgaatgttgcaagtaagcagtttatagataaaattagcgctaatcatgggattaaggcaaagaacttcaaatccttaatatttccaactggtgtggatatagatgagttggaaccggaaatgcttccaaagttagatagctttggttcaaagcgtggcgagattgctcatttgtcggcgagagttaatcagcaaataaatcctaaagatgaatttgatgatgttaattttttactggagtgttttcgcactttagaccagaaactagttactatcaaagatgcaatgtag

SEQ ID NO: 242296 - DNA, 273 bp, Klebsiella pneumoniae
atgggtattcgtatcgaagtcggcgacaagtgggttattaccagcgaccaatatcaattcatcctgaatgaaaagaaagtcgttaagaccggcaataaggctggcgatgaatggctcaacactatcggctattacccgaaaatcgaacagcttatttccggcctgattcatcatcacatccagcagtcgaccatcacctcaattgagggaatggccgcagagattaagagtattggagaaatgtgcgcctcctcaatcaaggcggcagcatga

SEQ ID NO: 242297 - DNA, 219 bp, Klebsiella pneumoniae
atgaaaaccagccacttaaagcctaaccagcgggtaatcattactcgcaaagacggctctcggccacctcgcctcggtacctttttacgccgtgatgggcgtatggctgtcttttatatcgatgatttcgtcggcatgagtggagaagacgacaagggaataaccactatttccattaacagcaaagactttgaagtaactgcggaagataagcgctga

SEQ ID NO: 242298 - DNA, 375 bp, Klebsiella pneumoniae
atgtcagatgcaaaatcaaccatgcctcacaccattaatgactcgcaaatccaaactttgctattaaaccctgagcagttgaacgccatcgttagcgcaatgctacccgctgtggaaacgatgatccgatcggctatgtccgacactatgaccgttgaagactttgccgccgcgcgcggtgtgagtgaccgtctggtgtggcaatggattgataagggcattcttctaaaggctcctactaaggatttttctagcaaagaggaagccagtaaacgaggccgagttctcatcaatgtgaaagcctggcgtgacaagttaactcaacaggctatcgactgccgttacatcgaaaatcacaaaactgcattcaactga

SEQ ID NO: 242299 - DNA, 861 bp, Klebsiella pneumoniae
atgagttctgaactcgatgttcagtggcgtattggtgcttcggatggagtgttagagcgcctgatgtctgcatatggcgtcaagatgcaaaaggatttggctgatctgcttggtatcgctaagcacagtgtcagcggctgggtacagcgtgatgcgatacccggaaatatcattgtgagatgctgtctcgatactggggccgatatcaattggcttgttaccggtgaacttgcaaatgcgaatttagaatatgattcctcaaagctgaaaggcaaaggtctctatgacgagattatggggaatggaggcaagacggtattgcgcaggatacttgatgcttacggctttaacatgcaaaaggaacttggtgatttactcggcatttcttcaggaaccattagtacgtgggttcggagagatttctttcctggtgatgtggtagttacctgtgctcttgatactggcgtatctcttgagtggttagcgacaggtaaggggcaaatgcgagatagcaaggaaacccttgcgactgagctttctattaaaaaatcccgtcttgagtctggggctctcaaggatgccggatactggcatcccgatccctcaatgattccgccaaatactaacgatttgctctttgttgatggggttaatacgtcttggcttgtcgactgttcagcttcaaacatagctaatggtcgttggctgattagcattgacggtgctctcgatgtttttgatgtaatcaggttacccggcggaaaggttagattatcaaataaatccgctgagtttgaatgtagtctcactgatatcaagtcggtgggggtagtggtaattacgttggaaaaacacatataa

SEQ ID NO: 242300 - DNA, 339 bp, Klebsiella pneumoniae
atgaaatttaaaattgtcgcggctttgtttgtgggattgtcgtttggggcggtggccgcagaaaaaacacaggatttaaatgccggggagtttggggaggattggcctctaacctttgagaatgcaaaagtatcatgtgttaataaaatgtatgcttttgtgtatgacaaggatacagatgatagatatccacttaatggcatggcaaaagatgctgttaaatcaggaaaaatggaaggctctaacctagatgacgtctggaaggacaaccctgattatgacggtgttaagatttcaatttcaccgttgatagaagccgccacagccctttgtgattga

SEQ ID NO: 242301 - DNA, 180 bp, Klebsiella pneumoniae
atggagtggtatttctccatcggtctttttttgtggattttggctcaaataacaagggccgatgtaacaactggtattaggaataacatcctgtgtttgttgctcttcatcgtgtcgtggccgcttgtcatttcaataatcgcttacaaagcttacaaacttattggtggggaggattga

SEQ ID NO: 242302 - DNA, 507 bp, Klebsiella pneumoniae
atgagctacacaacggttatttatgtatggccaggtgaaaaatcagaaactgcggaagaactgctgaacgcgtgggggagtgcccctaccgtctgggacgatatggcaaatcgctatctcggtagatcctactggtcatgtatcgatgagctttggccactagcaaaacggcaggacatcccatatcaccaccgcgccgtcctcgctatgacatatgaccgcatgtatgtcctgcgtgaacactatccgcgagcggctgagagcattcgtcattacctggctgatttccctgttgatgaaggaaaggttaatcactggccattccttgcagaattgttcgagagcaacccagattgcccggctatcggtctgtggtgtacctcggtttgcgaaaatccattccgtggcgaatggaatgaggatgaagaagattatgagcaaccagactggtcgcgttactggagtctgtttgactggctcgacagcatgaaggagcaatcagcatga

SEQ ID NO: 242303 - DNA, 135 bp, Klebsiella pneumoniae
atggattttgatttcgtgaattacagccggcggtcactgctgctgttcgtgatggtggcaaacatcattgggtgggtggcaatcatcgccgtcctgtatgtggcttatctggcgatcgagtgggtggcggcatga

SEQ ID NO: 242304 - DNA, 669 bp, Klebsiella pneumoniae
atgagcacaaagaccaatgccgctggattgattgtatccggtgaaaaaaatccgaactggaagggcgggaaaatcgaaaaggtttgcgccgtatgtggcaagcaataccaggttaagcgggtcaactcgtcatcgcgtttttgctcgcttcagtgtgtaggcgtttcgcaaagaggaatcagtaggcctggtagaaagggaagcacgggtaagcgtgcggggagtgttgaaatcgaatgcgtagtttgccgggctgtttttacggtttacagggcgcacgccaagagaatcaggtgttgctctaaatcgtgctccaacgcaatgaggtcatctctgatgaagggtgacggtaaccctaattggtctggtggcttatcacgcttgccatatccatgggacttcagagaaacgagcaagaaggtgatcgagcgtgatgggtttgtctgtcagaaccccgggtgtgatggaactgacgaaaggctaaccacacatcacatcaattacgacaaacaagactgccgacaggaaaacctaatttgcctttgttccagttgtaactcaaaggccaacttcgggcgcagtgaatggcaaaggttctatgagtcgctgatgtcgggaagagttctaaaacaacgatcttcattgatatcaattgaatcaataagttaa

SEQ ID NO: 242305 - DNA, 354 bp, Klebsiella pneumoniae
atgcgaaagacactacaggcacttggccggcttaaagcgggccagatgaacaaaaccgaaacggcgtactgccagaaccttgagttgcgtaagcgctacggggaaatcgcctggtaccggttcgaaggcatcaagctgcgtctggctgacaactgtttcctgactgtcgattttgccgtgatgttggccgatgggcggctggtgatggtggacgttaagggcagcaaggcggtctttactgacgatgcaagagtcaagatgaaggttgcggcagacagctatccgttcgtctttcaggttgcttatccgaaacctaaaaagctcggcggtggatgggagattgaggagttatga

SEQ ID NO: 242306 - DNA, 309 bp, Klebsiella pneumoniae
atggcgctcaaagttggggagaataagcttattgccgtcgtaagcgagccaaccaacagcgatcagtgcatcagcgaatcctgtaataaaagcgatacggtcaagcactccttttgtaacgctgccagcgttaccgtcaacagtctgctgatccgcccatgcccatatgcgaacgagcttaccaagtaccgcgtcggggtcgatattcaggatttctgctatctggaaaatctccggcttgtctggtgtgatcacctcgacttttatccagctactggccatcctgcacccccatataagcgcgaatga

SEQ ID NO: 242307 - DNA, 1167 bp, Klebsiella pneumoniae
atgactttgtggactgattcttatcaaagttcaattaactcaatcagcaattatatcgaaatgaattttccgccttacagtgacattcctgataatttatttcaagtagatgattcaaagttagcggactgtataattgttgtcgcgtggcgttactttagaaatctgtatattcatcgccgagactcgcttaacaaatacacttcatacactcaaaaatttttaaaccaaggcaacatccctagcttaggggacctaaaagatgataaattctattttcttaataaaatattaagaataatatttgaatacaacttttgggcttctgatgattttggcccgccaatgtatttaaaacctgaaattttagaaaaattagacaggctaaaaccgctaacagacttcccagttaatttcatagcgatcgagcgttccatgcccgctgctatgacgaaagatttattgctatccaataactttgcttcattaatcaaaattgccacaacagtagaagagtttgaaaataccatatatcaacaaattgatagggggcttgaagatgtcaacaataaaacaaatgtcttaaaagaacaaattgaagggcttatagactcttccgattcgtcaataaagtccctcaaagaatatgaggccaaactacatgattatgaaaacgattacaacttcgcacttttaagcaaggctttctcaaccctattaaaaaacaaaaggtcagagtgcgctacaaatcacagaagcataactatcttttctatgtggctaattgccactcctttacttacattactaaatcatatatttaacttttacccagtagaatttaatcttaatgcattgttttattttttaccaatcttatcattagagctattgtttttttattttatgcggttatattacattgaaggtaagtccattaaggctcaaatacttcaaatagaacagcgccttagtctatgtgagtttatacatgattacgtggagaaaaaaaacaactctggtgctgataaggaatcctggtcattgtttgagaagctaattttcagcccaatacaggtttcttctgaaaatataccgtctttactggatggcgcatcatctattgccgagttagcaggaaaagtattgtctaaagattcaaaataa

SEQ ID NO: 242308 - DNA, 1500 bp, Klebsiella pneumoniae
atggcaatgtatgaagtaggcaccataacaggtgcagcaaatcaggcaaaggtcacaggcatttctaccaaatggtctgaaactgctcttggtattcaagagggttcaattttagtcatttatcgcaatggaagtgctgatctgtatgccatcaaatcagtaaataatgacactcaactgaccctgacgagaaacataacaactgctttttctggtgcgaaatatggaattattacggcagaaactgccagcacatcgtcttttgcgaatcagcttgccagcgcatttactctttggcgtaacgttgtccaaggatggtctacagcactaacaggtagtggcaatattacgatgacagaccctataacaggtacgcaggtgaccgtaccggcgattgccgggatggcaaaggcctcggatctggatgcgctggctaaactttcagggggaaacaacctcgccggctcgcaaattataaccagcgatagttccggttttattttgggcaggaacaacgatattggactggtcaaaaaatcaggcacctacggaaagctgatggtaggcagcggaacgcgcttcagcgtggtgaaggggaataagtcgactattagccctgaagatacccagacggagattatgggggtcgatagtgccggcaatatgactgttccgggcaacatcagtgcggggaaatattttgcgcaggcaattgagctttcgatgagcactccgtacatcgattttcatcataacaacagtaccaacgactacactgctcgtttcataaccacagccgctgatcaactgagtgtgcaggggagccatctacgggtagacagagacctgcgggtagggcaagcggccgacatcggcagctggatacagtgtcgctatgactgtgtgtcccagcagaccgacttcggttcccctgccattggcgcgttagtttccggtggcagagtccggtcccgcatgacagggcgtggcggaaacggcgacacgtctggagcgtggggtggtttctacctggaagaatacgttgggtacaaccaccgggtggtactgtatatggacggttttgacagaaaagatgcctggctcttttacaccggtgggacaatctccacacctaaaggcgatgttatgaccactggctcagacgtgcggctgaaaaaagattttacggattctcagaaaggggcatccaagcgtattaacgcgctgggggtatgtgagttcaacatgaaaggcgaaacacgccgtaggcgtggatttattgctcaacaagctgaaaaagtggacccgatttacactttccaaagcggtgatgtagaaattgatggcgagaagatcaatatccttaacgtagatcagacagcaattgtcgcagacctggtaactaccgttcaggagcaatgcaactgtatcgaaaaacttaaagaagagctcaaaaatctaaaggatctagtgatgcaaacgccagaaacagcagcataa

SEQ ID NO: 242309 - DNA, 528 bp, Klebsiella pneumoniae
atgtgcctggagatattctcacgggatattcatacgtttttcgcaatggcaaactatctaaatatattagataaagatccttatatctactcaccgttcagaaatatatgcaatgccttgcttggtgatgccactgtgcgatggtgccaggtttttggtacgtatagtgaagataaccattggaagaagataattaatgatcatgaagcatttatgtctaaacttttaaacaatattggtatggatactctatcttatgaagaatacaataaagaaatgagagagtttagaaataaagcgattgcacatttcgaaccacaatacatgaatgcggaaaacattgttccgacatttagcatcgcaatgaaaacatcatcctatcttcatggatatatgcgaaattcattgcctgtgcagatgaaaaataatcaccctgatgatttgatgcgatttggtgaaataacggctcaatgcgtgctaaataaatttggtgatgattttttttatcaccttgattatacaaagtaa

SEQ ID NO: 242310 - DNA, 786 bp, Klebsiella pneumoniae
atgaaaccacacagaccacacggtagattacctacaacattagagtcaaatgaactcaaagcccgtgctcttgaaatgatccttattcttttctatatggaagatttaaaagaatttgttctcaagtcaataagttcaacgagtgagtttagaaagacagatctgttaaatatgatagataaagatagtaaggacaagccatttgaaaaagctcgagctttactcgtttcagaaaaaataattaaccaagaagaaagcgacgagattaaaaaacttgtagattaccgaaatcatatcggacaccgagtataccaattgaccgttgatgtgggtgcctactccgacttggatattattcctcaatatgattacactgcggtaaaacgtgctcaggaactaagaagtaaagttatcaacggaatgggaagaaagttcattttagccatgagctttaatacccttgcttttgatgctgcggaaaccgtgtatcgaaaagaaatagacaggcttaaaaagaaaatcaacaaaggtatattggagcttaacaaggagataagtgaaataaataaatttataaaatccatacctaaatcagcattggaagcaactcatccaaacaacccagataactacaaaaaaaatggaacacttagcccccatggtatcagatgtgtctgtacactttttgattttcaagcaacaccgttagctgtatcatacataatgagatgctcttacaacaccgcttcgagttggtataagaaatggaaaaacaatgagttttaa

SEQ ID NO: 242311 - DNA, 156 bp, Klebsiella pneumoniae; identical to SEQ ID NO: 204285

SEQ ID NO: 242312 - DNA, 903 bp, Klebsiella pneumoniae
atgagtgcagcagcaaaaactaaaaattacgacgtggttcctaccagcgtccgccggatgacgaagttacataccccggcaggggatattaaattcacgcctctgatgaaactgatctactcgtacatatggacattccaggggaatgagaacaggggcaatgatgatccgattcataccaatactaacgtcatcgcctgggaaatgggaatatccgaaagggcgctgatcgacgcgctcaatgcgctggatgctgcgagagtggtgataaagggaaccgtcaaggttcgcggtaacgtcaactccagcaattacgtagcgatcccgcctgcttccgttgttacattgggtgtcactccgccctcacctggcaaacggaaggtgatcaaaaaggacaaaaaaaccgatgaaaaggccgcagaggctgcaacgcaggcagaaccgcaggcagaacaggcaccatcaactgctacaccgtccactgatgcgcccgcaggcacgcctgctgatcagagtcctgacctggcctctgagtctgccacacctgctgttggacagcgcgatagcgtggtatttgacggcgatgctggcactgatggtaataatgcagtgaagcagccgaagatctttgatgatcgcggcgtcatcactgaggcgtttatcaacaacctaaacagcctgacaggatacgacgaaccacgccgcaacgatgacggcacattgcagagtttccgttacgtctatgggatagcacagcaaacacaggataagcgggacggtgttaccgttcgccctcttgatgggtacatggcagaggcccagccttggcacattccgccgcatctgttatcgacaccgataccgataccagagacggaatacgaagaagatccaaatttttaa

SEQ ID NO: 242313 - DNA, 564 bp, Klebsiella pneumoniae
atgacgaatgatgatcgcaacggcgtaagcgccgaaccagaaaagattgacccagaagaacaactcccagaccaacccgacccagaattacctgacctcacccgcctatataaacggcgttgccgcgatggcgacgttatgcagaggtgcaagcacatgttgatcgcgggatattctccaggacgcgtggcattgctgctgaggctaccgctagaaaaggtgcaggcactgtacgaaaacagctataacccacgctgccgcagattcgccaaaaccaatgcgtataccaattcccggttagctctgacctcgttcaatgagggcgcggatattgtagatatcgcggcggcgcttggattgtcgctgtactgggtggtgacctcgctcagacagaacggtgtcaccgatgccgcaatggctccaaagatgccaccatacgacgatccgttgtacgttgaatatcggcgtgtgtgcgagcggaaagccgcgagcaaatcacggcctatccgcataaatccagtaagacgccccagcagacaagcagggcagaccgcgacggcttga

SEQ ID NO: 242314 - DNA, 360 bp, Klebsiella pneumoniae
atgaaaaatactatcaaaaccgttcgcgactccatcgccgcaaccctcaagggcaagacggtcgaacagatggaagacgacgcccgccaggctgctgtaaaaagcgccgtggatgattatctgatccgctacccggattggaaaccgtcaacgaagccagcagtcgcaccagtgactaacaccaagcagaaaaccgcgaggatcaaaaagtcccttggtgctggggcagggacgtttacaccccatattgtggatgaagaagccctacatcgcgcgcgtgaggcagcacgagcattccaggctgctgatcctgagcgttacggcgacatcatcaccgcagcgcctatcaaggcaggataa

SEQ ID NO: 242315 - DNA, 327 bp, Klebsiella pneumoniae
atgcttatgcacgaagaagatttatccccgcaggatgtgatcgcgtatcgcgatgatcccgtgttctcgcacaagacccggctcttcgccaccttggcggttgataccgtccccggcacgcttttagccagtgatggcacggcctacgaatcaggtgatgttttaatcgcactggatagccacaaggcgggcgctaacgtcccggtcattgtggtggatcgcggctgcatcctgagacgtaacggcctccgcgctgctactccagcggccctgaccgcagcgatcactgctattgaaaccagcggcctgaaccgcgtttctgaataa

SEQ ID NO: 242316 - DNA, 312 bp, Klebsiella pneumoniae
atgaagatcgacattatgggcgtgggccaaaccaggcttctgagcttcaatgtcaagacgcttgatgacgcaagcatccttaacatcagcgggttgtgtcgcaagctgggctgcaagaggagtacattcctttcgcgagtggcgaattcgggactcgaagcggcaattctacatttcactgcgatcaaaaagcagcgggatgtgctcgccacgctatcagagaaagacgccgctgcattccttgcagcctgcaaggcaggcgatagcaacaccaatagcgcgagcaacaccagcaacaacgccaaacactaa

SEQ ID NO: 242317 - DNA, 231 bp, Klebsiella pneumoniae
atgagcggtaaagattataacgtgtacaagggaagtgatggtgtctggcgcggtaaaaggcaggatgcaacccgcgcgagtgttactggcaccacccaaagagaagtttttgagcaagtaagagatttagcgataaagaacggttctgaggtttcaattcatcgtggtgataacaatcaaatccgcgacaagaatagttacggtaatgacccgagaaaaaccaaaggctga

SEQ ID NO: 242318 - DNA, 1425 bp, Klebsiella pneumoniae
atgcaagatagcgtcaaccagcccggatttttattccacgattatgaaaccttcggcaccagcccttccctcgaccggccggcgcagttcgccgccatccgcaccgacgcggagctgaacgtgctcggcgagcccgaagtgttttactgcaaacccgctgacgattacctgccgcagccgcaggcggtgatgatcaccgggatcacgccgcaggaagcgctggccaaaggggataatgaggccacatttgcccgccgcatccacgatctgttcacggtgccgcaaacctgtatcgtcggctataacaacgtgcgctttgatgacgaagtgacgcggaatatcttctatcgcaacttctatgacccttatgcctggagctggcagcacgataactcgcgctgggatctgctcgacgtgatgcgcgcctgctatgccctgcgcccggaagggatcgcctggccagagaatgacgaagggttgccgagcttccggcttgaacatctgaccgtcgccaacggtattgaacaccagaacgcccatgacgcgatggccgacgtatacgccaccatcgccatggcgaaactggtgaaaacccggcagccgcggctgtttgattatctctacagccaccgcaataagcgcaagctggcgacgcttatcgacgtgccgcagatgaagcccctggtgcatgtctccggcatgtttggcgccgcgcgcggcaacaccagcctggtggcgcctctggcctggcatccggaaaaccgcaatgcggtgattatggtcgatctggcgggcgatatggcgccgctgctggaactggatgccgatgccctgcgcgagcggctttacaccccgcgcgccgagcttggcgatctgccggcggcgccgatcaagctggtgcatttaaataaatgtccggtactggcccaggccaataccctgcgcccgcaggatgccgaccggctggggatctctattcagcgctgtctggagaacgcccagctgctgcgggcgaatccgcaggtgcgcgagaaggtagtggcggtctatgccgaagccgagccgttcgtgccgtccgaaaacgtcgacgcccagctgtacaatgggttctttagcgatgccgaccgcgcggcgatgaaaatcgtgctggaaaccgaaccgcgcaatctgccggcgctggatattaccttcgccgataagcgtatcgaacgcctgctgtttaactaccgggcgcgcaacttccccggcacgctcgatgaacatgagcagcagcgctggttagagcaccgtcgtcaggtgtttacgccagagtttttgcaagcctatgccgatgagctgcagatgctgtatcagcagtatgcggatgataaagagaagctggcgcagctgaaggcgctgtggcagtacgcacaggatattgtctga

SEQ ID NO: 242319 - DNA, 207 bp, Klebsiella pneumoniae
atggaatataaaagctgttccgataagtatatttggtctgccgatgactcctatttctataaaggactgtccgaactgattgtagacatcgacgaattaatttatcaggcgcgacagcgaatggctatccgcggtaaaggggaaacaggtcgtattgattgcggccaggaaatcagaggccttagcgaactactggtattacaatag

SEQ ID NO: 242320 - DNA, 720 bp, Klebsiella pneumoniae
atgaaagagcgcggaatgatttttaacggggaaatgacgcgagcaattctcgacggtcggaagacgcagacccggcggattatgaaagcccagccgtcagaagacttcacgccgatgaatatggcacttgaagcagattataaagcgcgctggtacacgcctggcattgtcgataaggacggttgtttgcagccggcggggaaagaggtgtttggtgttgccaatgaaaacgaaggttattcctgcccgttcggcgctgtcggcgaccgcatctgggtgcgtgaggcttatcgtttcccggcatcattagacgatgttagcccaactggtgttggtgaaatggctgtggcaacaggatacagaaaaccatgggcgccgaccttctacgagtttacaggcactttcagtgatggatggaaaggattcgaaacccctccaaaagtttctgacgccggaaagcttcgcccatcaatccacatgcctcgctgggccagtcgcattctgctggaaatcaccgacgtgcgggttgaacggttgaagagtattagtgatcgcgatgcgctacgcgaagggtgcagtgccgccgacatgaagagtggcgactgtgtagctgatgtgttcgcgcgcctgtgggcttcaatctacggtgctgaaagttggaatgccaacccctgggtttgggttatcgagttcaagcgcgttgaaggcggtgcagcatga

SEQ ID NO: 242321 - DNA, 330 bp, Klebsiella pneumoniae
atgcgcaaaatcagctatacccagatgcgagcagagctttctgacattttggatgcaatccgggatggggaaacagttgtcgttacgcagcgaggaaaacccgatactgtcttaaatggatggcgtgcgaagaatgcttgctgtcaccttgtcgattctactatgtccaaagagataaagtatcgtgagtgtgacgatgacttcacaaaaatcgttccggtagttggctcggtaattgctggtactttatcgacccatgcttttgaggacgctcttaagcggaccaagaagaagcacgccaaaattatcaaagctctggaagataagtaa

SEQ ID NO: 242322 - DNA, 411 bp, Klebsiella pneumoniae
atggatgagattgcgtttctgaccactgaacaggttatcgaaattcagcgctctaccctacctatgagtggacctcctgatgaagataagcttggtggggctttgttccgaattgaaactttggctgagtatgaaggatgcaaagatatctttgattttgctgctatgtatctgattgctatcgccaaggctcacgcatttaacgatgcaaataagcgaaccgcattccaagctgccagcattttcttattgggaaacgggtatgagctaaatgcttcattcgagttggtcaaacttacagtacttgcagcaatgggggacgcccaattgaatgaaacagccttcgcattgaggattctatccgactaccgtaatgatattgttgcagaacatgattacgtagcccaatag

SEQ ID NO: 242323 - DNA, 576 bp, Klebsiella pneumoniae
ttgtcgttcccccgcatacctgataggattgccgcatcatttactgatggggatagggatatgaagaagcttattgttttcggtttgttagttgtaatgggtggcattgttgccgcaatcgcattggtaccgactcggtatgctcaaaacgcagcaatgacagaagcatgtagctcaataatcaaatcgagaatgaaatcaccgtcctcctactcgatggaaaaggcccttatcagctctaagcagctgtcaggagaagaacttaacaaaaagattgaaagccttcaggttgagtctttgcgcgatggggtgagaaacgggctttttacgcttaaaaacgccgatatatttgtggattttcaggcaagcaatgcttttggagtacaactaaaaggtttgggtaaatgtgaatacaatattttcagtgaggattgggcctctcttgagtctgtgataattgatggtaatgcattgccttccgttgacgttactatcgaatcagtaggtaataaaattaattctggattctcatcaaagttaaaatatttacaatacaaacttcaaggcaagatataa

SEQ ID NO: 242324 - DNA, 471 bp, Klebsiella pneumoniae
atggcaagcgctgaacaggttggcaatatcgtttacgaagtagagatgaatgtcgccagacttatcgaagcccagcagcaggttaataagcgccttgatcagatggattctaagtttgagcaatcgtcacgatctgccgggcggtttgaaggtgctttaaacaaggttggcgttgccattgcagcagctttcaccattgatgcagcgaagaagcttatcgccatcggcgacgagatggttacgctacaggcgaggatagctaggttaagccccagtattgatgcagctaaagatactttagcctctttatctgctattgcatcacaaacaggaagcgggctttatgagacggaaaaattatgggaatctttaacaacctctctcaaggaaacaggggcaaccaatgctcaagttctatctttgtggattggcccctatatttccatacactttttatcacttaacccatga

SEQ ID NO: 242325 - DNA, 4710 bp, Klebsiella pneumoniae
atgagaaaaaactggactataaaggaagattgtaagctgcttaccttggtacgtcagcacttttccgcgttggtcagccataaccggctgaatgccacaatgccatttagccagcagcttcacgatgcatttgactcacctgatcgcgatgccgcagcattgttgtatcgactcgaacaggcaaaaatcctgggatttgccagccgtcctggaggcgatcccactaaacagctgtttcgctgtctgataaacaatgatttggcgctatacgattacagcctcacctttcccactctcagaaaagcattgcatccagataccgttgcagcagcactaaaccacttcacgaatagcaatccacacgaatcactgtccaatactatcaatgaaattgcaaaagccttgcatctttcctccatgcagatagaaaagcttctgatcgacagtggccaaataaccatcaatagttaccgtgagtgtgagcgtgttggagagataactatcaataataatctgcaagatcttatctccaggcaaattcctgacataacgctggttgaaaatattaacgcttgccgcgcccaagtttctcaactttaccacgtgcatgaacgtgatggcgcggaggtcatcttcagttccgatggcacggggttcggcaaaagttatggcgtaattcaagggtatgtcgaatatctggagtgtttcgccaaaaaacaaaagtcagatgatctgtttcccgaaggtggctttaccaacctgctgttcatgtcgccgcaaaaatcacaaatcgacctggatagcagccagaaagacaaaattctggcttctggcggcgaattcatttgcgttctctctcgtaaggatattgccgatctcgactttatggactgggccacgggcctgaaaaatcgcgaccgctatattcagtggtacgaaggggcgaaaggtagcaaatatattggcagcgcaatgcgttcgctcaattaccatgtctcacaaattgatcgctgtgaagagcagttaaaaaagctgacaacatacggttctcaggataccaactacgaaagagaaattcttgaagagcagctaaaaaactgtcgtcatagtatccgcaatacgattgagtcagcctgtaaattactatttggaccagatagtgaaaaagcttccattaaagagtacattcgtcgcgggctccaggcgcgccaagagcgaatgcaacacgcggagacagcacgaaaaccaagcaagtctgaactaagcgtacacgaagtctacttcgagcttatcaaacaggtattgcctttcgaagtttgccagtaccgcccgtcggtgctattaatgactacaaataagttcgacacatcaacttaccgactggcgcctcgtcagcgaggtgaaggcgtgcattttgagtccgtaggtttcgacttgctgattggcggcaagctggctcccaaagatccacagatcagcaccgttgcggcagctggccataccgggcaggttgcttatcttcgtgatgaacacttcagacgtaatccagactgcccttttcgccagaaaaatattcgctttacggtaatcattgatgaactacatgaagcctacacccgtcttgaagaaacatgccatgtaaagctaatcacacaggaaaataatctggcgcatgttatttctgtcgcgggacgtattcacaatgcggtactcagcctggagcgccggaaaaagcctaaagaagcgcaaacgacctttgagcaagagatggtcaaattcatcaccatccttcgagacctactggcgaaaaagtgcgaattatcacccggtacgacgctgggctcgatcctggagatgtttcgcgaccagttaggagcattcgaagttaacggcgacgccgccgaacgcatcatttccattacccggaatgtgttcagctttaaccccaaaatgtacgttaatgaagaggggctgaaacgcattcgtatgcgcaacagcgaaggcgacataacgcgcaccgagctatattacgaagtcgaaaatgatgccagcgacaccaatcccaccctgcacgatctgttccaattggtctccgtcatcctcgcagcctgttctgatatcaccaaccgacactttaagcgctgggtaaaaaatggtggccaggataactccagcagccagaatacacctttgggccaatttgttgacgcagccaataatgtagctggagtggtgcgacatatcttcgatcgcaccaccgataaaaacttgttgattgatcatttctacacttatctgcaacccaaaaccgtattcacgatgacgccgatagttgaactcaattacgtgaacagtggagccgagcgtacaattattctggcgtttgagatggatctggtacaagagttgcctgaagccatgctgctacgtttattaacgggcacgcacaataaagtgattggacttagcgccactagtggttttagccacaccaaaaacggtaacttcaatcgtcacttcctggagcgctatagccgtgaccttggctatcgagtcattgaacgtaaaaaaacagatatcgatacgcttagagcactacgcgcgttgagagccagtatccgcaacgttgacttcagggtgttcgatgataagcagttaaaattgaccgatatctaccaaaattgtgagatctatcgcaggacgtatgacaactttttcgacgcgctgaagaaatcgctggagtacgacctgaaaaatacctataaacggcgtcagtaccagcgggaacttgaagcgttattgcttgccgcctgggagggtaaaaacagcctgattttgtccctttcagggacatttaagcgggcctttatcagcgcctggcgcactcatcaatcagcctggcgtcagcagtacggtatgcactcccggtgcgatgaaaaaacggataacgataagaaacatgaccagatcctgacctttaccccattcaaagggcgtcacacagtccatttggtctttttcgattcaccactggttaatgtcgaagatattaggcaagaaacctatctcaagaacagcaataccgtactggtatttatgagcagctacaaaagtgcaggcaccggcctcaactactttgtgaaataccatgacggcgatattaatgatatcaatgcaccacgtctggatgtcgattttgagcgcttagtgctcatcaactcctcgttttacagcgaagtaaaggacaacagcggcaaccttaatacattacctaactacgttaccgtgcttaaacactacgctgatgacgatattaccgtccacaagctggccgatttcaacgttaatttcgcccacggcgaaaactatcgcctgttaatggccgaacatgatatgagcttattcaaagtcgtcgtgcaggccgtagggcgagtcgagcgtcgcgacactctattgaaaacagaaatctttttaccccgcgatgtgttccgtaatgttgcattccagttcgccgctctcagtgaagatagcggtaacgaggtagtatcagaaagcatgtccttgcttaaccaccgcctaatggaggagtgcgaaaagctgagtcagaaccagtcatttagtgatgcagaacagcggtatgcgtttgaacaggctatcgtagaaaatggtcgccgcatcgatgctgttcataagcgagtcctgaaaaccgactggataaatcaggtacgcgccggcaaccttgaatatctcgaattgtgtaatttattccgcgcttctgactcctttaccgatcccatgcgttggctggaaaaacttcaggctaattccttgtatgccgccaatcggcaaatgcaatcaatccaccacgccctgtttatcgaccgccatcagggcaaccaaactattttactttgccacaaacgcggcccggatggacttgtccacagagattattccgccctgtcggatttcgctggcggcgcaagagagtaccggcctgagctcaccctctttccgcagtatagaaacgatgtcgattttacccccggcaacctggtcggcgagttgattcgtgaatgtgacaacatccaggaaacggcattcaaaaaatgggtacccaaccccaggctagttccgttgctcaaaggcaatgtcggtgaatatctcttcgataaagtgctaaaaagctatggcgttaccccactttctgatcaacaggtgtttgaacgccttgaaccgctagtatatgagttttttgaccgctttattgaagtgggtaacgacctgctctgcatcgacgttaaacgctgggcgacgcagttggatgatttaacgcgggcagaagaaacgcttgagaaaagcaacaacaagattcgccagatccgtaatatcaccagccaaaaggcggatacagaggggcagaaacagcttcaggctgtgctgtcaggccgttacgaacgcattcgatttgtctatctgaacgtcgcctacagccagaaccccaataatctgatgtggcaagataacgtggatcacacgatccactaccttaacctgttgcaaaccgactaccagtactatcagcccaaaaatcgagagagcggacgagctcaggaaaactcgaaactgagcatgacattggacattaacccaatgttactaaccttgctgggtgtagaaaagttgccgactaaaggaaaagtctcatga

SEQ ID NO: 242326 - DNA, 2232 bp, Klebsiella pneumoniae
atgatccctaatttgaatgaactgacggatactccgattgcccgaaccaatttgatcaagcttgaagaagatcagctgacgaccatccagcgtctattggcccctatatctaatatctatacgatagactttatggttcagcgctttactaaagagcgaaaagaaaaatccgctgattactatgcgcgaattcatcaggaggtaaaatcttgcgtgcggcagaagcttgggctggaagccgggcaggaggtaaaatatgaactgcattgcttaccaaattaccatcacgtcttttttttcctggcgcctgcaactaacccgaacagtcaggctcacaggacgttggcagaacgtattgaaacgctttgtcagcaactcaccgctgaaaatcatgacctatctcgcctgattcagggattatttagcctgcatttgaaaatggtaatgctggaaaaagccagtgagcgcttttcggtatcgccgacttacttcaactcaacgctttaccttaacgctcgtctgagtcagcccgtcacacaaaaaaaaggcaccggggtgatggaagcctttgagctcgacatttatgcctcagaatataatgaactcgcttttaccctgcacaaacgaaaattcttggtcgaaccggcggatgagatgcacctatccttggacgataccagcgtgtggtttagcatcgataatcgtcggcttaaagctcggcgcaaacttgatgcccgtgatagcaaactggatttttttcgtgagcgcagcggttatggcgaatgccaggcctatacctataacgttgtcatgaatgctgcctgcgagcggctcagtgaactagagatcccccatcaacctatcccatttcaggctacacacgaggtcaatcagtttgctaccgaccttgatcaacagctggctaatacgctgttggtggtttataacggcgtcgaattcagcgtcacgcaagaagcttatttctttgatgcattagccaaccagttccccgggtatcaactctggtctctggcatcgcttaaacattcccgacaaaccggatttgctgagctgcctgctaatacatctattctggtactcaatgcggtagaggaagaacgaagcaacagcatccggcagcaagagaatgaatctgttgagtacaatgatttctattcagcctttgccgacgcccgaaaacaacctgaactcaactgggatatttatacccagcttaagttagatcgtttgcaagggtggctaaatcaacaaccactgcctgtggttttacaaggaatgaacattgatcgtaagttgctggatgcgattgattttattaatgaacaattgataagcaaccctgctcaatacgaaatcgaacttacgaaaccacacagtcgtctcaagtcagcagttaccttattgaaaagtaaggtacgccgaacgaaaactgaactatggttcaaagagagcttactcaatcaacatcacattccactgccagacttggcgaacgggcactataccgcctatgcggtacgcaaaacgaaaagtaatatccacctgcttgggtatgttgaactaaaaatagagcacggccaacttagggtggttgataccgggatcgtcgaaggtgaattcgagtatctatctgttgatcatccagctctgggacgactaaagaaattattcgataaaagcttctatctctacgaccatacagcagatgtgctgcttaccacctataacagctcccgcgtgccgcgcctgattggcccggcgcaatttaatatcgtcgattcatacgcttatcaggaacaagaaaaagcgctggcggagcgtcaaggtgataaatttaacgggtatactatcacccgctcagcaaaattggagcaaaacgtactgccctatctgatatcaccgggccgctcgaaatacgactcgttgactaaaactcaaaagatgaagcatcaccatatttacctgcaaccgcatgagaatggagtgtttgttctggtaagcgatgctcagcctacaaatcctactattgcacggcctaacctggtagaaaatctgctgatatgggatgcccaaggtaaggccgtagatgtatttaatcacccgttaactggtgcttacctcaatagcttcaccctggatatgctaaggagcggcgaaagtagtaagagttcgatttttgccaagctttcacgattgatggttgagaactaa

SEQ ID NO: 242327 - DNA, 618 bp, Klebsiella pneumoniae
atgaatactatgattcgcaatgccttagatgaagtctatgatgacgtatacgaggcttttaaagagaagtttgaaacgttagtaacaaaatttaaagattcaggacaaaacgaagagttgagcatgatacgtacgaatgctcatgaaattattgaggagttcaaggctattgaggaggaactgcctgagagaatcgttgataaatcctatccgggtaatttccgtttgtaccaggaatttgttgatgttaatggaattgttgtgccaaaaccatatgtctataaaaaaacttatgcggaggcacgagccaatatacataaagaaatgtgtgaggggagaatttctgggaccattaagttgatgaatgaaaattaccgttcaaattatctgcttatggtatttaaggatttttattggagtgagtatcttttatcgagtggtaataaaaaagatagttgtaagtatttgctttatgcactcttttatatgagctatgtcgaagatgataatgacaaaactaagcttaatgattggcgtcgattaaataaaaagttcgatagggtaagagggagaatagcatcaagttgtggtggtaagggggggggggtacgatattga

SEQ ID NO: 242328 - DNA, 960 bp, Klebsiella pneumoniae
atgactgaaaataaaaaatggaaagaaaagttaatatcctcaagctttccattggaatatgtggtctcaaaaaaattagcagattatggaatagccgtatcaaatgattacgcatactctcgtgaagacgcaggcatattgaaagacttttctatagacatgcatggtaattattgggatgaagaatgcacatatcatttaaatttccttatcgaatgcaagcagaggcacgataaaaacaaatggctttttatgagagatcctaacgctcctgattatagtgcgttaactctgggttacactttgcgggcaatagataattttacaagaatagatctgcctccaaatgcaataattgccttagatgaaaatatgaactatgccgtgaagggtgttgaaatagacactagcaatggaaatttttacgatagtgaaattaaacacggcatatctctactagcttattctttaccggatgtaataattcataacattgctgaatgcataaactcccaccctgaggataacctgccatttttcattgcacccattctggtaaccacatccgatctttatttaacacatgatgaattctcagcagagagtattagaaacgcagaagatttaagcgatatagcagatcttgtgccgtatctagtgatagaaaatcagcatacccctggattcggaatgcaccgaaagcaacgtttttcgtcatttgaatactttctagaatccaaacaacttgaaatcataaatgacattaggaaaaaacatgaaaaacatccattcctattgccacaagaaagattgcttaatttaattcatcagccacatcaacatttcagcgaatacttctcgcagattattgtctgttccattaataacttagaaccattgatagaacaaattatagaaatcgcagataacgcattattgaattccaaaaagctttcttga

SEQ ID NO: 242329 - DNA, 906 bp, Klebsiella pneumoniae; identical to SEQ ID NO: 134199

SEQ ID NO: 242330 - DNA, 639 bp, Klebsiella pneumoniae
atgcgtttaacaaaaattgatgagttaactcgcggccagcactatcatcttagtgaagatgatacatgttatttctttggcgaatacaccgcgaggaagggatacgctttcagtaataccaataatcttatccataattttaagaagggtgtcgagaagaaaggtaaggcagagtgggtttacaaagagtctgctattattaatgtcgcaaatctcataaactcaatatcgaatattgacgaacttacatttgttcccgttccgccttcaaaatgttgttcagatcctgcgtacgatagtaggcttatcgatgttctaaaacagtgtcaaaaaaccaaacctaatctgcaatatattgaattaatcaaacaaagagtttcagtacaggcatcgcattcagttgaagcgcgtccaaccccagaagaaatagctggtaattatattttcgatgaaactttagccgttaatctaagaaaatatatagttattttcgatgatgtgcttacagctggtagccatttcaaagcaatgaaaacaacgatcaagctccatcttcctcaaagtattgttattggtgtctttatcgcaaggactgcgagggaagcagaatgggaggatgatcttgctgatgatttttag

SEQ ID NO: 242331 - DNA, 756 bp, Klebsiella pneumoniae
atgaatcttatcagtattcccgcgtttcaggacaactacatctgggttctcagtgagaataacggccgctgcatcatcgtagatccaggcgaagccgcgccggttctggcggccatcgaggaaaaccagtggcagcccgaggctattttattgacccatcatcatcaggatcacgtcggcggcgtaaaacaattacatgaaaaattcccttctatagtggtttacgggccggcggaaacccaggataaaggcgtcactcaggtggtaggcgatggcgatcggctgtcaattctcgggcacgatttttccattttctctacgccaggtcacacattaggacatatctgttactacagcgaaccttatctgttctgtggcgatacgatgttttccggcggctgcggaaggctgttcgaaggtacagcagagcagatgtatcaatcatttatgaaaattaacgcccttcctgaagaaaccctcatatgttgcgcacatgaatatacgttagcgaatatgaagtttgcattgagtatcctgccagatgatagggacataaacgattactatcataaagttaatgagttacgtgcaaaaaaacaaaaaacactacccgtaactctgaaaaatgagcggcgtataaatttatttttacgcgtaaatgatattgatttaattgacaaaattaacaaagaaacaaatttgcaacactctgtggcgcgatttgcatggttaaggtcaaagaaagatgacttctga

SEQ ID NO: 242332 - DNA, 786 bp, Klebsiella pneumoniae
atgccactggcgctatttgccttaaccatcggtgccttcgcaattggcaccactgaatttgtgattgtcggcctggtcccgaccattgctcagcaactctctatctccctgccttcggcgggactgctggtctctatctacgcgctgggcgtggcgatcggcgccccggtactgacggcgttgaccgggcgtatgccgcgtaaacagctgctgctggcgttgatggtgctgtttacggcgggtaatgtgctggcctggcaggccccgggctatgaaacgctgatcctggcgcgactgctgaccggcctggcacacggcgtgttcttctctattggctcgacaattgctaccagcctggtggcaaaagagaaagcggcctcggccattgccattatgttcggcggcctgacggtcgcgctggtaaccggggtaccgttcgggactttcatcggccagcattttggctggcgggaaaccttcctcgcggtatcgattctgggcgtcattgcccttatcagcagcctgattctggtaccgaataatattccgggccgcgccagcgccagcctgcgcgatcagattaaagtattaacccatccgcgcctgctgatgatctacgccattaccgcgctgggctacggcggcgtgtttaccgcctttaccttccttgcgccgatgatgcaggagctggccggtttcagtccgtcagcggtgagctggatcctgctgggctatggtgtctcggtggctatcggtaatgtgtggggggggcaaactggccgataa

SEQ ID NO: 242333 - DNA, 417 bp, Klebsiella pneumoniae
atgagtgataaaaacctgcgtctgcaggtggttctgaatgcggttgataaactcacccgccctttaaaaatggcgcaggctggctctaaggagctggcctccgctgtccggcagacccgcgaacagctgaaacggctgaacgatgcggggggccagttaaaatccttcgctcagctgtcacagagtctgagacggaccagtaacgaactggaccaggcgcggctgcgtgcgcagatgatgacccgcgaaatgtcagccctcgaatcccccacgaagaagcagacggcggcgcttgaaaagcaatggcgggccgtgtcacgcctggagcaaaagcagggggcaggaaacgcggcagatggcggcagccagggcggagctataccgcctcggcatctctgcaggtggaggtgcccgtga

SEQ ID NO: 242334 - DNA, 1233 bp, Klebsiella pneumoniae
atgcttccaagaattcgctttccttctttcaatggacactacactgaaaaatccttacatgaagcagtgctcgaattgaaaagcggcctttctcgaatgttcagtgactctgacattggcttgccagttatacgctcaaataacataaaagattattgtttggattttaatgagttaaaatattggttcgaggaagacactcaaggtgctacaacctctaattattacttgcgagatggagatattttagttaacttcattaacagccaagcgcagattggaaaatctgcgatatattataatgctctgaacagagattgtatatatacaaccaatatattgtcccttcgcataaataaagatcactctcctgagtttatcttttttttctttcaaacaaaaatgtataatgactacattcaaagcataactaaacctgcagtcaatcaggcaagttttacgactaaagatttccggaagatgaaaatctttttcccagacttgactgagcaaaccaaaatcgctaatttcctttcctccgttgacgaaaaaatcgcgctactaaataagcagtacgacctgctacgccggtataaaaaaggcatgatgcagaagatctttagccaagagttgcggtttaaggatgatagcggggacgagtttcccgagtgggaagaggtagagctaaaaaaaatagcctctaaggtaaatactaaaaatagagataattcagtaaccgcagttctaactaactctgccacacaaggtattgttagccaagaaagttactttgaaagagagattgttactgagagcaacttaacaggatattacgttgttagaaccggtgatttcgtatataacccgcggatatcttcaacggctcccgtaggccctataaaaatgaatgaattaacccaaggagttatgtctcctttgtatacggtttttcgttttgaaaagggtttattgaaattttatcaatatttctttgaaagttcagtttggcatgattacatgaaaagcgtagcgaatagtggtgccagacatgaccgtatgaatatttcaggagccgatttcttcggtcttccggtaccccaaccttttgaggcagaacaaaccaaaatcgccaacttcctctctgctctcgacaataaaatcgccgtcaaaaaagcagaactggacaagttgaaaacctggaagcaaggcctgctccagcaaatgtttgtataa

SEQ ID NO: 242335 - DNA, 174 bp, Klebsiella pneumoniae
atgcagactgaacaccccggtgataaagcagccctgaagcagagccagaaagagaataaggcactgaaaaaagagctggtccgtaaggaaaaagccctggcggaggcggcggccatactggtgctgcgaaaaaagctcagggactactacggggaaacggacggggaagactga

SEQ ID NO: 242336 - DNA, 480 bp, Klebsiella pneumoniae
atgaaatttctaaatggaattaaatatgtgactgctctgggggtagttactatctcctgttcagtaatagcatcaccttatggagattcagatgttctgttcgggtgtatcataaaaggtaaaaccactaaagaggtggttgtgttgaggaataataatgaggtcacttatttattcggtaaatcggatattgacggagggggtggggttattcctgaaatcactttagtaaaaaatgtgagtcagttaagtcagacctggaattacagtcgagctgaaggtgtgtctatacatacattgaacataccagaaaatgactatacttactctgtttcttatatcgataatggaaaaaatactgatgggaaaataaccgttttaaaacagggaaaagaaatcggcgtgataaaatgcgatgacatctgggaacaacatctggatgacaacagcatgatgcatggtatcccagatgaaaactaa

SEQ ID NO: 242337 - DNA, 321 bp, Klebsiella pneumoniae
atgctacagcctgttcaacttttcaaaattctgtcagatgaaacccgtctggctatcatgatgcttctccgggaatccggtgagatgtgcgtgtgtgatatttgcgcggccaccgccgagtcgcagcccaaaatttcccggcatatggcaatccttcgggaggatgaactggtgctggaccgtcgggaagggaaatgggtccactaccggctctctccacatatgcccgcatgggcggcagaaactatcacaacatcctggcactgcctgcgggaagatgttcgtcagtggctagaaatatccgtaggatcatcctgctga

SEQ ID NO: 242338 - DNA, 924 bp, Klebsiella pneumoniae
atggagcttaatgaaaataaatgcaatgataacgaatatcataatcgttcattggcggcacaaaaaagtacgatgatcagtgtagctgtaaatatattgttatcctgcgttcagattttacttgggatattttctggctcacagggattaatcgctgatggcatacattcgttttctgatttggtgttggactttgtcgttctgatcgccaataaaaaaagtcgcaagccttctgacgaagatcaccattacggtcatggacgctatgaaaatggggcgtcgttgattattggcgcaatcctgttccttgtcgggtccataatgatttggtccgcaagcggcaagctgtggcaccctgaagccatttcagaggtgcatattgttgcgttgtgggtagcattgttcgcgctggtgacaaaggaactgcttttccgctatatgctggctgtcgcgacacgcattcagtcgtctctgctcatcgccaacgcctggcatgcgcgctctgacgcagcttcatcagtggtcgtgtctgttgggattgtcggcaatttacttggctttccgtggcttgatccggtagcagcaatagtggttggtgttctgattgcccgtatgggctacacttttgccgccaatgcacttcatgacctgatggatcgttcggtaagcactgagatggaaactgcaattaaagcgattattctcgctgtccctgacgtcctcggagtacacgatctgaaaacacgaaaaacgggcgatctcatactggtagatgtacatattgaagttgacggcgagctttctgtcagtgaagggcatgatattgccagagcagtacgtcaggcggttctggaaaataaaaatgtgctggatgtcatgatccacactgacccttatcagtgtgaagaattgcccgtttgctaa

SEQ ID NO: 242339 - DNA, 294 bp, Klebsiella pneumoniae
atgaccactgtcaccgtgacgcctgctgaaattaatgcacagcatggcaaaccagttcttctgattgatatccgcagccatgatgaatggcgaagggaacacatttccggcacacgttccctgccgctggaacaacttcatgccggttgcttcagtgagaccgggctgagcgaaacggatacggtcattttccattgccagagtggtatgcggaccgggaacgcggcagaaaaactcagtcagtttgtgtatccggcacaggcactgatcatgcagggaggcctcaatgcctag

SEQ ID NO: 242340 - DNA, 306 bp, Klebsiella pneumoniae; identical to SEQ ID NO: 190382

SEQ ID NO: 242341 - DNA, 576 bp, Klebsiella pneumoniae
atggccgtcaatcttcgtcgcgcgttaccccatcaggacacgcctttctttcggggacttcatattgttgtcgccgttctggttctggctcagattatcaattcgaatatgacggaaactgaggctctgggacagttttcgttgacaggtatggtgacttttctgcacatcatttccgggtttggtctgttgctttgtggtgtggttatgctgttctggatgctggctcagcgtggtgcccggtattatttctcatacttgtatctggattttcagggcatcaccgacgatttcaggacgctgcgtcagtttcgcctgcccgaagcacatgccggaggtatggctgccatcgttcagggactgggggtgctgtcattactcggtgtggcggctgtcggcggactctggttcattctgaatatgatgtacggtcccgattcggtcctggtacatgacgttctacatttgcataagtttctgacggtctttattgagacctatttctgggcccatggtgcgatggggatccttcatttgctcctgacaattcggttgcaacagttgaataaggaatga

SEQ ID NO: 242342 - DNA, 648 bp, Klebsiella pneumoniae
atgggagccatcaaccataaggttgtccagcgcctgatgaaccgactttctctcaaagcggcgattaaagttaagcgctacagttcgtggcgtggagaacgcggtgaagtagttgataatgttttacagcgaaatttcaaggcaacccgacctaatgaaaaatgggttacggatgttactgaatttgctgttaatggcagaaaactttacctgtcacccattattgatcttttcaataatgaagtgatttcctacagcatttcagagcgtccggcgatgccgatgattgatgaaatgttggataaagccctggcaaaactggatgagcagagttcacccgtacttcattccgatcaaggctggcagtaccggcaccgctggtatcaataccagctcagagcaaacggtgttgtgcaaagcatgtcgcgtaagggcaactgccttgataatgcctgtgccgagtgcttttttgggacactgaaatcagagtgcttttatctcaacacatttaatgatattgataagttaaaagtagcggttacggactatatcgattattacaacaaccgccggatcagccttaaattgaaaggcctcagtcctgttgaataccgtctcaaggccttcccatatccgctcagaatctag

SEQ ID NO: 242343 - DNA, 294 bp, Klebsiella pneumoniae
gtggcgcacgtattcggtgaacgcacgttggccacgctggagcgtcttctgggcctgctgtcggcctttgaggtcgtggtatggatgacggatggctggccgctttatgaatcacgcctgaagggagaactgcacgttatcagcaagcgatatacgcagcgcattgagcggcataacctgaatctgaggcaacatctggcaaggctgggcaggaagtcactgtcgttctcaaaatcggtggagctgcatgacaaagtcatcgggcattatctgaacataaaacactatcagtaa

SEQ ID NO: 242344 - DNA, 957 bp, Klebsiella pneumoniae
atgaatacagtagcactggcaatacatggtggttgtggcgtcatggccctggaggatttatcgtcagaggaatggactgaggctcgacaggatttgcagaaagcactccagacaggatggaagatactaaaatcaggaggaagtgcattagatgccagccaggctgctgtcgtggtgatggaaaattcagttcactttaatgccggatatggtgctgcgctgaatacggcaggagaacatgaactggatgcctctatcatgtcgggagtcgatttggccgctggtgctgtatccgctgcccggaagatccgcaatcctgtgctggctgcccggaaaatacttgatttgagggaaagtgtgttgttaacaggagacggggctgatgcttttgcccgtcattatggtctggatatggtggaaaatacctatttcaccacaccacgccgtgtaaaagcgctggaggttatgaaacaacatcagcttgccgggacatataaaacagcgcgtgagtcagagaagcacggaacagttggagcagttgctctggatttggagggacatcttgctgccgcaacttctacgggagggtataccaataaacctgtagggcgggttggggacagttccgtgatcggtgccggaacctgggctaaagataatgtctgcgcggtttcttcaaccgggcagggggagttttttattcgttatgctgtggggcatgaaatttcctgtcgtattgaatatgcgggacaatcgcttgaagtggctgcggatcagatggttaatcatatattaaaggcacatggtattggtgccggcctcgtggcgatagatagtaaaggcaacgttacagcgccatacaatacactggggatgttcaggggctggatacatgctgaaggggacggtgttgtcgctacacatgatgagtatttcgctttccaggcaatactttga

SEQ ID NO: 242345 - DNA, 990 bp, Klebsiella pneumoniae
atgaatcataaaactgaaattccggtattaacggtagatgatgtctgtgtgacatttcctctccgatattcgttgtgggaacggttacacgggtatccgcgacgagctgtccaggctctgaacggcgtacatctgacactccgtcccggagaaacgttagggattgttggagagtccggatgtggtaaatcgacgctggcacgtgctctggtggggctgaatggtaccagtcacggtgaaatccattttcacggtcagaatattgcttcattacgtggtagagcgcggcgtgactttaaccgtcgggtacagatgattttccaggatccgtatggctccctgaatccccggatgactgtagggcagattttaacagaagcgctgacggtccaccatatttgcccgccagtagagatcccctctcggatcaggtcgttgctggaactggtacgcttacctgctgatgcggtaaataagctaccaaaagcattttccggtggtcaacgacaacgtatcggtattagccgggccctggctgttgagccggaagtaattgtggcagatgaactggtttctgctctcgatgtgtctgtacaggcacaggtggttaatctgttactggatttacaagcccggttaaaactgagcgtgatttttgtggctcatgatttgcgtcttgtcaggcatatttctcatcgtgttgccgtgatgtatctgggggaagttgtggaaattgctccggcggtcagtctgtatcaacagccattacatccatatactcaggcacttttacgtgcagctccaggatttgatactaccctgcgttcccgcccggtgagtctgaaaggggaattacccagccctctgtctcctccatccggttgtcgcttccatacccgatgtccacaggcgacggaacgctgtagacaggaacacccggtattatctccccggcagggagagcgtgccgtagcctgtcattatgcctga

SEQ ID NO: 242346 - DNA, 999 bp, Klebsiella pneumoniae
atgagtggagcatcgttactggaggtgcagagcctcacaacaatattgccagcagcccgtggtcaactgacggccttacgtgacgtcagtttttccctgcaggagggggaaatcctgggactggtaggagaatcgggatccggaaaaagcgttaccctgaaatcattgttgcagctgttgccggcagattcgcagattcaggggaatatttgctggcgcggtacccctgtcagtaataaggggacacaatccgtcagaagcctcagaggtcgccatattgccatgatttttcaggagccaatgagtgccctcaaccctgttctgaccgtaggatgtcagattgatgaaagtctacgagcacacacagctctcaaccgtcgtcagagactgaaacgtaccgttgaattactggatatggtgggaatccctgcggcttctgccaggataaatgattatccacatcagttctcagggggcatgcgccagagagtgatgatcgcgatcgctctggccggtgaaccggaactgttactggcagatgagccgacaacagcgctggatgtaactatccaggagcagatcctgaaattgttgctacaactgcgaaccgaactcgggatgagtattatttttgtgacgcatgacctggcagtggtcgcacagctttgtgaccgggtttctgtgatgtatgccggaacagtggtggaaacgggacctgtggatacggtactgcaccagccattacatccctacacgcagggattgctggcgtccattcctcaggaaggaacggagcgtacaccgctggaaacgattgaaggaacacctccctcattgaaaggtatgcctgaaggatgcccgtttgcaccacgttgtacttacgccacagggcaatgccatgagcaccgcccttcgctggttgccgccagcaccgggcatcatattgcctgttatcatccactcacctcccggttaaccggagtctgccatgaatcataa

SEQ ID NO: 242347 - DNA, 843 bp, Klebsiella pneumoniae
gtgagtgcaacgatgattatccgcagatggcaggccgctaagttgagccctccggctgcgctgggatgtctgattatagtattaagcctgctgattgcttttttcccgcaatggtttgctccgtatgatccgctaacgtttgactaccgggccatactcaaaccgccctcagcagctcactggttcggcacggacaatttcggtcgtgatatgctcacccgggtgatttatgcctggcaggtggatatgcagattgcctttttcactacgttgtttccgatgtttttcggcacggtgatggggctgattgtcggatactacggtggctggctggaggttctgtttcatcgactggtggacgctgttattaccttccctcttctggttcttgtgattgtgattgtggcagttctcggacccggtctggtaagtatgtatattgccgtcggtattatttactgggtgttctacgcgcgattaatttcaggtgaagtcagtgttcaaaagcgtctggattatgttgctgccggaaaagtgatgggatatagcgatttgcgcattatttttcggcacctcttacccaatgtcatcaatgtgactctggtgtactggatgacggatatggctctggctatcctgttgggctcaagcctcggatatctgggactcggtgcccagccaccggcagctgaatggggtgtactgattgccggggggaaaaacttcatggacactgcctggtggatcacagtttttcccgggctggcgatcgtgatgacaggactgggtttcagcctgatgggggatgccctgactgaattcctcaagtccggtaaccaataa

SEQ ID NO: 242348 - DNA, 939 bp, Klebsiella pneumoniae
atgcctgaatttacgtatattctgaaacgcattttgctgattattcccactctggttgtgatcctgctggtgacatttgtgcttgtgagactgttgccaggcgatccggccagtgccatgctaggtgaccgcacgctggacgcggatgtggtacgtattaatactcagcttggtttggacaaaccactaccggttcagttcctgtattttgtccgtaatgtcctgacgggccatctcggtgaatctttttttcttcaccagccggttactcaggttattgctgaaaggttacctgtcagtctgatgcttacctgtatggccgggatattatcactggttctggctattccgctggcttttatttccgccgtgcggcgtaacagtatagccgataccaccatacgcggagcttttcagataacactgtccatgccttctttctatatcggactgttgttgttgactctgtttgccacacattttcactggtttccggtcggcgggtatggcagcacatttgttgataagttgtggcatctttttctgcccgcactgactctggctctgggcctggcagccgtattaatgagtaatctacgcagttctattctggccgtactggatgccgagtacgtttcttttgcccgggccaaagggttacctggctatgtggtgttattccgccatgtactgcgtaatgcccttctgccgatgattacgctttttgcactgaatataggcacaatcattggcagtgcagtgatcactgaaaccgtttttgcggttccgggaatttgccgactgatggtggacagtatcatgagccgggattatccgatggttcaggggctggtgatcgtgctgtcggtattggtttcgctgatatttctgataacggatattatccagtcagttattgatccgaggagagcacagtga

SEQ ID NO: 242349 - DNA, 1596 bp, Klebsiella pneumoniae
atgcatgttaaaaagtacatcacagtggcagtgttactggctgggagtatgatggattcaggggccatgactttcgctgcagagatgccacagcggggaggaaccttgctgtatggtcgttatgccgacagtaattatctcgaacccgtgctgatggaaggcaataacaatatatggatcctgtccaacatttacgatacgttgctgctgccttccagggatgggaagagtgttgagccgggacttgccagcgcatggtcattatctgcggatggtaaacaggtaaccattactttgcgtgaagggatcaaattttctgacggttcccctattacagctgaggacgtgaagtggtcccttgaacgagccagtaaacccggaaatggtgcatggcagtttactgtagaatctattgataatgtcaccctgacggacaataaccatctggtgattcatctgaaacatgctgatcccgccatcctcagtgcgttaaccgtgtttaacaccgggattatgccggaacgtctgtttgaggctacaccggggaagacggatgcggaaaaagccgcgatatttgcagaacaccctgtgggctcagggccctttattctgaagtcctggcgtcataatgccagtatgacactggtgaaaaatccgtattactggaagaaaggggccgatggcaaaccgctgccttatctggatgccgtacagtttgagattattcccgatgatgccacacgtattctgaagctgaaatccggcgagctggacggtgcagaatttattccttattcccgcgtgaatgaactaaaatcacagccggagattaacatgatgctatttccgtcaacacggacggaatacataagcatgaatgtccgaccagaattacagggtgtgaaaaaccctctgtcagacgtgaatgtccgtcaggcattgaattatgcgacagataaaaatgccatcatccagctggtgacttacggtattggtactccgatgagttcttatatttctagtgccacaccagggcatatcggtaactcgcctcttttcccggttgatatggaaaaagcaaaagcgcttctgataaaagccggatatccgaatggatttagtacccatattatgcttttgtccggtaatgaggatgaaatcagtattggtacggctttacagcaaatgtgggcgcagattggtatcaatcttgttttggatcaggtggataatgcaacacgtaccgatcgttaccgtaagggggactttaccatgcggcttggggtctggacagatgatattgcagatcccaatgaggtaacatcttattttgcttattcaaaaaatatcagtgcattgcattcaggatggcgtaatgaccagctggacaggctgttcgaagcctcacaaagcgagatggattcacaaaaacgagcaagtgattatcgccagattcaggacatatttaaccaacagggaccggttgtcccattatatgagagtccttatccggttgcattacaacatcgtgttcatgattttgtacagatcccgttgggaaataacctgtttacagaaacctggctgagcaaataa

SEQ ID NO: 242350 - DNA, 867 bp, Klebsiella pneumoniae
atggtcggtgtcgcaccgatgaccgtcgcacaggtctacagggaactgaaggatgcagaattaatttacagtaaacccggatctggtaactttatttcggatgccggtcgtttaccacagcacagtcaggagaatgtgttgcggcttcatgggatggctgatcaattcattgaacacgccagaatgatgggcatgtcagtgattgatatgacaacccttatccagacacgcatcaatcttcatccacgtcatgtaaagcacaaattaatcatggtcggaaattttctgtcttccactcaggattatgccatgctaataaaccaggtacttgacgatctggttacggtagaagccaccactgtggcgatccttcgcgagaatgatatttcacgggatttagccaaaaatgccgatatgatcctcacgtttgcgcaccgtcgacgggaagtaatggaactactgcccggcaagcaggtcgtctcaattagttttatcccttcggaagaaacacgacgggctctggcttctgttaatccactatcacatatcgtggtggtttcaatatttccagaatttacactattaatgaaagccggagtagaacgatttgcatctcatgtacagtcgataactgtcatcaacctggatgaccccaatctgccggagttactgacagaggctgatgtgctggtgtatgccaccggcgctgaatcactctccgcacagatggcaccggaaaaaatttgtttcgaataccggcatataccggacagcggtgaaattcagcgtgttatccggccattattacaacactcaatgacgccatgtcatgatactcccaacagaggctcctatgaaaatcagtga

SEQ ID NO: 242351 - DNA, 696 bp, Klebsiella pneumoniae; identical to SEQ ID NO: 150527

SEQ ID NO: 242352 - DNA, 681 bp, Klebsiella pneumoniae
atgggtgagcaagatggaattgattttgattctttcttttatgcatatcctaatgcatctccatttagtggtgaaaggacatttagcgcagaaagcaaaaaacctacgatctatttttggagaatccctgattcatcaggacttccaccaccgggaaaatactgccttaatagttatcttggcgatatttatctagatagtgtaaacgcagtcaggtttagcgttagtggattatgtataactgttaaggcaccaacttgtactgtaatggatattagtaaaaacattaccgtaaacttggggtctcataataaatcctcatttactggagtaggtactacaaccactgaagttcctttcacaattaatttatcaaattgtcagagcgtaggatccgtttttatgcaattcaatgccacggctgacaccaatgctacaagcggcaatcaaattatccagcttgacaattcgccaagttcagcaactggaattggcattcaaatattagatggtaataatactccagtaacattaaataattcttctcaaatctggtcgggcagtaaaggtagtcaaaactcttacagttttcaatattatgccagatatattcaaactctctcttccgtaagtgctggagaagccaatgctgtagctacatatgtattaacttataactaa

SEQ ID NO: 242353 - DNA, 129 bp, Klebsiella pneumoniae
atgatgggcgctggcgataaatgtaaatttagacgcttaaaatataagcaaaaatcgagcccgttcacgcatgaaacgggcaaatattcaggcaatcaacgtatcgttaagcagatcgaccagcagtag

SEQ ID NO: 242354 - DNA, 234 bp, Klebsiella pneumoniae
atggctagcaaaggcattgaaaacttgattaaagatgcactggaaaacggttgtcacgttgtccgtaaagcgcaccgttttgaagtaagcaagaaaggtaaaaagtcaatcacattagttatttgtgaagatggaaccgcttaccgcggagacgtagatctgacgatagccaacgctattcgtactcaaaaagaaatgcgcgcaatccttggtttgccagcgaagcacatttaa

SEQ ID NO: 242355 - DNA, 180 bp, Klebsiella pneumoniae
atgagccactatccgcaccttttcagtccgttgaccatcaacggtatgacgttaaaaaaccgcattattatgccccctatgggcaccaatatggccacgctcaatggcgaggtgtcgcaggaacagctggaatactacgaactgcgggcggctttgttgaataaatcgaacttttgctga

SEQ ID NO: 242356 - DNA, 678 bp, Klebsiella pneumoniae
gtgctgctgcggatccacactctgcgggaaggcgtccgcgggaactttggcaccatcaccatcgccctgaccctgatgtgggtcctcttcaccttgatgctgttgctctcctggctggtgatccgccgcatggtccgcaacatgagcgttctgcaaacctctctggagtggcaggcatggcatgatgccttgacccgcctgctcaatcgcggggcgctgtttgaacaggcgatggcggtagccagcgactgccagcgcagcggacggccgctggcggtgatccagctcgatctggatcattttaagcacatcaacgatcgctatggtcatcaggcgggggacagggtgctgtcgatggtggccagtacgctgtccagcgcggttcggcagggcgatctgctgggcagagtgggcggagaagagttttgtatagtgatgccgaataccaccctgcaggaagcggcggcggtggcggagcgattgcgccagcgtattcagggacgggaagtctttttgcataacaacgtgacgctgcgggttagcgcctcgttaggggtgagcgccagcgaagagcggggggagtatcagtttgaagcgctgcagtcggtggccgatgggcgactctatctggccaagcaaaatgggcgtaaccaggtctgttttcgcagcgcagcgtga

SEQ ID NO: 242357 - DNA, 1305 bp, Klebsiella pneumoniae
atgaaatttcccggtaaacgcaaatctaaacactattttcccgttaacgcccgcgatccgctgctgcagcaaattcagccggagaatgaatccagcgtctcctgggtggtcggtatcgaccagacgctggtggatatcgaagcgaaagtggatgaggcgtttatcgtgcgctacggcctgagcgcgggccattcgctggtgattgaagatgacgtcgccgaggcgctgtaccaggagctggtgcgcaacaatctcattacccatcagtttgccggcggcaccatcggcaataccatgcacaactactcggtgctggcggacgatcgctcggtgctgcttggcgtgatgtgcagcaatatcgaaatcggcggctatgcctatcgttacctgtgcaatacctccagccgcaccgatctgaactatctgcagggcgtcgacggcgccattggccgctgctttaccctgatcggtgacagcggcgagcgcaccttcgccatcagcccgggccacatgaacaagctgcgtccggaaagcattccggaagcggtgatcgccggcgcctcggcgctggtgctgacctcttacctggtccgctgcaagccgggcgagccgatgccggacgccacgatgaaggctattgagtatgccaaaaagcacgatgtgccggtggtgttaaccctcggaaccaaatacgtgattgccgataacccggcgtggtggcaggagttcctgcaggagcatgtctctattctggcaatgaacgaagaggaaggggaagcgctgaccggctttgccgatccgctgtcagcggcgaataaggcgctggactgggtcgacctggtgctgtgcaccgccggcccggcgggcctgtatatggcgggcttcaccgaagaagaggcgaagcggaaaacccagcatccgctgctgccgggggcgatcccagagtttaaccagtttgaattcagccgcgcgatgcgtcaccaggattgcgttaatccgctgcgcatatattcccatatcgctccctatatgggcggccccgagaagatcatgaacaccaacggcgcaggcgacggcgcgctggcggcgctgctgcatgacatcaccgccaataactaccaccgcaataacgtccccaactccagcaagcacaaatgcaaatggctgacctactcctcgctggcgcaggtgtgtaaatatgccaaccgcgtgagctatcaggtgctgaaccagcactcgccgcgtttaactcgcggcctgccggagcgtgaggacagcctggaagaggcgtactgggatcggtaa

SEQ ID NO: 242358 - DNA, 1818 bp, Klebsiella pneumoniae
atgatccattccctctattccaacaaagaaatctttctgcgtgagctgatttccaacgcctctgatgcggccgataagctgcgtttccgcgcgctgtcgcagccggatttgtatgagggagacggcgagctgcgcgtgcgggtttcgtttgataaagacaaccgcaccctgaccatcgccgataacggtatcggtatgaaccgggaagaggttatcgaccatctcggcaccatcgccaaatccggcaccaaagcgttcctcgaatcgatgggttctgaccaggcgaaggatagccagctgatcggtcagttcggcgtcggcttctattcggccttcatcgtggcggacaaagtgaccgtgcgtacccgtgcggcgggcgacaagccggaaaacggcgtgttctgggaatccgccggcgaaggcgaatataccgtagctgatatcaccaaagccgatcgcggcaccgaaatcaccctgcatctgcgcgaaggcgaagatgatttcctcaacgactggcgcgtgcgctctatcatcagcaagtattccgaccatatcgcgctgccggttgagattgaaaaacgggaagagaaagacggcgaaaccgtggtttcgtgggaaaaaatcaacaaggcgcaggccctgtggacccgcagcaaatccgaagttaacgacgacgaatacaaagagttttataagcatatcgctcacgactacagcgacccgctgacctggagccacaaccgcgtggaaggtaagcaggagtacaccagcctgctgtatatcccgtcgcaggcgccgtgggatatgtggaaccgcgatcataaacacggcctgaagctgtacgtccagcgtgtgttcatcatggacgacgccgagcaatttatgccgaactacctgcgcttcgtgcgcggcctgatcgattccaacgatctgccgctgaacgtctcccgtgaaatcctgcaggacagcagcgtgacccgcaacctgcgcactgcgctgaccaaacgcgcgctgcagatgctggataagctggcgaaagacgacgctgaaaaataccataccttctggaaacagttcggcctggtgctgaaagagggcccggcggaagatccgagcaaccaggaagcgatcgccaaactgctgcgtttcgcaaccacccataccgactcctccgcgcagaccgtatcgctggaagagtatgtctcacgcatgaaagaaggtcaggagaagatctactacatcacagccgacagctatgcggcggcgaagagcagcccgcacctcgagctgctgcgtaagaaagggatcgaagtgctgctgctctccgatcgcatcgacgagtggatgatgagctacctgactgagttcgacggcaaagcgttccagtctgtcgctaaagccgacgagtcgctggacaagctggcggatgaagtagacgagtccaccaaagaagccgaaaaagcgctggagccgttcgttgagcgggtgaaaaacctgcttggcgaccgggtgaaagaggtgcgtctgacccatcgtctgaccgacaccccggcgattgtcactaccgatgccgatgagatgagcactcagatggcgaagctgttcgcggcagcgggccaggcggcgccggaagtgaaatacatcttcgaactgaacccggcgcatcagctggtgaaacgcgcggctgatacccaggatgacgcccagttcggcgaatgggtggaactgctgctggatcaggcgctgctggccgagcgcggcacgctggaagatccgaaccagtttatccgtcgtatgaaccagctgctggcttcctga

SEQ ID NO: 242359 - DNA, 339 bp, Klebsiella pneumoniae
gtgaaaggcctttaccgggttaatcacgccgaacagtttcagttcggcttcgtgcagccaggcctcacgtggcgtatcggcgaagtgggcgacatagccctggccggcgttattaatcagcatatcgacgccgccgaaacgcgcggcgaccgcggcggcgaacgcctcaacttccgcttcgttcagtacgtcacagcgccaggagaacacctcaccttctggatattcgttttgcaacgccgcatgggcgctagccagccgatccgggttgcggccgcaaaaggcgactttcgccccttcgcccagcagcaggcgcagcgtttcaaagccgattcctga

SEQ ID NO: 242360 - DNA, 423 bp, Klebsiella pneumoniae
atggcttatcagctgatttacaaaaaactgcgctatctcctgggcatactccgcatcggcaaactggctctccaccgggaaggtgtaggtggtgagccactcaagcagctgttcgccaaaggcgccgatcatctcggtctgcggatagtgaacgtgggcatcaacgaaccccggcagcagcagcttacccctcagatcgacatagcccttcaggggatgcagaaaggcttccccctgctgccatggcagcagggcgataattttcccctcctgcaggaacaacaggccatcatcgagatatcgggcctgggcggccacctcatccggggtctccgccacgccggcgatatcaaaaaatgcaccgcgcaccgcggtctggtaatccatcatcgaacctgccttctcttaacgctctgggaatag

SEQ ID NO: 242361 - DNA, 1278 bp, Klebsiella pneumoniae
atgaacaccgataacgcttccctgtacgtaaaatggctcaaacaagaggtcgccccggctttaggttgtactgaacccgtcgctatttccttcgcggccgcctacgccgcacaatatctggatcagccttgcactaaaattagcggttttatttccgccaatctttataaaaacgcgatgggcgtcaccatacccggcaccaccgtttgcggtgtaccgctggcagccgcaattggcgcatttggcggcgacccgcaaaagggattaaaaacgctggaagatatcactccgcgacacgttgaaatggcgcagaagctgatcgccaataacgccgttgatattgccgtcgaagagaccccggattttatccatctcgatttaaccctctctgctggcgagaattgctgtcgtgtcgtggtcaaaggaacccacaccaacgtggtcgaactttatattaatggccagccgcagccattaagcgaaaaacagaatacgcgcacccagcgcgaaacgctgcccactttctcgctacaacaggcttacgaatttattaatagcgtcgactttaatgatattcgctttattctcgacgccgcgcgcttaaactccgcgctggcggcagaaggcaaaacaaaaaaatatggcctgaacattaacggtaccttttctgacgcagtgaaaaacggcctgatgagcaacgatctgttaagcaaggtgatcatcaacaccgtcgccgcttcagatgcccgcatgggcggcgcgccggtggtagcgatgtctaacttcggttcaggcaatcagggcattacagcaaccatgccggtagtggtggttgcagagcatctcggcgccgatgaagagaccctggctcgcgctttgtctctctctcatctcaccgccatctcaattcattctcgttatacgcgcttatctgcgctatgcgcagcctcaaccgccgctatgggcgccgccgccggtatggcctggctgtttacccgcgacatcaacaccattaataccgcgattattaatatggtcagcgatattaccggcatgatttgtgatggcgcttccaacagctgcgcgatgaaagtctcgtcagtggtctccagcgcctttaaggcggtactaatggccatgcaaaatagctgcgctggcgccaatgacggtattgtctgcgccgatgtcgagcagactattaataacctgtgccgtctggtgattaaaccaatgactctcaccgataaagaaattatcagcattatggtcgctaaataa

SEQ ID NO: 242362 - DNA, 138 bp, Klebsiella pneumoniae
atgtcatccgatatcaagatcaaagtgcaaagctttggtcgtttcctcagcaatatggtgatgccgaatatcggcgcgtttatcgcgtggggtatcatcaccgcgctggctttgttgaataaatcgaacttttgctga

SEQ ID NO: 242363 - DNA, 792 bp, Klebsiella pneumoniae
atgcctgtttttgctctactcgcccttgtcgcctactccgtcagcctcgcgctgattatccccggcttgctgcaaaaaaacagcagctggcggcgaatggcgattttatctgcgactatcgccttgatctgccatgcttttgcgctggaagcacggatattccccggcggcgagagcgggcaaaatctcagcttactgaacgtcgggtcgctggtcagcctgatgatctgtacggtgatgactatcgtggcctcgcgcaatcgcggctggctgctgctgcctatcgtctatgccttcgcgctgatcaacctggccttcgccacattcgtgcctaacgaatatatcacccacctggaaaccaccccggggatgctggtgcatatcggcctgtcgctcttctcgtacgccacgttgatcatcgccgcgctgtatgcgttgcagctggcgtggatcgactaccagctcaagaataaaaagctggccttcagcagcgaaatgccgccgctgatgagcattgagcgcaaaatgttccacatcacccaggtcggcgtggtgctgctgaccctgacgctgtgcagcggcctgttctacatgcacaatctgttcagcagcgaaaatatcgataaagcggtgctgtcgattattgcgtggttcgtctatatcgtcctgctgtgggggcactatcatgaagggtggcgcggacgtcgtgtggtctggttcagcgtcgctggcgccggtctgctgacgctggcctattttggtagccgcgtgctgcagcagttcgtgagctaa

SEQ ID NO: 242364 - DNA, 789 bp, Klebsiella pneumoniae
gtggaacatatctccaccaccacgctgatcataacgctgatcgtcatggtgattatctctgcctatttctccggttccgaaaccggcatgatgacgctgaaccgctaccggttgcgccacatggcgaaacaaggcaaccgccccgccaagcgcgtggagaagctgctgcgcaagccggaccgcctgattagccttgtgctgatcggcaataaccttgtcaacattctcgcctcggcgctgggcaccatcgtcggcatgcgcctgtacggcgacgccggcgtcgcgatcgccaccggcgtacttacctttgtggtgctggtatttgccgaagtgctgccgaagaccatcgccgccctctatccggaaaaggttgcctaccccagcagcttcctgttggcgcccctgcaggtgctgatgatgccgctggtgtggctgctgaataccatcacccgcatactgatgcgcatgatgggcatccgcaccgataccgtcatcagcagcgccctgagcaaagatgaactgcgcacgattgtgaatgaatcccgttcacaaatctcacgacgcaatcaggatatgctgctgtcggtgctggacctggagaaggtcagcgttaacgacatcatggtgccgcgcaatgagattgtcggcatcgacatcaatgatgactggaaatctatcgtccgccagctgacccactccccgcatggccgcatcgtgctataccgcgattcgctggacgatgccatcagcatgctgcgcgttcgtgaagcctaccgtcggctttgttga

SEQ ID NO: 242365 - DNA, 630 bp, Klebsiella pneumoniae
gtgttctactccatcgtcatcccggaaatacgcgacattattctgcaaagcgaaggcttttgtcaggatatcgtgcaggcgctggtggccccgctgcagcaggagctcaacctcgacccgacgccggtggcccaccgcacccacggcctcaaccccggcaacctgattaaatacgatgcgcgtatcgccgccatcgattataccctcgcccatgacgatggcatctcgctgcgcaaccttgaccaggcgcaggtgatcctcctcggcgtctcgcgctgcggcaaaacacccactagtctgtatctcgccatgcagtacggtattcgcgccgccaactatccgtttatcgccgacgatatggacaatctggtgctgccggcctcgctgaaacccctgcagcataagatgttcggcctgaccatcaatccggagcgtctggcggcgatccgcgaggagcgccgggagaacagccgctacgcctcgctgcgccagtgtcggatggaagtgaccgaagtggaggccctgtatcgcaagaataaaatcccctgcctgaacagcaccaactattctgttgaggaaattgcgacaaaaatcatggacatcatggggctgaatcgcaggatgtactaa

SEQ ID NO: 242366 - DNA, 987 bp, Klebsiella pneumoniae
atgaaaacaaagacaagcttgatcctcaccgttgccgccctggcgttgtccggttccgccatagccgaagttaaaatcgcccttgtggcgaaatcgctgggaaatggcttcttcgaagccgccaacgttggcgcccaacaggcagccaaggagttaggtgatgtcaaagtgatctacaccggcccgaccactaccaccgccgaggcgcagatcgacgtgctgaacgggttgatcgcccagggggtggatgcgatcgccatttccgccaacgatccggacgcggtggtgccggtgctgaaaaaagcgatgcagcgcggcatcaaggtggtctcatgggactccggcgtggcgccggcaggccgtcagatccatcttaacccctcaaataacgccttaattggcgaaaccaacgtcaagcttgccgccgatgcgctgcaggcgctgaacgttgagaaaggcgaggtggccgtgttaagcgccaccccaacctccacgaaccagaacatctggattgaggagatgaaaaaggtgctaccgcagtatccgtcggtgcagctggtcaccgtcgcctacggtgacgatctgtcggataaaagctaccgcgaagcggtgggtctgctgaaatcatatccggacctgaaagtcattgtctcgccgtcgtcggtggggattgttgccgccgcgcaggcggtgaaggaccagggcaaaatcggcaaagtgtatgtcaccgggctggggctgccgtcggaaatggccggcgcgatcaagtccggcgccagcaaaagcttcgccatctggaacccgattgacctgggctacgccgccacctatctggccgacgatttagtcaaaggcacggcgaccaaaaccgaagccagtatgggcaagctgggcaaagtgaagctggacgccgaggggaatggcgcgatggccaagccgtttgtctacgatgcgagcaacatcgataagttctcgaaaattttctaa

SEQ ID NO: 242367 - DNA, 255 bp, Klebsiella pneumoniae
atgaatccttcgttaaccgattcccgccgtcaggcgctgcgttcagcttcccactggtatgccgtgctaagcggcgagcgcgtcagcccacaacaggaagcgcgctggcaacagtggtatgaacaggatcaggataaccagtgggcctggcagcaggttgaaaacctgcgcaaccagcttggcggtgtgcctggcgacgttgccagccgggcgctgcacgatacccgcctcacccgccgtcacgtgatgaaatga

SEQ ID NO: 242368 - DNA, 1455 bp, Klebsiella pneumoniae
atgagtaaaaacataatgcacagtcggcatgatgaatatcataaattaacccgcggagaacgaattggttatggcatgggcgactttgcgcaaaacctggttttcggcaccattgggggttttctggctttgcatatgctgacggtaaatactatcagcacggcaacggcaggctttatttttctttttgtccgcatcattaatgtgttttgggatccgatggtcggaacctacgtggataaacgaacctcgaaggcaggaaaatatcgcccctggcttttacgagccggcgtgccgctggtgatcctgtcggcattactgttcgcgccaatccccggagtgaaaggttcggtggctttcgcctttattatttatctggcgctggacctggtttattccttagtcaatattccctatggctcgctgaatgcctcgctgacccgcgacccggaatcgatcgataagctgaccagtacccgcatgatgctggccaacagcgccaacctgctggtctataccctgttcccgatgtttgtgcagatggcggcgccgaaagatcgtagcctgaaagacaccggctttttcggccttgagctgaatctgggcaactataccgatccgtcggcgaactacgcctggttcggcgtgtacgccatctatatgatcatcggcgcggtggccctgtttatctgctacaaatgcaccaaagaacgcgttgtcgcgaccgccgagcagaccgccaacgtcaaaactaccgaccttttccacgagctcagacataaccgtccgctggttattctcggcatgttctttatgctggcctttaccttcatgttcttcatgaacaccgttaacggcttcttcaaccagttcgtcgtcggccactccgaatggatgggcgccgtgggcctcgtcgcgtctattcccggcatcgccttcccggtgttctggccgaaactgaaaaaaatctttggtaaaaaaggcttcttccatctgttcctcgccatgttcatcgtcggcgaactgctgacctacgcctggtcccgcgaagggatgcacgacgccctgtggctggcctacatcgccacctttattaaacagtggggcttaacctccgccaccggctttatgtgggcgctggtaccggaagttatcgcgtacggcgaattaaaatctggcaaacgcaatgccgccattatcaatgccattatgggactcttcttcaagatcggcttcaccatcggcggcgcgatcccgctgtggctgctggcggtgtatggatttaatgaaagcggcgccgtgcagagcgccagcgccatcgatgggatcattatgaccgcggtgtggatcccaatcgcgctggccgctatttcgatggtgatcatgcaggtttatccgatctccgataaacatgttaccgacatcaaccgtcagctggatgagatccgcgtgtag

SEQ ID NO: 242369 - DNA, 156 bp, Klebsiella pneumoniae
atggttatgtcactgtttcattccgtgagcgacctgatcggtcatactcccctgctccagttgcacaaactggataccgggccctgcagtctgtttttaaaactggaaaatcagaaccccggcggtcaattaaagatcgggttgcgctgtcgatga

SEQ ID NO: 242370 - DNA, 1101 bp, Klebsiella pneumoniae
atggacctgacaattttttctgaaaatattaaatccacaggtttcatcttggaaaacaagatatctaagatattgatcagcaacaaatggaatgtaataaacaacaaatattatattgatgatgtagcaaaaatagccagagagattgatatcattgcctataaagccaccaagatagaagatatctatgtttatacttcactaataataagctgtaaaaaaaatgacgaaaaaatctgggctttactcacgaaagaattcaataaaagcgatcctaatattgagttggaaccattacagcattggtccaaccatccaataatagactatcaattacaagaagaaaaattaataaaagaagctatcccaacgggcgaactttacgaaaaattatttgagcctcacaaacaagtttttgctttccaagaaatgtcaaaaaaaaatggcaagcctgacaacgataaaaatatatttaattcaattacgtcattaatgaaatcacaatcatatgaaattagttcattatctaaaagaaaaaaagaaagatgtgtttatttctttcatctactatcaataatagatagcaatttaataacacttgattgttcagatgaacatatcgaacccaatgaagtaaattcacaaatatatataagcaactatataatcaatggtgaatccgtatcctcaaaaattaatttcatgacccctgacggttttaataatttaatcaagagttatcactctctgcataagcatgattgtcaacacatttcacgttgctttaatatatttttcaaagatgcattggaaaaaatagacaaacagaaaatccttgccaatgaactaaatagaaaattcgctagtaaaataagatctcttatttacagaaaaattaatatttatgataaatacgtaataacaagaatatcattatataaaggaaatatttatattgatattgacacaaaaaatgacaagttgattaacgcattagatggaaataaagaaattaaagatgaactagcaaagatgatagaagatatttctaaaacaaagataactggaactattaattttgaggatgatatcccattttga

SEQ ID NO: 242371 - DNA, 300 bp, Klebsiella pneumoniae
atgggtgacagtgcgccgcataaggcgctaagactcatcggaacaggtttggttattttattgccagtggtgctggcattgtggtttgcccagctgcgggctaaagccgaaaccattgatcaattacactcattttcgcagttggcgctgcaaaaaacggaaatggtcatccgggaagcggatcaggctcgggctaaagccagccagtatcgcggtgagttgtgttcagcggatcaccagcgttatttactgcatattgtgcgcggcctgctgtatgtggaagatctgaggctttgttga

SEQ ID NO: 242372 - DNA, 2220 bp, Klebsiella pneumoniae
gtgctgcaggctgccatcgcggccggcgcgccgaaggacctgattggctggatcgatcagccgtctgtagaactgtctaacgcgctgatgcatcacccggacatcaacctgatcctggcgaccggtggcccaggcatggtgaaagcagcgtacagctccggtaaacctgctatcggcgtcggcgccggtaacaccccggtagtcattgatgaaaccgccgacatcaaacgtgccgtagcgtccgtactgatgtctaaaaccttcgataacggcgtgatctgtgcttctgagcagtccgttgtggtggttgattcagtctatgacgcggttcgcgaacgtttcgccagccacggcggctacctgctgcagggtaaagagctgaaagccgttcaggacattatcctgaaaaatggcgtgctgaacgcggctatcgttggtcagccagcggccaaaatcgctgaactggcaggcttcaccgtgccggccaccaccaaaattctgattggtgaagtgaccaacgttgacgagagcgagccgtttgctcacgaaaaactgtctccgacgctggctatgtaccgtgcaaaagatttcgaagacgcggtagccaaagcagaaaaactggtcgccatgggcggtatcggccacacctcttgcctgtacaccgaccaggacaaccagccggctcgcgtggcttacttcggccaaatgatgaaaaccgcgcgtatcctgatcaacaccccggcttctcagggtggtatcggtgacctgtacaacttcaaactcgcgccttccctgactctgggttgtggttcctggggtggtaactccatctctgaaaacgttggtccgaaacacctgatcaacaagaaaaccgttgctaagcgagctgaaaacatgttgtggcacaaacttccgaaatctatctacttccgtcgtggctccctgccaatcgcactggatgaagtgattaccgatggtcacaaacgcgcgctgatcgtgactgaccgcttcctgttcaacaacggctatgccgatcagatcacttccgtactgaaagctgcgggtgttgagacggaagtcttcttcgaagttgaagctgacccgacgctgaccatcgtacgtaaaggtgccgacctggcgaactcctttaaaccagacgtgatcatcgccctgggcggcggttccccgatggatgcggcgaaaatcatgtgggtcatgtacgaacatccggaaacccacttcgaagaactggcgctgcgctttatggatatccgtaaacgtatctacaagttcccgaaaatgggcgtcaaagccaagatggtggcgatcactaccacttccggtaccggttctgaagttacgccgttcgccgtggtgaccgatgacgcgaccggtcagaaatacccgctggcagactacgcgctgaccccggatatggccattgtcgatgccaacctggtgatggatatgccgaaatcgctgtgtgcgttcggtggtctggatgcggtgactcacgccctggaagcttacgtttccgtactggcttctgagttctctgacggccaggcgctgcaggcgctgaaactgctgaaagagtacctgccggcttcctatcacgaaggttccaagaacccggttgcccgtgagcgcgtacacagtgccgcgactatcgccggtatcgcgttcgctaacgccttcctcggcgtgtgtcactcgatggcgcacaaactgggctcccagttccatattccgcacggtctggccaacgccctgctgatctgcaacgttatccgctataacgcgaatgacaacccgaccaagcagaccgcgttcagccagtacgaccgtccgcaggctcgtcgtcgttacgctgaaatcgccgatcacctgggcctctccgcaccaggcgaccgcaccgcagcgaaaatcgagaaactgctggcatggctggaaagcattaaagctgagctgggtattccgaaatctatccgcgaagctggcgttcaggaagctgacttcctggcccacgttgataaactgtctgaagatgcattcgatgaccagtgcaccggcgctaacccgcgctacccgctgatctccgaactgaaacagatcctgctggatacctactacggccgcgaattcgtcgaaggcgaagccggtgcgaaagcagaagttgctccggtaaaggctgagaaaaaagcgaaaaaatccgcttaa

SEQ ID NO: 242373 - DNA, 438 bp, Klebsiella pneumoniae
ttgtataatccacagacctcgttatttgacgatattgcggcggagcaccagctaaagccgattcactgcgtgctggtggatgaaagccagtttctgacgcgtgaacaggttcatgagctgtccgaagttgtcgatacgctggatattccggtgctttgctatgggttgcggacggactttcgcggtgagctctttaccggcagccagtatttactggcctggtcagataagctggttgagctgaaaacgatctgcttctgcggccgcaaggccagcatggtattgcgcctcgatcaggaggggcgtccttataatgagggtgagcaggtcgtcatcggcggtaatgagcggtacgtatcggtctgccgtaagcattataaagaggcgctgagcgtcggttcgttaaccaaggtacaaaaccagcaccgtccctgctga

SEQ ID NO: 242374 - DNA, 1392 bp, Klebsiella pneumoniae
atgcaggctattcttagtttcttaacggaaatattcagtcaacccgcctttttaatggggcttatcgccttcgttggtttagtggcgctgcgctcccctggcaataaactgcttaccggcacattaaagccgattttaggctatttgatgttgagcgctggggcaggcgttatcgttgccaatctcaatccgctgggcggtattatcgaggccggatttaatatccgcggcgttattccgaacaatgaagccattgtctccgtcgcccagaaaatgctgggcgtggaaaccatgagtattttgctgttaggctttattttcaacctgattatcgcccgctgtaccaagtataagtatatctttctgaccggccatcattcgttctttctcgcctgcctgttctccgccgttctgcaggcggcggagttccagggctggatgttgatcctgatcggtggattcctgttgggctcatggtcggccatctccccggccatcggtcagcgttacaccaggcaggtaaccgaagacggcgggatcgccatgggccatttcggctctctcggctactacctctcggcatggatcgccagccggaccggcaatccggcaaattccttcgccgataccgaaatttcagaaaagtggggctttctgcgcgataccacggtcaccaccggtatcgtgatgtttgttatctactttgtctgcagcgctgtcgccgggtcggcgtacctgagcaccatcaccgaccaaaacatgctgatcttctcggtgctgaccggtctgcagttcgccgttggcgtagccattgtctataacggcgtgcggctgatcctcggcgatctggtgccggcgttccagggcatcagccagaagctgatcccggactccatcccggccgttgactgcgcggtgttcttcacctttagccccaccgcggtggtagtgggattcatcagctcctttgtgggcgggctggtcgggatgctcttgctcggcgggctgggcatggcgctgattattcccggcatggtgccgcacttcttctgcggcggcacgtccggcgtcttcgccgacaaactgggcggtaagcgcggatgtatcatcgcctcctttatcggcgggatcttcctcgccttcctgccggcgatgctgctgccggcgctcggcaacctcgggtttgaaaacagcaccttcgccgatttcgacttcgcggtatggggcatcattatcgggaatgctttcacccagtttggtcagatcactatctatctgatttgtctggcgctgctcgtcgcgctgctggcgcctttctgcttccgtcacgtccaggtggtgggcaacacgctcagctatgaggagctgacggcgaagcagaaaaatgaataa

SEQ ID NO: 242375 - DNA, 456 bp, Klebsiella pneumoniae
atggctattttgtccattggatttgcttgtttcgatcagtttttctttctcaatgaatggccccaggagaataccaaaaacttttgtcatgattttattgaaagcggcggcggtccggcggccaatgcggcctggctgctgggattatggggcgaggaggtttattacattggtcatctgcagcaggacctttacggtcagcgcattatcgatgagtttgccgaggcgggggtggataccagccaggtggttttctccgatgacatgatcaccccgctggcctcggtgctggtcaatcgcttaacgggttcgcggacgattattacccgcaagatgcaaacgccgccttccctgacctacgagcaaaagctcaaactggacgacctcgccgagcgactgattgccagcgaggagccggtcaccattttaattgacggccatgaggggctttgttga

SEQ ID NO: 242376 - DNA, 1467 bp, Klebsiella pneumoniae
atgggctgggctgatgacaccatggaattaccggataatgggctgatcaaaaaatgcactcacctcgtttcatcccacgaacaaagactttgtttcccgctggattcaatttgccgcagcgacggaacttacccaagttatgctacggaagtggtttatcctggaatgcactccgatattggtgggggatatcccccgggagatcaaggaaaagcagtaggtcataatgatagtaatttactttcgcaaatagctttacatgatatgtatgcatcagcttttgaagctggtgcaccattaaaagtatcgccccaatcgttacctaaagagcttttatctcaattatggcgagcaatgccgccagagttgcaattagaatttactatttctgaatcgttagtggaaagattcaatgcctggcgtgagtttactcttaatttatcttcagatagtgctgaagcttctactgatgcattccaatataaccccattcgtgcaagttcaaatgtcattacagctctagaaaatcaactcggctggattacggcatggcgtatcgggcgatatgtaaacggcgcttataaatctcaaggattttacaaatcttcaggtgtcgcgtggcaaaataaagactcagacccggccactctggctgcatctaaggctgagcaagaacagaaacaaaaagatgtggatgatgagcgcctgaccgctattgtggataacaggtttaaaaagttcacgccattacctcctggcccaaaagattttgacccggctatcgctcaggttcagctaagacaggcggcagaagaattcaatgctgattacctgtctaagccacgccccgttacggggaactggaaatatacgatgtctcagcaattatctaatgtgatatactccttcagtgagaatgatttctctgttgagtatgaacgcatcaaaagttcaggtgacagtaaatttaacaaactgtttccgaagcaatctgctggagaaaccgctcaatcgccagacagtctggtcagatcattatttgacgatcaggttcatgactcacgcgcctggtttatgcacgcaacctttggtgacagagaaccctggggaagttacttcctttatcggatgattttctttggggagttgatgagtaaaaatgtttcattgatcgctaaatatggccggtttgttgaaggccaacttaaatcagcgataaaaggagccagtctcatttttgataacacgactatcaacagtaatatttcagatgaaatcacatctggtattaaacaagtgatctctatcatccctgcttcggcaagtgggcctgaagttattaatgcagaatctactattcaacctgcaatgacaaatggaattgcgccattgagtagccagacacgtaaaaccctggatgctgcgaaactggccgaaaccaaagctgatattcttaaaatatggtga

SEQ ID NO: 242377 - DNA, 258 bp, Klebsiella pneumoniae
atgaaacatattatcaggcagggtgattcgctaaaagagtatggtggttcagttattggcggtcactatctttattttggtaaaggtattgctgtgaaaggtgatgcggtgaaatgtaataagcatgggatgacaaagattgtcgaaggtagctctctgacaaaagttgacggtcaaccagtagcattacatggtcatcgctgcgcatgtggttgcacgctggtgagttccaaccccgattgcagggttgcgcagtga

SEQ ID NO: 242378 - DNA, 732 bp, Klebsiella pneumoniae
atgcgtgtacactttatcgtacatgaaagttttgaagccccgggcgcatatgaaacctgggcaataaaccagggtcatgatgtaacttactcacgcgtctatgcaggcgatcggctacctgatgacgccgtaggcatcgattttcttatcgttatgggcggtccgcaagatcctgacaccacgcttgaagagtgcccacactttaatgctaaagcggaacaggcgctgattgcttccgcggttaaaaccggtaaggcggtgatcggtatctgcctgggttcacagctcattggtgaagcgctgggcgcgccgttctctcatagcccggaaaaagagattggtaaattcccgatcacattgagcgaagacggcaggaaggatgagatgttctctcactttgggaaaacacttgaagtgggtcactggcataacgatatgccaggtttgacgccagaggccaaaattattgcttacagcgaaggctgtccgcggcagatcgttgcctattcagaccgcgtctttggtttccagtgccacatggagctcacattggacgttgtagaacggctgatcgctcattctgagaaagacctgagccgtgcagcagaatatcgtttcgttgacacgcctgaagcgctccgggcgcacgattacagtgaaatgaatcaagtactttttggctttttggctttttggctttttggctttttggctttttggctttttggataa

SEQ ID NO: 242379 - DNA, 801 bp, Klebsiella pneumoniae
atgttattatgctttggtaagagggaaaagtcttttatctccaaggaatcaatattaatatcattgactttccccggtgtgttatattatttggggttgtttactaatgaacaatttagtttgattatgtctatggtttcaatgtactttatatcggcaggggtgtttgtcacaataatattatgtgcgttgattttcatattggatgctggcaatgcagtagtttttacaatggtcgtaggcttatatcattcttataggtatttatcccgactgttgacgttaagaaaaattatttttatttcattgctcattgttgctgtttgctttactctcaacaccaaagcattagatttttttaactctcttccaataattggccaaaaagcggatgcgatgtctgagcagttagatgggagcgattactatgcaaaatatcctttattattacgacctgtaattacatatatgacatttatatatatgtctccggcatatatcaagtctatccctttatatattttttttattatgttcacaatctattcaattagaaaatcctcggcgcaacatagtaatgttgattcacctgatttgaaaattttccttttggcatttttcaccagtacattgtcgcttgtttatatgttcccaacttatagtaacgcaaagtattatatttttgcctttcctgcaataacacagtattttattaatagtgttggagcaaatagagtttatcttttttatctaatcatgactgtttttctatttgttaatttattattgtatacactctag

SEQ ID NO: 242380 - DNA, 813 bp, Klebsiella pneumoniae
atgtggtttttttcaagaagagaactcattgcaaaaatattgccattaactttctttattaataataccgaagcgagtacaaccactgaagagaatgttccgaaagaatttataaatgttcaatgctatgatagtcttcgacaaataaaacctaaattcgttggacagcgcatatacttaaagtcttactatcctaatagcattcatggcggtggtatattcgttgcaattgcagataataaagaagaagactatggtgtaacttgtaaagttaatgatgactgggcttgggttcgaataattgacggacctataactccatatatgtttggagccttcgctgatggaattagcaatgattcattatatatccaaagagcagttgattactatgacggtctctactccactaacgaccgtgctccaagaggagagatttactttcccgctggtatctattgtattggagacacaatcactgtccgaaatgggcccataagttggcgtggggatggaatatggaatacgatctttgttccacttcaaaatgatagccgctatgacaatacatttttgtttaagttcgaaaatgaaaagtggagcagcaatcagtcaagatatttacatgaaataatgctatgtaaatttagtgttaaaggaaattatataaataggtcagctttttatttggggggatgtggttgggattgtattattgatgctgtgcacatatggggagttggtcaagccgcgtttgtttgttatgatttgatggatacaacttttagagatgtcaggggctttgttgaataa

SEQ ID NO: 242381 - DNA, 729 bp, Klebsiella pneumoniae
gtgacgcactcctcgaagaacgcggtggaaaaccacttcgatacctcctacgagctggaagccctgctggaacagcgcgtgaagcgccagctgctggcggaagtgcaggccatttgcccgccgggcgtaaccatcatgaacgtgcgtcaggcgcagccgctgggcctgggccactccatcctctgcgcccgcccggtagtcggcgacaacccgtttgtggtggtcctgccggatatcatccttgacggcggcaccgctgacccgctgcgctataacctcgccgctatgatcgcccgctttaacgagaccggccgcagccaggtgctggcgaaacgcatgccgggcgatctctccgaatactccgtcatccagaccaaagagccgatggtggctgaaggccaggtggcgcgtatcgtcgagtttattgaaaaaccggacgagccgcagaccctggactccgatctgatggcggtggggcgctacgtgctgtcggcggatatctgggccgaactggaacgtaccgagccgggcgcatggggccgtatccaactgaccgacgccattgccgaactggcgaagaagcagtccgtcgacgcgatgctgatgaccggcgaaagctacgactgcgggaagaaaatgggctacatgcaggccttcgtcacctacggaatgcgtaacctgaaagaaggcaccaaattccgcgaaagcattaaaaaaatgctggcctga

SEQ ID NO: 242382 - DNA, 672 bp, Klebsiella pneumoniae
atgcgtgatctgatccttcaactcagcaaaagttcgatttattcaacaaagccagtcaaaacactactttccggcaccacggtaaataactggcaaagcaaatacgaccagctcaggaaggagagagacgcttacgcggctattagcgagaaaatcacctttctggaacttgaagataacgccgactgggaagctgtaaagcagcagtttctggataaggtcgccctgctggaaaaagcgcaggaagaaaaagagtatcaggctgagcttaagcgtcagattagggaagaaaaacagcgtcaggatgaactggaacagcagcagcgcgaagcggaagaagaggagcaacgccttgctgagcagcagcgtttactggaggaagctcttctcgccgctgaaggcacacaccgggaagagctggaaagacagcgtctggagctggagcagaaaatccaggacgtacatcagcagtatgaacgcgccaaatccatggcccagctcaccaggcaaggatatgtgtatatcatttcgaatatcggctccttcggtgaaaatgtcttcaaaattggtatgacccgacggctggagcctatggaacgagtaaaagaactaagtggggcggcggtaccttttgattttgacgtccatgctatgatttcctgcgacgggtaa

SEQ ID NO: 242383 - DNA, 423 bp, Klebsiella pneumoniae
atgttaaaaaagactcatatcatcagcggattattgatcgcccctttaacgttatatgccgcaacatcatatcaagttgatgatatccgttttgaagggctacagcgcgtgaccgtcggggcggcgctattaagtatgccattgcacgcgggagatgcggtgacgccagaagatgtcagcgaggcagtgcgcgcgctgtatgcgagcggcaatttcgaaaatgtgcagatcctgcgcgatgggaaaacgctggtggtgcaggttaaggaacggcccactattgccagcgtcagtttttccgggaataaggcagtgaaggatgatgcgctaaaggaaaatctcaccgcgtccggtatttctgcaggtagtgcactggatcgaaattcgcttagcgaaatagaaaaggggttgcaggatttctag

SEQ ID NO: 242384 - DNA, 261 bp, Klebsiella pneumoniae
gtgttggcaaatctggaagtaaaatggctgtatgatgtgattgcccttgaggagtcgcgcagctttaccctggcggccaaagcccgcaacatctctcagtcttcgttcagccgacgcatccagtcgctggaggcttccctcggattcagcatcttcgatcgtagcgccaaccctctgcagctgaccaaccgcgggaaaatttttgtcggctatgcgcgaaatatgctcgatgacggtgatgctgccaacttactgatttag

SEQ ID NO: 242385 - DNA, 258 bp, Klebsiella pneumoniae
gtgggcattgtgcaggtccccacgccgccgatggggctgtatggtgggaaactgaccaacctggggaccccggcggcgggcaccgtcgtgtcggtaccaaaccagccgtcaaatgaatatcgcgcggtactggtgctggagagccttggctgggtgaaaattaaaccagacagcgatccggccactttttcgcagcgtaacatcgtagataatccttacaaaattgtggctttgttgaataaatcagatttcgggtaa

SEQ ID NO: 242386 - DNA, 300 bp, Klebsiella pneumoniae
atgagtttttccgtcgacgagctggcgagaatcgccatagatttacaaagtgatattggtcacaccgaccgcttttcgcgcctgattactaccctgcggcaaattcttggctgcgatgcctcggcgctgctgcgctatgaggcgcatcagtttgtgccgctggcgatcgatggcctggcgcaggatgtgctcggtcggcgctttgccctggaaggacacccgcggctggaggcgattgcgcgcgccggggatgtggtgcgcttcccggcggatagcggcccgacccctatgacgggctga

SEQ ID NO: 242387 - DNA, 135 bp, Klebsiella pneumoniae; identical to SEQ ID NO: 237641

SEQ ID NO: 242388 - DNA, 537 bp, Klebsiella pneumoniae; identical to SEQ ID NO: 212326

SEQ ID NO: 242389 - DNA, 306 bp, Klebsiella pneumoniae
atgtggtcctgtcccatttgcactctgatcatacgggagcaattggtcgcttcccccatgctacgcatgttgtccagaggcaagagtatgaatatgcctttgcccctgactggtttacttcgggagcctattgccgacgcgatttcgatcgtccccaacttaactggctatttccgaacgggttgtccgatgatcactatgacctttacggtgatggcacgttacaatgtattttcaccccagggcattcaccgggccatcaatcttttcttatccgcttaccgggtggtacaaattttacgctag

SEQ ID NO: 242390 - DNA, 1848 bp, Klebsiella pneumoniae
atgagacgaatactgacaacgctgatgatcctgctggcggtcattgtcgccgggcttacctcgttggtattgctggtcaatcccaacgattttcgcgcctatatggtgcatgaggtggcagagcgcagcggttatcagcttgaccttgatggcccgctgcgctggcacgtctggccgcagctcagcattctcagcggacggatgacgctgaccgccagaggcgccgaagagccggtgatccgcgccgacaatatgcgcctcgacgtggcgctgctgccgctgctctcgcatcagctgcaggtgaagcaggtgatgctcaagggcgcggtgatccagctgaccccgaaaaccgaggcggttcgcgacagctcagcgccggtggtgccgcatgacaacaccctgccgctggccccggaggatcgcggatggtcctacgatgtgcgtcagctgcagatggccgacagcgtgctcttcttccagcatgagaacggcgagcaggtgaccgtgcgcgatatccgtctgcagatggagcaggatgagaatcaccgggccaccgtggatttctccggccgggtgaaccgcgaccagcgcgatctggcgctgaacttctccgccaccgtgcagggtggcgattatccgcactccttaaaagccgattttacccagcttagctggcagctgcgcggcgccgagctcccaccggacggcattaatggtcaggggagtctgcaggccagctggcaggaagatgacaagaccctgcgttttgacaacctgaatctgatggctaaccgcagcaccgttaccggcagcggcagcgtggtgctgggagaccgcccggactggtcgctggatctgcacgccaccactctcgatctcgatagtctgctggcgcaaaggtcgccggcgacggacagtagcgccagtcagcagggccagagtcagacgcgaccgctgcgcccggtgatcgccgacagcgatgagcgcgaagattaccagagcctgcgcggcttcaacggccgaatggccctgagcgccgaccagctgcagtggcgcggtctgaactttacccaggtgcagagcgaaatcagcaaccagcaggggctgctgacggtcagcaaaatgcagggcaatcttgatggcgggcagctctctctccctggcaccctggatgcccgcggcgacacgccgctagcgacgttccagccggcgctgcagaatgtggagatcggttcgctgatcaaggccttcaactattccttaaacctgaccggcaagctgtcgctgagcggcgaattttccggaacgcgcattgacgccgatgatttccgtcgccactggcagggacaggctcagctccagatggccgatacccgcaccgaagggctgaacttccagcagctggtgcagcaggccgtggagcgcagcaccaacgtgcgggcgcaggaaaattacgacaatgccacccgcctggattccgtgagcagccggctgacgctggataacgggctggtgacgctgaaccgcctgcagggacagtccgacgtgatggcgatgaccggcgaaggacagctcgatctgcagaaagagaactgcgatatgcgcttcaacgtgcgcgtgctcggcggctggaaaggggagggcaagcttatcgaccgcctgaaacagaccgctatcccgctgcgcatctacggcgagtggcagtcgctgagctacagtctgcaggtcgaccagatcctgcgcaaacagctgcaggatgaagcgaagcagcgcctcaacgactgggttgagcgtaataaaggcagcaaagacggcaacgatgccaaaaagctgctcgataagttgtaa

SEQ ID NO: 242391 - DNA, 570 bp, Klebsiella pneumoniae
atggcccagcatgacgaaaacgtcgtctggcatgcccaccctgtgacccaacagcagcgggaacagcatcacggccatcgcggcgtggtgctgtggtttaccggcctttcggggtcgggtaaatccaccgtcgccggggcgctggaggaggccctgcatgagcgcggcgtcagcacctatctgctggacggtgacaacgtgcgccatggcctgtgcagcgacctgggattcagcgatgaggatcgcaaagagaacattcgccgcgtcggcgaagtggccaggctgatggtcgatgccgggctggtggtattgacggcatttatatctccgcaccgtgcggaacggcagatggtgcgcgagcgcctcggggaaggacgctttatcgaagtgttcgtcgataccccgctggccatctgcgaggcgcgggatccgaaaggattgtataagaaagcgcgggcaggggaattacgcaatttcaccggcatagactcggtctatgaggcaccggaaaaggcggaaattcatctggatggtgaacaattggtaacaaatttggtgcggctttgttga

SEQ ID NO: 242392 - DNA, 417 bp, Klebsiella pneumoniae
atggcggcactaccggacaaagacaaactgttgcgtaactttagccgttgcgccaactgggaagagaagtatctttatatcatcgagcttggccagcgtctggcgccgctaagcccggaagaacatagcgtgcagaacattattcagggttgtcaaagccaggtctggatcgtgatggaccaggatcccacaggcgtgatcaccctgcgcggcgatagcgatgcggcgatcgtcaagggtctgatagcggttgtgtttatcctctatgaccggatgaccgctcaggacatcaccgagttcaacgtgcgtccgtggtttgaaaaaatggcgctcacccagcatctcaccccctcccgctcgcaaggcctcgaagccatgatccgcgcgatacgcgcgaaagcggcaaatattagctag

SEQ ID NO: 242393 - DNA, 159 bp, Klebsiella pneumoniae
gtgggcgtgaagaaaggcgaaccggccctgctgaaagccgtcaacgatgagctggtgaagctggagaaaaccggcgaagccgcgaaaatctatgatgtctggtttggccctgccactaaaacgccgcagccgcgcgcctttaccatagaagcgaaataa

SEQ ID NO: 242394 - DNA, 690 bp, Klebsiella pneumoniae
atgaacgctaatctggcggtgatcgccgataacctcgattacctgctgtggggccgactggcggagggccagcccggcggcgtggcgctgaccctgctgatggccatcggcgccaccctgctggcgctgccgggaggcattgcgctggcgggcctggcctggcgctacggcgggctggtgcggcgtctgctgtttctgtgggcggaaattatccgcggcatcccgctgatatttgtcatcttctggctgtggtatctgctgccgatgctgaccggcggcgatctgcccggcgcggtgaccgtgaccctggcgctggcgtggtttaccgccgcctcggtgatgcactcggtgctggccgggctgcagtcgctgccgaaaggacagtatgaggcggcgctgacccaggggttcgctcccgggcaaacgctgcgcctggtgctgctcccgcaggcgctgcgcaacgttcagccgtcgctggtggggatctttatcggcctgctgaaggacacttcgctggcgtttatcgtcaatgtcccggagctgaccaccgtggccggccaggtcaacaaccgggtgcagatctatcccctggcgatcttcgtcttcaccggcgcggtgtactacctgctgtgctgcggtctgagcctgctggccagccggcgctttacccgccgcgcgaccaccagataa

SEQ ID NO: 242395 - DNA, 222 bp, Klebsiella pneumoniae
atgccaatgaaatttaagcagattcaggcatttattaccgtcgcccgcgaaggcaatatgaccctggccgcagagaaaatggggatcacccagtcgggactgagccgactgctattgagcctggaagcggacctgagcgcatccttattcgaacgacataagcacggcatggcgttgagcgaatatggcagcgcctttttaccctacgcgcggctttgttga

SEQ ID NO: 242396 - DNA, 156 bp, Klebsiella pneumoniae; identical to SEQ ID NO: 242369

SEQ ID NO: 242397 - DNA, 153 bp, Klebsiella pneumoniae
atgctcaatcaagaactggaactcagtttaaatatggctttcgccagagcgcgcgagcaccgtcatgagtttatgaccgtcgagcacttgctgctggctctgctaaggaaggtgcgaataagcaggtcatttcttcccaagctgactcgctga

SEQ ID NO: 242398 - DNA, 222 bp, Klebsiella pneumoniae
atgcagcattcaacagagcatgaaaatatattattaagaaatctatggattgataaaaaaataccaccattagaatattgttcatttgaacgcgcttccagactattagaatgcgagattgaagatttattacacctatacgaaataggtacttttaatattgcattcaagtcggatggacttgcagttagatttaatgtcaacttcggctttgttgaataa

SEQ ID NO: 242399 - DNA, 624 bp, Klebsiella pneumoniae
atgtattgcgaaggggtcaaccatttctggctcgatcttcagtggtatctctggcaggggctcagccatgccggttacccctgggatacctggacagactccgtcctgttcgatctgcggctgctgcttaaacgcctcccgggccttgaagggctggcatggaatgacggtaccccctttgctgacgaagtcaccaccgcctggattgcggaaaaagtgaatgaagaaggcctgatatacgacaatgaactcgctaccgtcgttaatggtcaagctgatgatgtgctgctccttgagtcggaagccatggaaaagggcgacacggatggtcccgaagcggcgcttacctggctccagtcccgaccggggatagacacaccacgccatcgctggctgatacgcctgctaatggcccgggtggcagagcaatatggacgaaacgatatggcgcttcatctgcttggcgaactaactacctgtgcgccacagctgacgctgggagactgggaacccgatctgttgtttgaagtccaggcccgccgactgaagctgttacgtatgaaagctggtcgcagcgaatctgataaagcccgtttgatgcctgagatgggctttgttgaataa

SEQ ID NO: 242400 - DNA, 900 bp, Klebsiella pneumoniae
atgagttcaccggaagatctgttaaccgcctgcgccgccagccaggaagaaaggcagcgcctcacctcccgggcaaatgatgccctgtcgctctgggataactggctgcatccgttcacctccgggtctgaaaccggggacgatcccgcatacgatgataattttcagctgatgcgtgaagagatcaataagctttcaggtaccgattcagcgttgttgtgcgaactggcccggaagtgtctttgcgaatgcgccaaagacattcgtgtcgtgacctggtacgtgcagacccgactcagccgcgacggtgaaaaagggttggccgaaggtttactactgcttgtcgcgatgctgactcgctacgggcaggcatgtcatccccagcgtcccgtagcccgtaaagctgcgctggagtggctgaacagtgcaaaagtgattgatgcactgctgttatggcctgaggtagaccgcaatgatgctggtctgacggctggcgctataagcctgcttgcatccacagtggcagactggccggaagccgagaaaccgtcttttgcaggcctttgtaccgctcttgaaaaccgcctggcacgttcgggtggcatggaagtgctggtcccccagaacagcagtgctcaggagcaggggcatgaaccagcccattcggattcaccgcaactgtcagccgtgaaatctggccgcgatttactcgacaaggcaaagttactttcccgctggctgagcgaacaatctcagggttggctggcttctcaccggctgattaagaccgtgcggtgggatacagtcgatcagatcccccctctcgacagtagcggccgcacccgcctggtaccgccgaaacccgagtatcgcgctcaacttaagcggctctatatttag

SEQ ID NO: 242401 - DNA, 3372 bp, Klebsiella pneumoniae
atgactaaggtaaaagtcaaaacactcatcggctctgttgtcactgtcgctttttttatgacggtcatcgtggcatttttgttatatgcctttccggaaaacgtagcttcggccacgggattcggtccctatgacggccagcgcatactcacattctgcgccatactggttgccgcgttgtttttactcggctggctgacagagaaggcttttgacatcgccggtaaatccggattgtatttccactggggacagaaaaagtctcagattaccgctccggtgacgaacaccatcgccagtgaagacgacgacgaacaacctgtcttcagcgaagaggcggtgtccgagcacctgcggtttcgctatgggcgccgctggcagcgtaaggtgcgactcctgctggtgatgggtaatccggatgacgtccagaaagcggccccgggcctgtgtcatgacctctggcaggaaggcgacggcaatgtgctgatttatggcggtgatgcgcagtcacttccggataagatcttcctttcaaaactgaagcgtctgcgatctggccagccggttgatggcatcattcaggtgatgagtacctcagccctcccgacggatagcgaacgggatgccttcttgcgttgccgccagaaagccgaccacctgttaggctggcaggcgcctgtctggctgtggctgactgataaggcagcgggtgctcagcaggacgcggaaacggctgcgacaggggtcatcttcgggccggaaggcaccgtaaaagaggctggtaaggcattgactacgctgtctcagcaccttcaaaaagccggtatggcgcagatactgagtaatccggcgcatgatggcctgctgcagttatcctcccgcctgagacatgaactaaaaaccagtctgaccgttttgctcagcggactgatgcagggatctgcggcctggcgtttacgcggtgtcatgttcagtcctgaaccggctgttgccggaacggtgccgaacacgcgcctcgacacgccgacctggaaagccgtcattgatgacagcgatgccgtcagaggcaggaaactgggcttcaactggctgaagatgctgcggttaatcctgctttccctgatagtcctgtggggggccggtacactgctgtccctcgtcgttaaccgtacccagatttatcaggcgcaggagacggccaggcaggcagcggatactgcaaaaccactggctgaacgcctgcacaaccagctcgtactacagcaagccattgcccgtctgcaacatcgcgaagcgaccggcgctccatggtacacccgctttggtcttaatcaggacagcgacacgctggctgcactctggccgctgtatgcgaaaaacaacgtacagctgatgagggatgccacagcagaccatctcaagcagcagctgaatgcctttgtgcaacttcctcctgccagtgatgcccgtacgcagggcacacagcatacctgggacgtgctcaaaagttatctgatgctggcccgtccggacaaagcagacgcaagctggctggcaaaaaacgtgctgacggcctggccgaaacgccagaatgtgccggatggcacatggcaggacctggcaccaaaactactgggtttttatgcgcagaacctcccgtctcatccggaatggaaaattaagcctgacgctgaattaatcagcacggtccgtcagatcctgctcaagcagattggccagcgtaacgctgagtccgggttgtaccaggacatgcttaagcgcgtggccagcaactggcctgatttaacgcttgccgatatgaccggcgataccgatgcctcaacggtattcagcactgacgaagtcgtcccgggtatgtttacgcgccaggcctgggaagagcaggtacaggatgcaattaacgaggtcgttaagacacgacgtgatgaaatcgactgggtcctgacggataaaacgcaccaggcaggaagtgatatctccccggaggcgctgaaggcccgcctgacagaacggtattttaccgattttggtaatgcctggctgaacatggtcaacagcattcagtggcaggaagccacgtctctttctgaagcaattgcccagctcagtctgatcggcgatgtccgtcagtctccgcttgtggccttaatgaatacgctggcctggcagggaaaaacaggagagaagggtgaggcactggctgattcgatagtggattcagcgaaaaaactggttggtcggaaaaaatatacccgacagttcattgagcaggcgcaggggccgaaaggtccactggaggacgtttttggaccactgacgggatttatggaaggtaaagagggcactggtagcaacggtaacctcagtttccagtcctggctggcccgcgttacccaggtgcggctgaagcttcagcaggtcaccagcgccccggatccgcaagcgatgtcgcagatgctggcacagaccgtattccagggtaaagccatcgacctgacggacacccgcgattacggcagtctggttgcggcaagcctggggcaggagtggaacggatttggtcagtcgttgtttgtgcaaccgctggatctggcctggcggcaggtccttgccccggcagcgggtagtctcaatacccgctggcaatcgaccattgtcgaacagtggaataaggcctttgcggggcggtatccgtttaaggccaccggcagcgatgcctccctgccgttactggctcagttcctgcgtagcgactcgggtcgaattactaacttcctgaaaactaatcttggcgggatcctccaccaggagggaaatcgctgggtcgttgatccttccgcaagtcaggggatggttgtcagtccggatttcctccgggcgattaatcagctggcagagctgtctgatatcgtgttctctcagggcgatgcaggtattcacttcgaactgatggcgcgtccttcaaaggatgttgccagagtgcaattgaccctcgatgagcagaacctggactacttcaatcagatggaaagctggcaaagcttcacctggccggggaatagctactatccaggcgtatcgttgagctggcgtagtgtaaacagtggtatgcaactctacgccagtcaccagggtaactggggcttcattcgcctgctggacaaagcccggctcactcctcttgatgccagccggacgcaactggtatggatcaccccggatggcaatcctctgaagtttgtgatgcgtagcgaactcggcagtggtcctcttgaattactgaagttgcaggggttcacgctgcccaacgctatttttaatgttgccgctggcgcagaagcgatccagtaa

SEQ ID NO: 242402 - DNA, 837 bp, Klebsiella pneumoniae
atgccgatgctgggtttcggcgttttcaaggtgaccgataaagcggagtgtaagcaggcggtgttgaacgccattcgcaccggttatcgcctcatcgataccgctgccgtctacgataatgaagatgcggtgggtgaggccgtgcgcgaagccatcgccgaaggtctgtgtacccgcgaggcgctgtttattacctccaaactgtgggtccaggacatggccaacaccgggatggcgaaagccgggattgccgcgtcattaaaaaaatcgggcctggaatactttgatctttatttgctacatcaggcgatgggcgattatttcagcgcctggcgtgcgctggaagaggcctatgaggccggtaccctgaaagcgatcggcgtctccaatttttacccccatgtgttagctaacttctgcgaaactgtcagaattaagccaatggtgaaccaggttgaactgcatccttatttcgcgcagcccgcggcgctggaagccatgaagcattatcacgttcagcctgaagcgtgggcgccgttaggcggtggcagacataatccgtatcaagatgcattgctgcaggggatcgccgatgcgcaccagaaaaccattgcgcaggttgttctgcgctggaacgtgcagcgtggcgtcacggtgatccctaaatccacccgccaggagcgcattgaagaaaattttgctatctgggatttcgtattaacagataacgaaatggcgcaaatcagcgccctggatttaggctatgttggcgaagcggtaaaacacttcaaccctgagttcgttcgcggatgtctgggggtgaaaatccacgactga

SEQ ID NO: 242403 - DNA, 585 bp, Klebsiella pneumoniae
atgaacacttctgacaaccatgctttaggcgattttctccgcgcccgccgccagcgtctcgatccggcaacgtttggcttcccggcgggacgccggcgcaccccggggctgcgccgcgaagaggtcgcgcagctcgccagcatcagcccgacctggtatacctggcttgaacaggggcgcggtggggcgccttcccgcgaggtgctggagcggatcgcccgcggtctgcggctgaccaccccggagcgcgagcatctgtttattctcgcctttggccatccgccgcagacgcgtctgacggtgacggatgatatgacgccgcggctgcagcgggtgcttgacgctttcaccattccggcgattatccgcaccgccagctgggacgtcatcgcctggaacgcgccggcggccagggtgctgaccgactacagccaactgccgctggcggagcgcaacgtgctgcgccgcctgtttacccggccggaggcccgctgcactctggaggactggcagagggtggggcagcttatcgtcaacgccttccgcgccgacgtcacgcggatgggcgccacgaggctttgttga

SEQ ID NO: 242404 - DNA, 342 bp, Klebsiella pneumoniae
atggaagaggggccatatgccactcttttaaaaaaaatagccaagcttcaggaacgattgccaacccgcattgaatattctcccgtccgaattgcactagtgacggccagaaacagcccgtcggaaatgcgcgtcattaaaacgctgagaagctggggggtatatgtcgatgaagcattttttctcggctgtgtagagaaaacaaaagtcctgaaggcgtttaagccacacattttctttgacgatcaggatgtgcatttgatcgcagcggcaaaggttgtaccttctggaaaagtcccttatgccagtaactccgaacttgcagaacgtgaagcatcgtga

SEQ ID NO: 242405 - DNA, 282 bp, Klebsiella pneumoniae
atgaccataaaagaactgcttattgaggccgatgccattcaggttggcgttgtggagtccgactggcagcgggtaataaagctggctgcccgcccgctggaggcaaaaggctttatttcgacggaatatagccaggcggtgatcgacaatactttaaatcatggcgcttattacgtttttgatgaagggattgccatcccccatgcccgccccgaatgcggcgtcagacgcaactgctttagcctggtggtgctggaaaagcctattccctggctttgttga

SEQ ID NO: 242406 - DNA, 378 bp, Klebsiella pneumoniae
atgcaacagtctaccccttatctctcatttcgcggcatcaccatgacgttccctggcgtaaaggccttgtccgatatcagttttgactgctacccaggacagatccacgcgctgatgggcgaaaatggcgcaggcaaatcgacgctgttgaaaattctcagcggcaactatatcccgaccgcgggccatctgcagatcggcggccagcagatggcattcgccaataccatggaggcgctgaatgccggcgtggcaatcatctaccaggagctgcatctgatcccggagatgaccgtcgccgaaaatatctatctcggtcagctgccgcacagaggcggcatcgtcaatcgctcgctgctcaacggctttgttgaataa

SEQ ID NO: 242407 - DNA, 444 bp, Klebsiella pneumoniae
atgaaaaaaatcattttccttctactaattccagcattttgtaatgcaaacactcctactgttttcaaatcttcttgcggtggtattcaatacagtatcgaatcattttgtagtgtaaataaccttaagggtgaccaggataaacttgacataccaatttgcagcaagcaaatttttgcccttggtaaggaaaaccatgatctatcaaagtttacaggtcttgtagaacgcattaacagcaaagacgaaaaaataaaaatgatgaatttcgtcttctacggagcctcatgtaaaaatgacagaattattttatccggcgcaggtggttgcaattcatgtggtgaaacgttcaagacatttaatctatcaggggaagaaataaatgagaaatctaccacgctagatttggagcctatgcaggatattatccccgagctttattaa

SEQ ID NO: 242408 - DNA, 180 bp, Klebsiella pneumoniae
atgcgtgatctgatccttcaactcagcaaaagttcgatttattcaacaaagcccattggccttaaccggcagcgtattcactcaattgccgaactgcgcaaagtgctcgaaggcaaaccgccggtcatcgccctgaacgtgatccgcggcaacgaaagcatctatctgctgctgcgctga

SEQ ID NO: 242409 - DNA, 837 bp, Klebsiella pneumoniae
atgtcacgtatagatacgctggtctgtactgacgccaggaaaacgaaatatcgtttcgtggttttgacgatgatttttctggtgtatgccatcaattacgccgaccgaacgaatattggggcggtactgcctttcatcattgatgagtttcatatcaataattttgaagccggggccatcgccagtatgtttttccttggctatgcggtaagccagatcccggccggctttttcatcgccaaacgcggtacccgggggctggtatcgctctccattttcggcttctccgcctttacctggctgatgggcacggtgagctccgtgtttggcctgaagctggtgcggctgggactggggctgagcgaagggccttgcccggtggggctggcttccaccataaataactggtttccaccaaaggagaaagccacggcaaccggcgtttacatcgcggcgaccatgtttgcgccgattattgtgccgccgctggcggtgtggattgcggtgacctggggctggcggtgggtctttttttccttcgcgatacccggaattgtggcggccatcgcgtggtatctgctggtcaaatccaagcctgctgagagcggatttgtttcccaaagcgaactggcagagattaatgccgggcgtgaaagtcataataatagcgtacgcgaaaatatcttaattgccgaaagattcacctggctggataaaatcattcgggtaaagaaaatggcgccaattgatacggcgaaaggcttattcacctcaaaaaatattctcggtgactgcctggcgtattttatgatggttagcgtgctgtggctttgttga

SEQ ID NO: 242410 - DNA, 999 bp, Klebsiella pneumoniae
atggtacatgtttatggaccccatattttccacactgacaatgaaacagtgtggaactatgtcaacaagcatgcagagatgatgccctatgtgaaccgggttaaagcgacagttaatggtcaggtattttccctgcctattaatttgcatactatcaatcagtttttctcaaaaacttgttcgcctgatgaggccagagcgctcattgctgagaaaggggacagcactattgctgatccacaaacttttgaagagcaagcgttacgctttattggtaaagagttatatgaggccttttttaaaggctatacgattaaacagtgggggatgcaaccctccgaactgcccgcatctattcttaaacgtcttcctgttcgttttaactatgatgataattattttaaccacaaatttcagggcatgccgaaatgtggttatacgcagatgattaagtccattctcaatcatgagaatatcaaagttgacttacagcgggaatttatcgttgaagagcgaactcattacgatcacgtattctatagcggtccattagatgcgttttatggctaccaatatggccgtctgggctatcgaacattagattttaaaaagtttatctatcagggtgattaccagggatgcgcagtgatgaactattgttctgtggatgtgccctatactcgcatcactgaacataaatatttttctccctgggaacaacacgacgggtctgtttgttataaagagtatagccgtgcttgtgaagaaaatgatataccttactatcctattcgccagatgggagagatggcccttcttgaaaaatatttgtcactggccgagaatgaaaccaacatcacttttgtcggtcgtcttggaacctaccgttaccttgatatggatgtgaccatcgccgaagcattgaaaacggcagaagtctatttaaattcactcactgaaaatcagccaatgcctgtgtttacggtttctgtacgatga

SEQ ID NO: 242411 - DNA, 234 bp, Klebsiella pneumoniae; identical to SEQ ID NO: 220008

SEQ ID NO: 242412 - DNA, 225 bp, Klebsiella pneumoniae
atgccgccatccggcacaaccgcaggtacggcgtctgatgtgtatcgcccggcggcgctacgcttgcgcgggcctacgctgtttaacctgtgggggacccgtaggccggataaggaatttatgccgccatccggcacaaccgcgggtacggtgtctgatgtgtatcgcccggcggcgctgcacttgcgcgggcctacgctgtttgaaccagcagaggactcgtag

SEQ ID NO: 242413 - DNA, 384 bp, Klebsiella pneumoniae
atgggcattcgtgacgagctgcaaaccgaagtcgccgcggcattcgataccgacctgcaggatgccgttaaggatttcactgggtcatataccgttcggggtgcctgggacccggtgacggaaaccggcactgaaacgcaggtgacttactcggggcgtggagtgctggcgcgctataagctgcgccgtatcgatggcgttaacattctgcatggtgatgtgaagctaaccgcactggttaacgaggtgactgataagccggccgtcgggcatatcatcaccgcaccggatccggttacgggtgagcttcagtgctacgaggtcatcaccgcttctgccgactctgctggcgctgcgtactccattcaactgcggagggcgtga

SEQ ID NO: 242414 - DNA, 354 bp, Klebsiella pneumoniae
atgaacaatagcgttaaaatctataccagccaccataagcctagtgcttttcttaatgctgcaattatcaaacctctgcatgtcggcaaagctaattcttgtaatgaaattggttgtccaggagatgacagtggcgataatatttcctttaagaatccgttttattgcgaactaactgcgcattattgggtttggaaaaacgaagagctggcagactatgtcggtttcatgcactatcgccgtcatcttaatttttccgaaaaacaaactttttctgaggatacctggggggtcgtgaaccacccatgcattgatgaagaatatgagaagatctttggattaaacgaagggtaa

SEQ ID NO: 242415 - DNA, 519 bp, Klebsiella pneumoniae
atgaggtgggggaaaaaagcgggctggatcgggtccgggtgcggtttgcaaaacagctggataaagagacatggggctttgaagatccttcaattaaaggaacatttgtctggtcccggtctgccgggcagggaaaatttgagtggggagccagccagacgactgtccatgacgggagcgctggcggctctaccacaccgcctacacccattccggaaccgcggagcgtctggggattccctaacccggccccggaatcgttaccgcccgtaccgggaacgccgatcccggaggaacagggaacaaatattgaaacattgcccatcgaagaccgggatttcaatgactttattattgttgacccgatgggggttgtcccggcaatctatgtgtattttaagaaagcccctgtggaagagtatgaggttgactattatgaaaattttgaaggccgttcaaggcagggaaaatatcaagtcgatcatattccatctagagatgcggttcgtgtatatttag

SEQ ID NO: 242416 - DNA, 354 bp, Klebsiella pneumoniae
atgaaaaatgcgacgctgacagtttttttgcttacattgcttgtgaatatggtgatttctttttttattggctataagtacaaagattttcttagtagttttctatcgccggcgatctattatcaagccgttgttttcatttcacttactgttcctctggtaatctcattcctatacggtgttgtttgtcgtaaaattgttatgtggaggcttgataagtttaagaaaaaacagatagatgtatccagactcgatagtgtcactaaggaaatgtatcaagagatagtggagcaggatttaccaactaaagcacaaataaaagaaatgcatgaagcattgaagaaacaattttag

SEQ ID NO: 242417 - DNA, 528 bp, Klebsiella pneumoniae
atgaaggtttcaaaagagcagttcttatcagttatgtcatcagttgaggattttgaaatcatcaaaagcaaaagtaaaaaaaatgatgatgatggactcactatggttaagtggaaaggacaagtattatttgttttattcaatgatggaaagttgccgtctgaaataaaagatgatgatgatgttaattcaacagtgtcttatgattatgcgatttcattgttggttatggctaagaaaatccttattgatgttgagcctttggtgaagtacaagatagcaaactatgtaaatatgaaatctgattttagttccattgtaatttatcgagaagacttggatttatttacaatcgatgttagacataacgcattcatgtcatctaatagttcgcatgatattaagctatcattcatttcaatggttttaaccggggctgtcacctcacgagagttacacaatcagattgaggcctataaaaattcgcctgaaaaatttttagaagaatgcatagggttacacgaatga

SEQ ID NO: 242418 - DNA, 2127 bp, Klebsiella pneumoniae
atgattgcggcgttgctgcatgcgcgcaaagcgctttccctccagccggaatgtgtacgctatgacgtataccgaaccgccgccgcgctggagcaacatcacgacagccagcgagccaatgcttttttaatcagcttttgcaaaaaagcattgccgcgccttgagctggtcgcaaaaaagtacctctccaccggcataaaaagcgatgtttctgctgctgtttttagcgggcattttgatacggaaatgctgcaatacatcgcctcgcgcctagtgaatatggtcgcccggtataaccggctccctgatatggcaaaggcagatattgaactgctggccgctgatatcgctaattttatccgcgcagagcttgcagatatagacgatgccagcgccggtgaactgaaaacactgcattcgtggtatatgcgcgccgggctgattgccctgcaatttaacgtgaccccgccccattgggagcgcgtaacaaaaaaatatgccagtgagcaggatatcgcaccggcagttatgcgcatgttcaatgaaacgtggtggcgcgggcggttgcgtcgcattgctgctgcatggcgtgagtatctgcaaatcgctgttggtaatgtcagcaagaaaaaacatacctacgccagcaaaacatgcgtagctgaatggcgcgagcaaaagaggcgcacgcgtgaatttcttaaagggctggagctcgaagacgaagacggcaaccgcatcagcctgattgaaaaatacgacggctcggtcgctaacccggccattcgccgctgcgagttgatgacacgtattcgcggctttgaaaatatctgtaacgagctcggttacatgggggagttctatacgctgacagccccgtcgaaatatcacgccacgacaaaagcgggctaccgtaaccacaaatggaacggggcaaacccgtccgacacgcaaagctatttaacctcactctgggcgcgcattcgcgccaaactccaccgggaagatatccgcatctttgggatccgcgttgcagaacctcaccacgacgctaccccgcactggcatatgctgatgtttatgctgccggaacatgccgaacgtgtgcgcactgtcatccgggattatgcgtggcaggaggatggcaacgagctcagcagcgataaagccagaaaggccagattccacgctgaagcgatcgacctggagaaggggagtgcaacgggctatgtcgcaaaatacatctcaaagaatatcgatggctatgcgctcgacggtgaaacagacgacgaaagcggcgagctgttaaaagataccgcgcccgccgtttctgcctgggctgcgcgctggcatatccggcaattccagtttatcggtggtgcgccggtgacggtctaccgcgaattacgccgcatggccgacaccgaaaccgcgcacggccttagcgtggaatttgctgcggtgcatgatgcggctgatgccggtgattgggcgggttacgttaacgcccagggcggcgcgtttgtccgtcgtgacgatttgcaggttcgcacgctctacgaagcgcgatccgagttcaaccagtacggcgaggagactgtctgcattcgcggcgtgtacgatgccacggtcggcgctggttcgccggttctgacccgtctcacgcaatggaagattgtcccgaaacgcgccgttgatttggccgttgaccttaagggcgcttctgcgccctcttggagttctgtcaataactgtacgggaagcgaaagcgatccgccggagctggatttatccaaaccgttgagtcgaagtgaaaggcggaagctaacagccagactcagggacaaaaaacgggttaccaggcgtgattttatccacggaacggataaacaaattgcagccattgacagaacaatagacgagattcagctcactaccggcgaaaccattagccggggtgaggccctgcacctgatggccggtggcaaaagttgcataaacggcaaatggtgccgtggttcatcaactggtgaaattttcccggcagcaccgtcacaccgagcgcaggccagacaaatcctaaatcgagtcgcggggttagcgtcagttactaagttaagactgtaa

SEQ ID NO: 242419 - DNA, 222 bp, Klebsiella pneumoniae
atggccgacgcaatggatcacatccaacagcgtgagcaggaagagcgcgagcgccatatcaataacgcgcgcagccgcgttatgacaccttcgcgttttacctgcgaagaatgcgacgcaccaatcccggaagcgcgtcgcagggcaattgatggcgtgtcactttgcgtgacctgtcagcaaataacagagctcaaatccagacattaccggggcgtttaa

SEQ ID NO: 242420 - DNA, 228 bp, Klebsiella pneumoniae
atgcaaaatatcgaaacccgcaattttgaagctgataacgatgtactggtcagcttgctgaataaagctaaaaacgaggagcgtcgtgatcgtgctcttgctgtttccattcgccttgaggctctggctattcatatcgcaagagaagggctgaacggagtcgaagccgccgagcttctgcgccgcgaggctgttcgctacgaaaacgaatcacaggagctgcactaa

SEQ ID NO: 242421 - DNA, 339 bp, Klebsiella pneumoniae
atggctatcgaagctgtttctgcaactgttccgctgaaagctggcgcccgtatggctggcctgaatcatatcgctgagattcgcgggcggttctggggtgatagctggaaagaggtcgagcaattcgttgcgaatatgcgcgatacgcgcgacccgcagcatgaagacaatgagcgcgcgctggcagcgattttctttctggcaaaaataccggctgctcgtcacgggctcaaattaagtgagctgactactgacgagaaaaaagcacttatttcagcaatgaatcattttcgcgcagtcgtgagcttatttcccaaacggctaaccatgccgaattaa

SEQ ID NO: 242422 - DNA, 201 bp, Klebsiella pneumoniae
atgttgaataacgaaccttctttcgcatcgctactcgttaagcaaagcccggctatgcattacggccacggctggatcgcaggtaaagacggtacgcgctggcatccgtgtctctctcaggctgatttgctggctggcctttctaccaaaaaacaggagggctcatggctatcgaagctgtttctgcaactgttccgctga

SEQ ID NO: 242423 - DNA, 714 bp, Klebsiella pneumoniae
atgaaaaagttggaacatgaaaattttgtttttgagtgtgcggcaaaaacgttggaagatatatacggagctttttcaagggacttaagtcaaactgatagaccagatgctgctatagttttggaaaatattcaacctcagaaatcaataggaatagagataacctcctgcgatagttttgagcataaactgtattttaatgaccgtaaattctctaaaacaatagagattcaacaaatcgatgactgtctcaatggtatctcaccaacaagaccattaaaaaaagatagtattcttattccaaggaattatatttataaagcaattcataataaagcatctaaatataaagcttataaaaaagcgaacaaatacaacgaagttattttattagttacaagtgattttctggatggggattaccctcattttctcacgtacattgctccatggacaaactatcttttaagtaattttaaataccccttcgataaagttatatttgtgtgccttactacacgtaaaaactatgtaatatatgataagaagaaacctacatgcaggcacccagaaatagatcttgataaagaactgggaactacccagacacatacaggaatgctcacgtttggagtggaacataatttaggctctctaatgaatgcggaacctcttattaaacctagaatatcagcgccacgaaaaaataaatga

SEQ ID NO: 242424 - DNA, 147 bp, Klebsiella pneumoniae
atggcaatggtcaatgaaaatatcgtcattcgtctggcgcaagacgtagacatccctgaggtgaaacaactgctggagcgctgcgctatcacgcaaaaaatcttgcaggcgagcaacgggcgaatggatttgtcaccaccgatatga

SEQ ID NO: 242425 - DNA, 819 bp, Klebsiella pneumoniae
atgcaaaggctccattctacacacaggaagcatttttcctcacaggaattgaccgctcaatgcataatgaaagtaatttggtcaatggtagtgtctcacctaaatgggaaacgacaatctcaagaaaggcgtgaacccttagagctataccgaatttatttttacgattgccctcctcttgacatccaaacaagatatcctttacctgaccaaggaaataaaacacctggcagaaaaaattttaaactcgaagactcctaccaattaagaacccaattacatgaagagcttagaaagaccaggaaaacagctctgcgcctggggcatcttgtggacaataagcgctggcaattaaaaactttctctcttgacgctctcatgaaaggagaaaagctctgggaacaacttactaatgatgatttctactacgatataaaacagaaacaagtagatataaaacttgggatggatataaccacccttgcttatgaaaaattagtggacgtaattgttttggtcgcgggggattctgactttgttcctgccgcaaaacatgcaaggataaaaggtatagattttatactcgatccattgcggcaaaatgtaaccccttcattgtcagagcacattgatggggtccaatcatatagtttgatttctggtctggctgacgcgctacacgcagaaccatacccggtaccagactggtgggaggcaagaaaaaaagggaactcaaaaagaggcgctcgcgaggcaaagcgagaatatggaaaaacccaagctgaagccgccaaaaaccataataaacacaggaattaa

SEQ ID NO: 242426 - DNA, 168 bp, Klebsiella pneumoniae
atgagtactttaaaagtgagtaacttcgccagacagggttactcgattgtctttcctttgtttttatttttcagcgcgattttttgcatgtccacccggaccaataatctgctgcatttatcgatcctgctgctattgctgtcgctggtacgccaggaaaaccgctag

SEQ ID NO: 242427 - DNA, 252 bp, Klebsiella pneumoniae
atgtcagaaaagtggagtaaagaattcgactcttgctttcaggtggggagcatagaagaaattgcagatgctctcgagaaacgcagcggaagcgaggaaaatgcgttagccatgctggcaatgacagccttcacactcatgacccgacgtggtatctgcgaaatgcagaacgtggcccccgatggcaaaggcattcggctggagctaatcggcttcagggaaaatgaaacaataccggatacgcttcattga

SEQ ID NO: 242428 - DNA, 1209 bp, Klebsiella pneumoniae
atgtcttacaatcgacagcctgtcgcagaagatcctatgcagatatggggcgctgttggtgtccttcttatcctgctgctattcgtcatatggttattcttgccggaagtggtttacgccagctgcctgattcttcataccttatggggactggtcgactgggggccatttcataactatgcagcaccacgatacaacctgcttgccatgaccggtaacaacgccgccaacataagctatagccagtgggttaacgtcatggagcagaccataggtattctgtggatgtacctcttacctgtgacactctggtgtttgtgggaatggtatcaacatccgggacaaagccgtttcacccgcagaccagtagatattacccgactgccacacatctttgcttcgttgtcccctgctatcgcccctgtactggcagatggtgatccggaaaaactctttcatggtggcaaacgacctgaacggcgggttgctctcaccccggaagcatttgtcgagcagcatactctcatcaccaatatgcagctcgatgttgcagctgcaagacgatgtttcatggcccagttgggtaaacctttaacgtcctggaaagacatggcaccacatgaaaaagcgctctttgccatatttggtcttcagtatttcctggatgatcgtaaggcagcattaaagctcatggatacactgaacctctcatgcagaattaaaagcaaacgggacagtgggaaattctgtacccctgtttattcactggccaaatcagctttccagagagtgattaaaagcaacggagcacagcaatggctgaaacaacatcgctacgtccgcagtgggctggtctggctgtatgcacatgacctgcggcttacgccacccaactggatttggctgaaaggcgtggacaggacgctgttttatgcattacaccgcgccaataccacgaaaggatttattgaaggcgctggcgtggtggccgttgcacgtgcagaggccgaagccatgcgttttggtcttccctgccctgaaccctgtgttgatgaagcggtggaaggcttacggcgggatatgctcagtctcggtcttatctgggatgaaccacaaccagatcgcgaccggaaacgccgcatcctgaccaactggtccctcaccgacgacatcctgccccgcacacctgctacagacaacgaattctga

SEQ ID NO: 242429 - DNA, 1071 bp, Klebsiella pneumoniae
atgacaatcgagtactttgcaacacgcattgcacaacatatttccgtgcaggcaatctggccggatggcaggacagaaattattgccgtccttccacgggatgccctgtcagggctggtaacacgaaataatcaactgattcatatagcctttgacgccatgggcacccgtaacagagaaaccgtcctgattgataaacaggagcataacgctaaccagatacttacagctattgattcctgcctgcgccttgaatatctgatggaacgccgcttcagcagaacacctttgttccgtggcataatcgccagcgttgtgctgttcgtaatggcaacgattggcttctctctgttccgctatgttgatcgtgtattctgggatgatacaacgcctgaagcagtacagacagcaggtgagccacgactgcttccccctcacctgaatcacactgtgccattaaatgaaggcattcaactcccggttcccccgaaaaaagacgtccaggtaccggagaaaacaatcacaagcaaaaatccggaagccgcagctgcgcgacataatctggctactgttctgaagcggaacgccgatcggggcatgtttaccatcaacctgtcatccggtcatgaacgaaccctgttcgcatttctcgatcctgcctgtcctaactgcagacttctggagccggccttaaaacgcctggccagcgacttcaatgtcgttatctacccggtttcagttattggtggagaggaatccaccgaccgtgtggcaccactgctgtgtgaaaaagatgctcagaaacgtgctgccggctggcaccgactgtattccgcagataacggaatgatgacgccatcagaagaaacaacgcctgcagatgaaacatgcctgaaagcagccagagctgcgattgatgttaacaatgtcgccttccgtaagttcggatttgccggtaccccatgggtgctgtccgacacgggctggcatctgcctactggaattctgcaggaaactggcacgcttaatttattcctgaaaaccaccgacagcgagtctggccatgagtga

SEQ ID NO: 242430 - DNA, 2292 bp, Klebsiella pneumoniae
atgagtgaacatcgcgttaaccccgagcttttacaccgtacagcctggggaaatcctgtctggaatgcactccagagtctcaatatctatggcttttgcctggtggcaagtcttgtggccagttttatctggccacttgcattaccggcatgtctgttgttcacactgataacgatgctggtatttagtctgcagcgatggcgctgccctcttcgtatgcccatgacgctggaatgtgctgacccgtcacaggacagaatgattaaaagaagtcttttcagcttctggccacccctgttccagtatgaggtcattctggaatcaccggccagcggcatattctatgttggttatcaacgcgtcagggatattggcagggagttatggctgagtatggacgatctgacccgccatataatgtttttcgccaccaccggtggcggtaaaacggaaaccatctttgcctgggcgattaacccactttgctgggcaagaggattcacccttgtcgatggcaaggcacagaatgatacggcaagaacgatctggtatctggccagacgctttggacgtgaagacgatgtggaagtcattaacttcatgaacggaggaaaatcccgcagtgaaatcattctgagtggtgaaaaaacgcgtcctcagtcaaatacctggaatcccttctgttacagcactgaggcattcacagcggagacaatgcagtcaatgctgccccagaacgtccaggggggcgagtggcagtcccgggccattgccatgaataaggcactggtatttggtactaaattctggtgtgtgcgcgaaggcaaaacaatgtcgctgcagatgctccgtgaacatatgactctcgaagggatggccaaactttactgtcgtggcctcgatgatcagtggccggaagaagctatcgcaccgttacgtaactaccttcaggacgttcccggtttcgacctgtcgctggtcaggacaccatcagcctggacggaagaacccagaaaacaacatgcttatctctccgggcagttttctgaaactttcagcacattcacggaagcattcggggatatttttgctgaagattccggtgatatcgatatccgtgacagcattcacagcgacaggattctgatggtaatgatccccgctctggatacatcagcgcatacaacgtctgctcttggacgaatgtttatcacccagaaaagtatgattctcgcccgtgatttgggctaccgcctcgaaggaactgattccgatgcactggaagtcaaaaaatataaggggcgtttcccttatctgtgtttccttgatgaagtgggggcatactatacggaccgtattgctgtggaagccactcaggtgcgttcactggattttgctctgattttgatggcacaggaccaggaacgtatagaaggacagacaacagccacgaatactgcaacactgatgcagaacacggggacaaaatttgccggcaggattgtcagcgagggtagtacggccagaacgctgaaaagcgccgccggtgaagaagccagggcgagaatgaacaacctgcagcgtcaggacggcatatttggtgaatcatggattgacagcccacaaatcagcatcctgatggaaagcaagataaatgttcaggagttgattgaacttcatcctggcgagttcttttctattttccggggagaaaccgtaccatcggcatcattcttcatccctgacgatgagaaaagctgcagcagcgatcccgttgttataaacaggtatatcagcgtggatgcgccacgcctggaccgtctccgccgtcttgttccccgtactactcaacgtcgaataccgtcaccggaaaatgtcagtgccatcattggcgtcctgactgcaaaaccctccagaaaaagacgaaaaactcgcacagagccgcacacgatcgtggatacattccagcaacgcattgcaggacgtcaggcggctatggcaatgctggaagagtacgacacggatatcaacgcacgtgaaagtgccttgtgggaaacagcggtgaatacgcttaaaacgaccacacgggaagagcgacgaattcgctatatcacgctgaacagaccagaactacctgaaacaaaagaggaaaatcagatatcagtgagagcagaaagagcaggtataaacctgttaacgcttccacaggacaataaccacctgacagggcgtcctgtaaacgggtttcatcataaaaaaaccaaccgtccggactgggacggaatgtactga

SEQ ID NO: 242431 - DNA, 2700 bp, Klebsiella pneumoniae
gtgaatgcagtcattccgaaaaagagaagggacggcaagtcttcgttcgaagacctggtatcctacgtctctgtccgggatgacatgaccgatgaggaactggatttatcttcttcttcgcaggctgaacaaccgcaccgaagccgtttcagccgccttgttgattatgcgacacgtcttcgaaatgagtcattcgtggcgctggttgatgtcatgaaggacggctgcgaatgggtcaacttttatggtgttacctgctttcataactgtacttctcttgaaactgccgctgcagatatggagtacattgcccggcaggcacactatgcaaaagatgacactgatcctgtttttcactacatcctttcctggcagtcacatgaaagcccgcgtccggaacagatttatgacagtgtacgtcatacgctgaaatcactcggccttgccgaccatcagtatgtctctgccgtgcatactgatacagataatctgcacgtccatgtggctgttaaccgggtacaccctgaaacgggttatctgaaccggttatcctggagtcaggaaaaactcagtcgtgcctgccgtgagcttgaactgaagcatggttttgctccggataacggttgctgggtccatgcaccgggaaatcgtatcgttcgcaaaaccgccgttgaacgtgatcgccagaacgcgtggacacgcgggaaaaaacaaacttttcgcgagtatgtcgcgcagacagcggtcgctggtttacgcagtgaacctgtaaatgactggttatccctgcatcgtcgtcttgcggaagatggtctgtacctgtctcagatggacggaaaatttctggtgatggatggctgggatcgcaacagggaaggtgtacagcttgactcgtttggtccctcctggtgtgcagaaaaactcatgaaaaaaatgggtgactacacgccagtaccaaaagacattttcagccaggtggaagcaccaggacgctataatccggacttcattgcagctgatgttcgcccggaaaaaatcgctgaaacagaaagtctgcagcagtatgcctgtcgtcatcttggagaacgtctgccggaaatggcacgggaaggacggctggaaaactgccaggctattcaccgcacactggctgaagcgggattatggatgcgtgttcagcatggtcacctggttatctgtgacggttatgatcataaccagactcccgttcgtgctgacagcgtatggtcgctgctgacgctcgacaatgtgaatcaactcgatggtggctggcagcctgtaccaacagatattttccgccaggttacgccaacagaacgcttccgtggtcgtcgtatggagagctgtcctgcgaccgataaagaatggcaccgtatgcgtacaggcacggggccgcagggggctatcaaacgcgaactgttttctgacaaagaaagtctgtggggatacagcatcagccattgtagccctcaaattgaagaaatgatcacacagggtgagtttacctggcagcgttgtcatgagctgtttgcacaacagggactgatgctacagaaacaacatcacgggcttgttgtcgttgatgcctttaatcatgagcaaacgccggtgaaggccagcagcattcatcctgatctgacactggggcgtgcagagccacaggccggaccttttgtgagtgccccagcagatttgtttgacagggtgcaacctgaaagtcgctataacccggagctggctgtcagtgacaggtacggggtcagcagtaaacgtgacccaatgctgcgccggcagcgacgtgaagccagagctgaggcccgtgctgacctgcgtgcccgctatctggcatggcgtgaacaatggcgtaaaccagatctgcgttatggggaacgttgtcgggaaatccatcaggcatgccgtctgcggaagtcacacattcgtgcgcagtacgatgatccggcattacgtaagctgcattatcacattgcagaagttcagcgaatgcaggcattgatcaggctgaaagaagacatcagggatgagcgacagaaacttattgctgacgggaagtggtatccaccctcttaccgtcagtgggtcgaaattcaggctgctcagggagacagggctgctgtatcgcagttgagaggctgggattatcgcgatcgccgtaaagacaggtcacgcacaacgacgacagaccgctgtgtcgtgctttgtgaaccgggcggaacgccggtatacggtaataccggtgatctcgaggcccgtctgcagaagaacgggagtgttcgtttccgtgaccgtcggacgggagagtttgtctgtacggattatggtgacagggttgttttccgtaatcaccatgaccgcaatgcgctggcagataaactggatttgattgcaccggtattattcgggcgtgatccacgcatgggttttgaaccagaaggaaacgacaaacaatttaaccaggtctttgctgaaatggttgcctggcataatgtgacaggccgtactggtcacgaagactacaggattacgcgaccggacgtggatcatcaccgtgaaggaagtgaacgctactaccgcgattatatcgcggcgaacagcaacgatgacgcatcactgcctccgccggagcaggataaacgctgggaaccgccttctccaggttaa

SEQ ID NO: 242432 - DNA, 234 bp, Klebsiella pneumoniae; identical to SEQ ID NO: 30885

SEQ ID NO: 242433 - DNA, 528 bp, Klebsiella pneumoniae
atgagtgcacgtggtatcaacaaggtcatcctcgtcgggcgtctgggcaatgatccggaagtccgttacatccccaacgggggcgcagtggcaaacctgcaggtggccacatcagaaagctggcgtgacaaacagacgggggagatgcgggagcagacggaatggcaccgcgtggtgctgttcggcaagctcgcggaagtggcaggtgaatatctgcgcaagggtgcgcaggtctacatcgaaggtcagcttcgcacccgtagctgggaagataacggtatcacccgttacgtcactgaaattcttgttaagaccacgggcaccgtgcagatgctgggacgtgcaccacagcagaacgctcaggcgcaaccgaagcctcagcagaatgggcagccacagagtgctgacgcgacgaaaaaaggtggcgcgaaaacgaaaggccgtggacgtaaggccgcgcagccagagcctcagcctcaacaacagccagaacctccttatggcttcgacgatgatgcgccattctga

SEQ ID NO: 242434 - DNA, 369 bp, Klebsiella pneumoniae
atgagccgcgctaaagcctggcggcgtgccgcccttgcaacctacatcaccgccggcgctgcattgaccctggcgggctacaccgtggcgaccacggccgcgaacgccaataccttgcgcgacacgcgggagcgcatcgaggacttccagcgcgagcaaaccgccatcgctgagaatgcgataagcgcggccagcgtgcggcgcggcaccctgccccccgacacccggccgcctgtcgcgccggactggcccaagttggccgaacgcgccatgccgtccgtggtggccctggcggtcaaaattcaatgcaaatcccgggtcaaatttgggtgcaaatcaacagatatcgacaacctctcgcgcaactaa

SEQ ID NO: 242435 - DNA, 219 bp, Klebsiella pneumoniae
atggctacttccaatgttaccggccgaacagaacccggcatatcgaaatattgcattaccttcggcgtatcgctggccgcgctcatcctggccggcggcgtgctggtgttttcctactggcagcacgtcgagctgctgcacgaaggcgaccgcgtaggcacgcgcctggaacgcttggggctgatcgaccaggagggcgcacagcatgagccgcgctaa

SEQ ID NO: 242436 - DNA, 390 bp, Klebsiella pneumoniae
atgagcaccgaaccgacgaacgaagaacttgccaagagttatgcaacgaagatcgagcaggcccaggagcgccgagaggcgaaagaccaggaacggctagagcggcacggccaggcggccgcgctggcgtcgcagaacatcgaggccgagcagccgcaggccaagcaggcccagggcttcgagctggacgcgcagaatcaggacagcgcagagcagcgcatcgaccgcaacgagatcaacggccagcaggcaaagacgctggcaaaggaattgaaccgcgacaacgagagcggcgaccaggtgaagcaagccagggcgcgggaaatcgccgaacggttcaaggagaaggcggcacgcgaccgggagcaatcccgcagctttagccgctaa

SEQ ID NO: 242437 - DNA, 3351 bp, Klebsiella pneumoniae
atggctatctaccacctaaacacgcacacgataggccgggcggccgggcatagcgccgtggccgctgccgcctatcgttccgcgtcgtcgctggtagatgagcgcaccggggaagcgttcgacttcacccgcaagggcggcgttctttcgtcggagatcgtcacgccagaaggcgtgccggttcccgagcgtgccgctttgtggaatgccgccgaggccgcagagaagcgcaaagatgcgcgagtggcccgcgagtggcgggcagctttgccgcatgagctgaacgacgccgaccgtaaagagctggcaacgcgcatggggcaggccatcgccgaccgctacggcgtggccgtggatgtttgcatccacgcacccgacaaggaaggcgacgaccggaattttcacgttcacatgctggcaaccacgcgcaccattggcgcggatggaacgctaggcgcaaaggccgttattgaactggcaaacaaggacaggcagaaggcgggcattcccggcacaagccagggcgatattaccgacattcgcaggcaatgggccgagctgacaaatgaggcgctagagcgtgcagaaatcagcgcccgcgtagatcatcggagctatgcagatcaaggcgtggaactcacgccgaccaagcacataggccgcgatgccgtggcgatggataggcgcggacttgacgccgaccgcatcgacattcacaacgccgaccggcaggagcaggcgcagcagatcaccgagcgcccggagatcatcctagacaagatcacggcaacgcaggccgttttcacgcgccgcgatattgccgccgagctgaaccgctacattgacgacgccgaccagttccagggcttgcttgccaggctggaacaatcgccgctgcttgtcgagctggaaccggccagcgggcgcgacccggtgaagttctccacccgcgaaatgatcgacaccgagcgcggcatggtggacagcgccgagcgcttggcgcagaccggaaggcatggcgtttccggccccatcacgaacgcggcgattgacggcgcaggcaccctatcggcagagcagcaaaacgccgtccggcacgttctcaagccgggcagcttggccgtggtcataggtgacgcgggcacaggcaaatcgttctcgatgaaggttgcacgcgaggcatggcaagcgcagggcttcaacgtgcgcggcgcggccctggcgggcaaggcggccgacgaattgcaggcaggcagcggcatcgacagtcgcacgcttgcatcccttgaatttgcttggaagaacggaaaggacaaactcacttcccgcgatgttctggtgatcgacgaagcgggcatgatcggaagccgacagcttggccgcgtgctgaaagccgccgagtcggccggggcaaaggtggttttgcttggcgacgataaacagcttgccgctatcgaggccggggccgcatttcggggcgtggtgcagcatgtcggcgcggcagaaatcaccgaggttcgacgccagaaagaggcatgggcgcgtgccgccggccaggagcttgcgcgcggttccgttgccgatggcttggcggcctatgccgagcgcggccacgtcaaaatccacgacagccgggacgccgcccgcgacagcctggcggccgcttatgtcggcgaccagggcaagggtagccagatcatccttgcgcacagcaataaggacgtgcaggcgctcaatgaagccgtgcgccaggcccgcaaagaacgcggcgagctgcgcggcacggcccgctttatgaccgagcgcggcggccgggagtttgccccaggcgaccgcatcgtgttcctgaaaaacgaccgcgaccttggcgtgaagaacggcactcttggcaccgtcgagcattcggaagatggaagcctggccgtgcgcctggacagcggcgaagcccgccggttccaggccgcgcaatatgccgccgtcgatcatggttacgccgtcaccatccacaaggcccagggcgtcacggtcgatagggcctacctgctggcgacccccggcatggatagaagccttgcctatgtcggcatgactcggcaccgcgaggcggcgaccttgtttgcaggagccgacgacttcaccgaccgccgcgccggccgcctggtcgatcatggcgcagcgccctacgagaacaagccggagaaccgagccagctactttgccactctggaaaacgacaagggcgaacggcacaccatttggggcgtcgatcttgaacgcgccattgcggccagcggcgcgaagcgaggcgaccgtatcggcctggaacatggcggctctgaaaccgtccgcctgccagacggcaccacggccgagcgcaacacctggcacgttcgcggcgcggccgagctggccgccggcaagctggcccaggtgctaggccgtgagcgtccgaaggaaagcactttggactttgccgaccggcgcggcttcgacggcgagagcgtcatgcgccgttggctggaacgcggccgggcgaaggtggccgagctggccgggaagatgcgcgacggcctgcgccgcaacctggaacgccacggccgccccgacctcatgcccgcgaccgacattgccggcacgccgaccgtgcagcggccgcagcagatcgagcgcacgccagaggacgagaagaagcgccgggcggccgagatcgcggcgaagttccggcagcaggtcagcgaggaacgcggcgagcaggtagcgccgcagcagcggccccaggccgaacgcccggcacccgacccgctggccggattccgcgccggtgtcgagcgtgccgaggcggcaggcggcggcctggccctggacgtggcgaaggcacagcttgccgtcgcccaggagttccacgcggccgggaaagacccccggcaccattcggcggccatcatgcaggaaggccagcagcgggcctttgcgggcctggcgcagccgtcccaggccaaggccgagccggagcgcccggcggccgcccaagtcagcgaacaagaccgcaagcgggccgaggcgcacgccaagatggaagtcagccagttccgggcgctggcggtgaagcggcaggcaggctttgcgggctactccgaccgcaacccgagcgcctggcgcgagctgccggacgagctgcgcgggcgcatcgagaggttcaacgcaatgccgaaggagcgccaggccgtcgagctggacaagatgcagcgcgagcttgccgacaggtatgcacgcaatccgcaggaaatcacgcgcagccgacagcagcagcgcgaacaggagcgcggccgcgatggcgggcgcggttattga

SEQ ID NO: 242438 - DNA, 252 bp, Klebsiella pneumoniae
atggcacgaaaaaccctatccgaacgcaaggccgacaagctggccgaactgaaccgcatcaagtccgaactcgccgatctggaaaacaaggcagccgaaaaaatcggcaagattgccattgccgccggtcttggcgatctcgaaatagacgatgcccaactgcggaaggagtttgaggctatcgcctcaaaatttcgcaaaagcgaaggcaagcaagctgctccgttggcggcaacgcctagcgcagattga

SEQ ID NO: 242439 - DNA, 240 bp, Klebsiella pneumoniae
atgaacgccaggagagaagatgcacgccggaaaattcagctaggcggcttggtcatcaagtccggcatggcggactatccggcatccgtgatcttgggcgctttgaccctagcggctggtgcgctcaaagggccgaacgctgacaccacaaaggcacgttttgaagcggcaggcgatgaggcttttccgatgatggagaggacggcggcaaccgttcctagccgtcaatttttgacctga

SEQ ID NO: 242440 - DNA, 2526 bp, Klebsiella pneumoniae
atgatggacgtgaaagatttactttcgagagcgtgggccgccgtggtggcggtgtttttcggggcgttcgtgttgtcattggcacacacggcgcacgctcgcgttttccccgaatgcaacccggcagcagaggccgcgaagttctacggtgcggaagatgcggatgcctgggtgaagcgcgtttgtgacgcgcaggaaacggctttccagacttgggaaacgaacctgcaaaagctcgacattgggcagcaagatttgtcgatggcgacgaacgccgggaattggcaagcctaccgggacaagtgggccgaattgctgccagtgttgaaggaactggaagccgctgcggtggcgaaccggaacgcgccaggcgcggcaaacatccttagtctgtatcgcaacgatttgggcctgtttttgcagaatgcgggccttgcctcggcgggtagcctggacgatttcagcgcccggattctggcgggcctggacggcgaacggccagcggcggcggctacggctggcgtcaatgtggttcagcagtcagtgacgcggggcattgagttcggcaagggcgttggcacggcagaagccgataaggtgctggccgaatatcgcggccaagtggaacagcgcacggcggaacgcatggaacaactcggcggctcgacaatgggcggctatttcggcggcttcggcacgcgcatcaaggccgctttcggcggctggttgttctacctggtaacggtctgctttatcggtgcctggatggcgcacaagcgccgacaaaacccggtcacggtcggcacggccgttggccttgccttcctcgttccatcggtcggcatgttgcttctgctcgtgttcgcgccgttcattccgggctggttcatcctcgccgcgacggtcgccggaacggtggcaacgtatctgaacgcgggccgggtgttcggctggctggctggcgtggttggctccgaatctccgaccgggaaacggctgcgcattctcggcggaacaatcgaaaacctgcgcggccaggtgcagccgtccgggccggttgcggccgccggtgctgcggccgctgcggtcgataacagcagcacgcatccgctcggttcgcacggctcggcacgatggggaactgtcgatgaaatccgccagggcggccacctggtcgcgcccggcaagccgggcggttttgccctgggccgggtgcctgacgcgctggccggcatggatgcccgtttccgcttcgtcggccatgtcgtgacggtcgcccctaccggctccggtaagggcattggcgcggtgattccgaacctcttggactatcccggctcggccctggtgctggacgtgaagggcgaaaacgcggccgtgacagcacgcgcccggcgggcgctcggccaggcggtctattcggtcgatccgttcgcggtgaatggcgacggcggcgcggccttcaacgtgcttgaccggctcgacgtgtggaacccggattgtgtgagtgaatcggccatcctggccgatgccctggtgatcgccgaaagcaagggcgatgccgtgcatttcgatgaatcggcaaagaacttcctgcaaggcttgatgctgcacgttgccggactggatgacacggaacgccggaacctgggcgaactgcggcggctgctgacggcgggggaagcggaatttttcgacgtgttgggcgcaatggcggccgacgatacggcggccttcggcatcccggccagggcggcaaatacgctcatgggcatggccgacaaagagcgtggttccgtgctttcgacggcccgccggaacacggcatttctggatgacccgcgagtgtcggccgcgctgtcgcgctccgacttcgatctgtcggaaatcaaggccacgtccatgacggtttatctggtcatgcccgccaatcgcatcgggcctaatgcccgcttcctgcgtctgttcatcagctcggtgattgcggctatcacggccagcaatgtgcagcccgcgcaccgtgtcgccttcctactcgatgagttcggccagctcggctacatgaaacagattgaagatgccgtttcactgctgcgcggctacggcctggccttctgggtgttcattcaagacctgtcgcagctcaaaggcacctatcccaagtggcaaaccttcctggcgaacagcgccaagtcgttctttggcacggacgattacgacacagccaaatacatcagcgacagcctgggcaaagccacgattgagtttgagacggaaaacaccggcaagaacagcggcagcggcctatcaggcggcggtggctcgatgaaccggggcaagagcaccggcacaagccagcaattcaccgggcgcgaactgctgacgccggatgaagtcatgcgcctggggccggagcatccgattgtcctggtgcgcggggaacgcccctacctgctcgaccggctgaactacctggccgattccgaatatgccgggcggttcgatgcgaacccctaccatagctaa

SEQ ID NO: 242441 - DNA, 387 bp, Klebsiella pneumoniae
atggcaggcatcatcgcggcagttgtcggcttcgtcgccctggcttggttcctgcggcggctgttccctgccctgtttgcggcggtgttcgtcctgttcgcgccggtgtggctcgtcggcggtgcgctgttcgatctgctgcgccggccgctggccttcctgcggccggtcggcctcgccttggcccgcctggtcggcttcgtcctggtgctgccgctgctgcccttcatcttcgcctggtcgttcttcgcggagctgtggcgacagttccggccaaaggccagcccggccggggtcaagccgcccacgccgatgcaggccgccacaaggcgcacggcggacgtgatcgacctggcggcatttcgccagcggcaggaaaaagaataa

SEQ ID NO: 242442 - DNA, 924 bp, Klebsiella pneumoniae
atgacgcagcaagcccccaaaatccccgccgacgtgcgcgagcgcatcattgccgccgccactgatcttttcgagcaatcgggccgcgagacgatgcccacggttgatgccgtgcgccgtgccgcccgcgtggacatgaacgccgccagtgccgtgatgaaggaatggcgcagggcgcagacggcccaggccgcgccggtggccgtggccgtgccggaatccgtgcagcaggccagcagcgccgccgtggcgacgatctggcagcaggcccaggagctggcgaacgaatccctacgcagcgcacaggccgcatgggaaaccgagcgggcagagcaagacgccatgcggcaagagctggccgaggctttcgagcgtcaggccggcgagctggaagccctgcaatcccgcctggcgtccatcgaggccgccgaagcggccgcacgcggcgaagctaccgagctgcgcggccaactggccgccgcccaggagcaggcgcacacggccgaggcccgcgcccaggagcaggcgcacacggccgaggcccgcgcccaggagatcgagcgccgcgccggcgagctgcgcacggaactggacagggcgcaccagaccagccaggccgccaccgcccagctcgaccaggtgcgcggcgaactggcgaaggtgcaggccaaggccgaagccgaacaggaagcgcaccaggaacaacgcaaggccgcagcaaccgaagcgcaccgcatggccgaacgcctcaccgctgcccaggccgaacgcgaccaggccacgaaagccgcaggccaggcccgcgaggaagccgcacgcatggcagggcaaatcgacacgctcaaagagcaatccgccgcgctgctggcccgtatcacgccagccgaagccaagccgaccaggaagaagcccggcggcgagtga

SEQ ID NO: 242443 - DNA, 1014 bp, Klebsiella pneumoniae
atgacaaagaagcagcgagaagggcagggcgcgcagcagatcggcgagatcatgggcgacctactggcccaggcgcagatcaaagcggcgttgccgcccccaaagcgccaaaccaagaagatcacgccggccggcctcatcttgaccgagcgcgatcaaaagctgatcgaggccagcgcggagattgccactacccccccgagtggcgaggacatggctttcactcatgccgtgctgtgccaggttggtttgccccgcgccaaggtggaaggccgcgagttcatgcggcagtccggcgcggcttgggtcaatgtccaggccggctacctggacgaagggcatggcccggttctgcaacctatcccctatggcgtcatgccccggcttggcctggcgtgggtttccaccttcgccgtgcgcaacaaagagcgcgaaatccccatcggtgacagcgccgccgagttcctgcggctcatggggatggagagcgacggccgccgctatacgaccttgcggaagcagatgcacgccttggccgccgctcgcctgcaactcggattcaaagggcgcacctacaacggccagccagtgcagcagttcgatgcttgggtggcgaacaaggacacgcagcagcgcgccctatggcctggcgtcatgctgctgtcagaggactattacggctccctgatcgaaagcgccgtgccgctggacaaccgcgctttgcacgccctgaaaggttccgcactggcgttggacgtgtacgcctggctggcccatcggctgcaccgcatcgagggcagaggggtaacgctgcactggaagtcgctgcgcgagcagttcgcccaggaatacaagggcaaagacccggacaaggatttcaagaaggagtttttgccggtgctgcgcaaggtgctggccgtctatccgcaggccaaggtgaagcctgtcaccggcggcgtgctgctgatcggctcgccaccgcccattccctacaagggcggccccacggtttag

SEQ ID NO: 242444 - DNA, 225 bp, Klebsiella pneumoniae
atgagcaagcccacaaccgcactcaccgccggccgcccgagcgcacgcaccgacaaggcgcgggccgcgacccttgccagcctggccgacgacgccggcggcatgaagcgcgtcaatttcgagctacccgccgaacagcacgcgaagctgaaaatctacgccacgaagcagggcaagagcatcaaggaactattgaccgagtatgtcgccagcctgccggattga

SEQ ID NO: 242445 - DNA, 633 bp, Klebsiella pneumoniae
atgaaagtcattgccgtgctgaaccagaagggcggttcaggaaagaccaccatcgccacgcacctagcccgcgccctgcaactcgatggcgcggacgtgttgcttgtcgattccgacccccagggcagcgcccgcgattgggccgccgtgcgggaagatcaaccgctaaccgtggtcggcatcgaccggccgaccattgaccgggacgtgaagaacgtggcccgcaaggtggatttcgtcgtgatcgacggagcgccccaggcggccgacttggccgtgtcggcaatcaaagcggccgacttcgtgctgattccggtgcagccatcgccctacgacatttgggccacggccgacctggtggcgctggttaagcagcgcatcgagattacggacggaaagctacaggcggcctttgtcgtgtcgcgtgcgatcaagggcacccgcattggcggcgaggttgccgacgcgctggccggctacgcgcttcccatccttgatgcccgcatcacgcagcgcgtgagctatcccggcacggcggccgccggcacgaccgttcttgaatccgagccggacggcgatgcagcggccgaggttcgcgccctggccgccgagattaaacagaaactcaattga

SEQ ID NO: 242446 - DNA, 294 bp, Klebsiella pneumoniae
atgagaaacggacactatcccctgcccccgctccggccggagctgcaagccgcgcacgacgagatggacgccaagggcgattactttgcctatgccgtgtgccgaactcatgacggccaggcgtgggaagtgacgaccaggcagggcggcatgtatggcgcgctcgatggccgctatctcgaccacgacgaagcggccgccgccggcgtggcctggctgctggaacagctcgaccgcgaaccgacagcagacgaggcaacgtatcggacgctatgggaaagcatgggcaaatga

SEQ ID NO: 242447 - DNA, 729 bp, Klebsiella pneumoniae
atgaagcagaaagccacgaccgcgccgatggtggcgcgggtctatctgcgcgtcagcaccgacgcgcaggacttggaacgccaggaaggaatcatcacggccgcgaaggccgccggttactacgtcgcgggcatctaccgcgagaaggccagcggcgcacgcgccgaccggcccgagctgctgcgcatgatcgccgacctacagcccggcgaggtggtcattgccgagaagatcgaccgcatcagccgcctacccttgcccgaggccgagcgcctgattgcgtcgatacaggccaagggcgcacgcctggccgtccctggcgttgtcgatctatccgacctggccgccgaggccgagggcgtcgccaagatcgttttagaggccgtgcaggccatgcttttgcgcctggccttgcagatggcccgcgacgactacgagacgcgcagggaacgccagcgccagggcattgagctggcaaagggtgcgggcaagtatcgaggccgccgcgccgacccgaagcgccgcgcccaggttgtcgcgttgcgtgcgtccggccacagcatcaccaggacggccgagcttgccgggtgcagcccgtcccaggtgaaacggatatgggcggccgaagtgagcaaggccgaggcggcccgcatgggagccttccgagaggacgccttgaccgaggccgatgcgctggcggccgccgaccaggagggcatgaaggcatga

SEQ ID NO: 242448 - DNA, 282 bp, Klebsiella pneumoniae
atgtcaaaagaagctgttttcacgatgaagctggaaccggagctgcgcgccgacttcatggccgaagctgccggcgaagatcggccggcgtcccaggtcatgcgcgagctgatgcgcggctacatcgagcagcgccgccaggcccgcgaatatgacgactacctgcggcgcaaggtcgaagccggccgcgcctcgatgcgtgccggcctgggccggtcgaataatgaagttgaagccgcgttcgctgccaggcgcaaccaggtagcggcaggccaggcgtga

SEQ ID NO: 242449 - DNA, 285 bp, Klebsiella pneumoniae
gtgatagttgtctggacgccagaagcggaacaagaccgcgccgacatttgggactacatcgcggcagacaatcccggcgcagccgttcgcatggatgagcttttcagcgatgcggccgccaggctggccgcgcatccgaagatgggccggacgggcaagatttcaggcacccgcgagctgataccgcatgaaagctataggttggtgtatgagatcgaggggggcacggtttgggtgttggccctggtgcataccgcccgccagtggccgccggccagggggtaa

SEQ ID NO: 242450 - DNA, 369 bp, Klebsiella pneumoniae
atgggcaggaaagaaaccgaggaagcgattgcagatagtcgcgccggccgcgtgtctggccggttcgccacagttggcgagctgctggccgatctgaatgccgacgacacgccggcaattcacgaaggcagcacgaacgtatatgccgatcttggctaccccgacgccgccgaaatgcaggcaaaggctcggctcgtaaccaagatcagccaaaccataaaggcgcgccagttgtcgaacgaccaggcggctacggctctcggactgacgccggccgccttgcgcgagctattggccggccgcttccgagcgcgtccggtcgatgacctggaacgcttggcatccgtactcgatgaggccggcccatga

SEQ ID NO: 242451 - DNA, 300 bp, Klebsiella pneumoniae
atgactgacccgaagaacctggaaacctggctgcatgagaaggccggcccggcccatgacgccctgaaagccgacccgacccgcgccgtctcggccgaccgggtgcgctacacgctcgatgagctgctggccgaatccgactattcgcaaccgctatcgcccgaagaacgggaatgggtcgatgcgcccgccgttggccgcgagtggccggcctgtgaagccctggaaggcgaggggctggccaacatcgccagttccgacgatgacggccgccgcggtggatctcatcgccagaagtga

SEQ ID NO: 242452 - DNA, 333 bp, Klebsiella pneumoniae
atgaaacgcacttccttcccgctggcggccgtggccgcccttctggtggcttcggccgcccatgccgcccagcctgccgacgcggcccgcttttcgatcatgtcgccggtgcaggccgcctacgacgcctaccaggtcgaggccaaccgggcgcaaaacacaatggacaagatcgaggccgagctacgcgaacccgtgacggccgaacgccgcgagctgctggcggtgtcgcttgcagcagcccgcgcccgcgaggcggccgcgctggacaagctacaggcggaatcggcccttgcgcagttgaagatggcagactggaacgcgagccggtaa

SEQ ID NO: 242453 - DNA, 459 bp, Klebsiella pneumoniae
gtgctgaccgtggcccattgcgtcgaaggccaggaagcattgcgcgtgcgcaccgccgccggcgagtggcgggaggcccgcgtgatcggcgcggacatttcccgcgacgtggcgctgatcgagatcgagggcgaccccctgcccccgattccggttgccggcgtcatgccccgccaggggcaggacgtgatggcgatcggttcgcccggcggctacggcttcgccgtgggtgtgggcatcgtcgcgtggtatggccgcgatgccgcgatgctgtcccccgatgacttcatgctggtgacggcttcagtcatcggcggcaactcgggtggggttgtcgtgaacaccaggggcgaggccgtttcactggtgagctatggctatggcatctacacgcagaccgtgccgatagatcgcgcccaggcagttgcggccgagatcgaacgccgcgccgtgcggtaa

SEQ ID NO: 242454 - DNA, 681 bp, Klebsiella pneumoniae
atgaaaaccgccactgcgccgttaccaccgctgcgttcggtcaaggttctggaccagttgcgtgagcgcatacgctacttgcattacagtttacgaaccgaacaggcttatgtccactgggttcgtgccttcatccgtttccacggtgtgcgtcacccggcaaccttgggcagcagcgaagtcgaggcatttctgtcctggctggcgaacgagcgcaaggtttcggtctccacgcatcgtcaggcattggcggccttgctgttcttctacggcaaggtgctgtgcacggatctgccctggcttcaggagatcggaagacctcggccgtcgcggcgcttgccggtggtgctgaccccggatgaagtggttcgcatcctcggttttctggaaggcgagcatcgtttgttcgcccagcttctgtatggaacgggcatgcggatcagtgagggtttgcaactgcgggtcaaggatctggatttcgatcacggcacgatcatcgtgcgggagggcaagggctccaaggatcgggccttgatgttacccgagagcttggcacccagcctgcgcgagcagctgtcgcgtgcacgggcatggtggctgaaggaccaggccgagggccgcagcggcgttgcgcttcccgacgcccttgagcggaagtatccgcgcgccgggcattcctag

SEQ ID NO: 242455 - DNA, 1602 bp, Klebsiella pneumoniae
atgctgacgtcaatatattgcaaaaaattagttcgtgaaactttggtgttcggcccaggtctcaatactatattaggtcctcggagtggagcaaactccattggcaaatcctccgttttatatctaatagattttgtttttggaggagatagttttttaaaaaattgtgttgatgttattaatcaaaaagggcatgtaaaagtttatgctaatttcgaatttaacaacgtttgttaccggttctttcgaagcaccgaatttccaaatatcgttcaatactgcgttgggaatgaagagaaaacaattgctgaatatagggattttctctctgaacagtatggcttgactgaaagcgcaccaacctttaggaatattacatctcgattttcgagaatatggagaaaaggtaacgaagatcctgataatccattacacaaccatccatctgaaagttacgcagaaattaaagagtttttaataaaaacattcggttatgcagatttgttcgatgaaatgcacaaaaataaaaaagaacaagagagcttaaggagcagtcttgattcagcaataaagaaagggttaataagcaaggccactaaaaaagaagtgcgtgctttaatgtccgagctcacaactattaatgaaagaattaattacataaaagatgattttggtagtttcatttcaggtattgaatctattgtaaatgaaaaaaacattgaattgataaaggataaaaatagcttccaaaagcaacgttctgttttgaatggcaagattgaaagattgaaaaccaaccttcttcatgcaggaaccataaagggtaagtatttcgaaaagctaatagatttcatacctaccgttaatattgataagctaactcaagtggagtcattccactctggaatcactaagatattgacgagcaaaatcaaagaagagataaagattcttgagtttcaagtgaatgatattgaccaatcgctgattaacatagatgaacaaatcaaagcatctgctgggaagcttgataaaccaaaagagttaattgacgaagttctttcacttacaatacggaaaaaagatattgagagaacaatccattttacagaaatgaaaaatgatattgatgaaagtgtgaagactttacgtgctgaaattgatgagagggtagatagtgtattaatgggtattgaaaaaaccattaacgaaaatataaatattgtttgctctgagatatatcagaatagcaagatttatccaaggttacgcttgaataaaaaaagctacgtctttgagcattatagcgattctggcactgggaagtcatattctgatttgctgatatttgacatttccttcctgaggaatacatctttacctattttgattgaagattctttaatatttaaaaacatagagtctaaaacaaatgaagcaattatcgagtgtcttgctcagagtaggaagcaaatttttgtagccatggatcagttaagccttttgagtgaacgaactaggataatactgagaagctctagattcatgcgagtaagtagaaagatgcccgcattcggagaactgtggaatttaaaagactaa

SEQ ID NO: 242456 - DNA, 219 bp, Klebsiella pneumoniae
gtgatagtgccaaataaagcaacaccattaagagaatcaatcttgtttaaaatgctcgccatcctagaagaggactttgaaacaataggattacttgagctttatgatgaagtttcacatctttttgaaggtatagatgaatttgtattttctcttgacgtgctattcataatagaaaagatcaaggttaatgaaaaagggatattggaaaaatgctga

SEQ ID NO: 242457 - DNA, 756 bp, Klebsiella pneumoniae
gtggcagggaaaagaggatctatcactgaaaatatgaatatagccttatgtgatgaggtgaatggcatctgtccgaaatgcaataaagcactattaaagaaaagcggtaaaagccatgttaaggtatatgaagtagctcatatatatcctcactcccctcgaccaagcgaaattattttattaaagaatgaaaaaaggctaacgactgatgttgatgatctaggtaatcttattgctttgtgtaaggattgccataaagtcttcgataaccctcgtacagttgagggttaccgagaaatgtgtaagataaaaacagtatcctctcaaaacgcagaaataagaaggaacttatcaacttttcacttaactgaagaagtgaaggagttaatagaaaagctagcaagtaaaattaatcaagcacaagcaaatctagattttgacgctaagactattgatacgaaattacctgacgacaatgattttttattaaagtttaaagttcaagggtttgttaattatttttatgtcgatattaaacaactttttcaagagctggataaagatattcctggtacctctgagttagtttattccgaggtcaaaactcattatctaagtttaaaacgaagtgggttagataaagagaaggctttcgatgctctagtgagttgggttcatcttacatgtcaaacaaagaacaaggtcgcatctgaggttttaatctcgttttttgttcaaaattgcgaggtgttctag

SEQ ID NO: 242458 - DNA, 1224 bp, Klebsiella pneumoniae
gtgaagttacttttagcaccgaaaactacggaaggtcgctatctttcagtcgtattcattctctttttactcttggctgcaatgacatttatcgtctggaaacatcctgacatggccggacttgagggcgatagtcagcagcagaattactggcttattggtgggtgctgcattaccggatgtatctttatcatgttagttatgctcctgtggacagctcgcagtgccggtaaaaaggagtttgaggcgctcctggatgtcactcgtggtgatgacaataagagaaaagatgagagtgaaaacatctctgtttctccagcagtggtgatgtgtgccaggattcgtgaccatctgcgaacccgaattggaattcactggcggcgcaaagtccgcctgcttttagtcaccggcgacgaggcggcaatcgaacaactggtgcctggcctgcgtcagcagcactggcttgaaggcaaccgcaccgtgctgatttacggcggcagccttgcatcggagcctgaccgagaaaaatacatcgcgctgcgcaagctgcgccgtggccgtcctctggacggaattgtgcgggtgatgccgtcgtctctcaccctgacgccgcagataagcgagagcgacctgcacgggctggaaaaaatcagcgaactgctgggctatgccgccccggtctggttgtggaaactatgcgatagtgagtggccgcaggctgaccgcgcggtgcaggcggtaggggttagcttcccgttgcgcgctaccgaggacgatgtcgcccgtcagcttgcgcagatgctgcccacgctgcgggagcaggggatgcgccagatcgcggaggagacccgccacgactttctgctgcgtctgggacagcagcttatcgacggggggatcgcgcaatggcgctggcagctggcgccgtggctgaccgcctcgcggcagcggcttgcgctgcgaggcctgatgtttagcctgccagagcctcgtaccgtagatccgtatcaggaggcggatacctcgcctgcgggccagcctcatctcctgacgctgcccgccacctggctggggatcgtcgatgactgccgccgtttacgcgggcatcacgtgggaatggcgtgggagcggggcctgcgtgcggtctgctggccatcctcggcctgtgggcggcgggactgctgctctcctttgccctcaattacagtcagattgcttcggtag

SEQ ID NO: 242459 - DNA, 738 bp, Klebsiella pneumoniae
atgaccgacaccccctttatccctgattacctgaaaccggcgctggagcgactggccgcagcccgagaggcccatcttgaacaggcccgccggatggaggacaccctgacggccatcagccgcgcggaggagcagaaagcggagctggagcaggacaacggcagcgacacccgcacatggcgtgctgctttccgtgccgggggggccacgctgaccgatgagctgagaagcggccatatcgaacgcgtggcccgccgggagctggcgcaggagtgtgacaacctgaccgaagtgctggcctttgaacgtgaccagctgaaagtcgcctgcaacagcaccgcgcgggcattccggcaggcgcatcatgctgtgttgagtaaatacgctgaggaagagcttaaccgcgcgctgaatgacactctcggggcactggtccgggcgatggtgctgaaagccgaggtgatggaaaatccgctcgccaacaccaccggccatcagggctacaccgagccggagaaagaggtcatgcatcaggtggtgaccttcctgaccaggaaagtgagcgacttctccgtcacgccagcggatgagccggtgctctccctgaccggcttcccggccgtcgcgcttccgcatatggaccacgacgccgccagcacgcccggcgagcgtaaagtctggcaggagaaaatccgtcagcgcgaggctgacctgaaagcgcgggggctgctgccatga

SEQ ID NO: 242460 - DNA, 246 bp, Klebsiella pneumoniae; identical to SEQ ID NO: 97292

SEQ ID NO: 242461 - DNA, 738 bp, Klebsiella pneumoniae
atgaccgacaccacctttatccctgattacctgaaaccggcgctggagcgactggccgccgccagagcggcccatcttgaacaggcccgcctgatggaggacaccctgacggccatcagccgcgcggaggagcagaaagcggagctggagcaggacaacggcagcgacacccgcacatggcgtgctgctttccgtgccgggggtgccatgctgaccgatgagctgagaagcggccatatcgaacgcgtggcccgccgggagctggcgcaggaatgtgacaatctgaccgaagtgctggactttgaacgtgaccagctgaaagccacctgcaacagcaccgcacgggcattccgccaggcgcatcatgctgtgttgagtaaatatgctgaggaagagcttaaccgcgcgctgaatgacaccctcgggccactggtccgggcgatggtgctgaaagcagaggtgatggaaaatccgctggccaacaccaccggccatcagggctacatcgagccggagaaggaggtcatgcagcaggtggtcaccttcctgaccgggaaagtgagcgacttctccgtcacgccagccgatgagccggtgctctccctgaccggcttcccggccgtcgcgcttccgcacatgaaccacgacgccgccagcacgcccggcgagcgcaaggtctggcaggagaaaatccgtcagcgcgaggctgacctgaaagcgcgggggctgctgccatga

SEQ ID NO: 242462 - DNA, 360 bp, Klebsiella pneumoniae
atgcgccgaacggtcgagcgcatggccggtcaggagtgcgggctgctgactgagtcccatcagctccggggcaagcgtggccgccagttcagcaccgtgcgcctgcatgaagtcattcagccggttgcggatactgatgcgctgcaccgcttcatgggagcggatatagcgtccggcggcctgatttatctcccattttttgacgtccataatgtcgcgcagttcctgcataattgccgggatacgttcatccccggccagcatctgctcgcggtattcctgctctgcggccgccagttcggctttacggctcagccaggcggttttgttattctgacaggcctcaaaggcctgctgtag

SEQ ID NO: 242463 - DNA, 804 bp, Klebsiella pneumoniae
atggagccggcggtcagcaatctggctgaagcccgggagcagatgatgtccatctccggtgacgcgcagaaggcgaccgcgaacccggccgatctccaggcgcaaattaccctgctggagcagcagctgacggacctcaaaaaatcggtgctgctgctcagcgcgccggaggggatagcgctgaccagcggggagcatctgcaggtctcagccgggcataacctgattgccacggccggaaagaatgcggatgtcagcgtggtgaaaaatctgttcatcggggtgggcagtgccctgagcgtgtttgcgcgaaagcttgggatcaggctgatagccaaccagggaccggtacagatgcaggcgcagaatgacctgatggcgctgcttgcccggaaggaaatcagcattgtcagcacggaagacagtatcgaaattattgcgaaaaaacgggtcacgataaacggcgggggaagttatatcacgctcaatgccagtggcattgaatcagcgacggcaggtgagtacagaacaagggccgggtattacgtcaggcgggaaaaagcgcagcataagcctgacattgcacctttagctaatgcgataaatgacgacagccataatattcgctacctgtgtacagatgataatgggatgccgatgctgaatacaccttacagggcctttctggctgatggctcggtattagagggtgtcagtgatggcgaggggtatacgaagttgtttacttctgcacaggtacaggatgttctgctgcatatgataccggaggccatcaatgcctaa

SEQ ID NO: 242464 - DNA, 228 bp, Klebsiella pneumoniae
atgaaacagcccgccatcaccgtcaaagacctcgaatgcctggagcacctgcgtaacgtcggccagttcgtcggcgagctgatgcaggtgcaggactgtacttccctgcgccgtgacccggcccggcagttacagctcacctccgtgatttacctgatgaccgcccagctcgacggcgtggtcgaacgctgcaaccaccgctggttaaccggggagggcaacgtatga

SEQ ID NO: 242465 - DNA, 195 bp, Klebsiella pneumoniae
atggctacgaccctcaccccgtcacacccgcagtttgtctttgtgtttgccgccgttcgccgcgcagaccgtcagccccgcatctgtatgctccgcgccgtcgccggggatgaacaggccgcacgcctttccctcgcccgcgattacgtcctctcgtttgccggtcgcctgccggtggcggaggtgcgcgcatga

SEQ ID NO: 242466 - DNA, 192 bp, Klebsiella pneumoniae
atggaggccaacggctacaggaacgtgctcagcctgaaaatgttcgggctgggactgcccatgatgctgaaagagtacgggatgaattatgagaagcggtacaccaagcaggggatacaaaccaacctgtcgctgaaagaagaaagctacggcgactggctgccgaagtgcgacgaacccaccgcgacttaa

SEQ ID NO: 242467 - DNA, 150 bp, Klebsiella pneumoniae
atgagctacctggcgcccaccgggatgatttttatcccctgcaaggacgggatcagccataacgaaattgagtatgcctcgccggagcacgtcgccgccggcgccaacgtgctgctgcaggtgatgcttcagtacgcgcggccggtgtag

SEQ ID NO: 242468 - DNA, 1035 bp, Klebsiella pneumoniae
ttggaacgcagatacagagatgatattctggaaagtgatagaaggattttttctgccttaatgaactattctaatcttttcaaagatagcaatcaggactggataaaaatcaaaactgttgaaaggtttcaggacagtattgcaaaatactctcgcgaaaaaataaatgtttttgagagtttatatgaagaaggctattatcttacacaaattggcgagtttgaactgccaaaaattaacacaactgaaatttacccaaccattcagagttttgtggataaatttttaaatgaaacgttcccatatatagagcgttgctctaaaaagaaaatcgaacttgctataaaatacgccgacgaattaaaaggaagcgagtttggtgtaccatatcagataacaggaatgattaacaatgctaaagaatatttaattaatcttggtaaggttaaagaactgatgataacactaaataactcatccagttactatccttccacggtcagcgataatgaagccccccttagagttgatacaatattacaaacaatatatcgtgtggggcaggcgtttacccagaatcctcaatcatattcaaaacttggcgaagaagaattaaggtcgataatatctgtatcgctacgttctattccgggcattgatgttactgatgaggcagtcaatcgagcaggcaaagttgatattcgtatttatgatagtggaagtgatagaatcagacttattaccgaatgtaaaatatggactggagaaggtgctgtagcaccggcagttaatcaacttcttggctatataacttccgataatttacacgcgtgcttgattttttttgttaaaaataaagaatttttaaatgtgctgaacacggcagaacgtgtcatctcagaacatgttaattgtatatgtaagattgatggtctgaacaatcagtggatagagtatcgctttagaaaaattgatgatgaataccaatacttcaatatgaatgtgatttttttccacatccctaatataaagtaa

SEQ ID NO: 242469 - DNA, 717 bp, Klebsiella pneumoniae
atgaaaaatgatgacgttttagagctattggaaagcgcaaaagataaactcaatcacttctttagaataatagaacttgcaaaaaaaggagatgaatcagttacgatttcccctataatgctgaaagaaatatcagaacacttaagaagctgccttgattacatggctgttgatattgttaaaaaatacaatttacaatgtagaaaaatatacttcccatatggaaaagatgctcaaagtttagaaaaaatgaatccttgggtgagtcaactaaagcaagtttcccctcaaacttacagtcatatattatccgtacaagacttccagttgcctgcagaaagccaatggttgatacaactctgtaatttaaacattttaataaaacataacaaattggaaaggccgaagaaggtaaacaatgaattatcagtgggatacggtgggtttcttaagacaacggactgtgatgtattcattcatgatgtcaaaataatttctaatggaagagaatactcagtcggcagtctatcaataaaatcaactgatactattcagatagcaaatgaaaaattaagcgcagctggtttaaatgacatatcatgtacagagtatgaatcattaatgttttgcacaagctcaggtgttgatgtaactcttgtattaaaaaatgctataaatgccataacaagacttcactcgttactttatcaaaaataa

SEQ ID NO: 242470 - DNA, 258 bp, Klebsiella pneumoniae
atgtcattgtcgttataccgctcaacaagaactgtccaagctttaaagatagcatccgtctctatagatgaggattactcggcggttctgaaagatgcttcaggtaatgagattaccgtcagcgcggattatgtcgtgcgtgaaaagccaatgattggaggatattatatgaaaaatgatgacggctttgaggcttttatagttgcgcaggtttttgaaaaggagttttctgaatctaatggagatgttgaattttag

SEQ ID NO: 242471 - DNA, 255 bp, Klebsiella pneumoniae
atgcaagtggggggcaaagtcactaatcttgaaaagtggagtacctggagccttattgatgttcgcgaggacagaagccaccagcgaagccccccactcggtacgcatcatgatattgagctgtccgtacttctcacggtacttgagccaaaccagaaattccctacggctcatccgttcctgagcctctgcgatggtgcggcctccgatgccgttcataaccatttcgcaccagaactcatcctcaccggttag

SEQ ID NO: 242472 - DNA, 600 bp, Klebsiella pneumoniae
atgaatgaccgtgaaacgcgctgttacagcggggaggtcagagccgagcaacgcaccgatgaacctacccgcattctgggctatggctcggtgttcaacagccgttctgaacccctgtggggattccgtgaaatcatcaagcccggagcatttgacgatgtgctgaatgatgatgttcgcgggctgtttaaccatgaccccaactttattctcggacggagcgctgccgggacgctatccctgtctgtcgatgagcgcggcctgcgttacgacattacagctccggatacgcaaactatccgcgatctggtgctggcgccgatgatgcgcggtgacattaaccagtcatcttttgccttccgggtatcccatgacggtgaaaattggtaccaggacgatgaagggatcgttattcgtgaaatatcgaagttttcccggctgtttgatgtcagtccggtgacttatcccgcatatcaggaggccgactccggcatccgatcgatgaaagcctggcaggaggcgcgcgacagcggtgcgctaaagaacgccattaatcaacgaatggcgcgtgagcgcctgctgacccttcttaacgcgtaa

SEQ ID NO: 242473 - DNA, 1752 bp, Klebsiella pneumoniae
atggcaaccgttgcagatggatttcgctacgccgagcgcgtggtatctggcgatatcgttgctggcgagctggtgcgtcttgcgtgccagcggttctttcatgatttagaacacggcccggcgcgcggtgtttattttgatgaaggccgcgcccagcacgttctcgatttctataactttgttccccacgtgaaggggcatttgaccggcaagccgatcgagctgatggactggcacgtttttatcctgataaatctttttgggtttgtcgtcccgctgatagatgaaattacgtgtgaaggagttctggatgacgacggcgaacccatgtttgtacggcggtttcgtaccgcttatgacgaagtagcccgtaagaatgcaaaatcaactctttcatctggaatcggcctttatatggctggcgctgatggtgagggcggcgctgaggtttattccgcagcaacaaccagggatcaggcccgcatcgtgtttgatgatgcgaagcgcatgattaagctggctccgaaaacactgggccggttgtttggtagtaacaagctgaatattcaccaggagcggacgggttcaaaattcgaacctgtagccagtgatgcgaataacctcgacggccttaatattcactgcgggatcgttgatgagctgcacgcacataaaacccgagatgtctgggaagttctcgaaacggcaaccggcgcccgactacagtctcttatcttcgcgatcactactgcgggatttaataaagagggtatttgttacgagcagcgtgattatgccattaagttgctgaaaaattttgacaacccggaccctctatcaccgaaagatgatagctatttcgcactgatttataccttggatgagggggacgatcctttcgacgaggcaaactggccgaaagcaaatcccggtctgggtgtttgtaagcgatgggatgatatgcgtcgcctggctaaaaaggcgaaagagcaggtggcagcgcgggtcggattttttaccaagcatctcaatatctgggtgcagggtgaaaaagcgtggatggatatgtcgcgctgggaaaaatgccgcgatacctgggatgactcaactgcggccagctggtcaatgtggctgggcgttgatctttccaacaaaattgatatttcagccgcggttaaagtatggcttgccccaaatggtgatgtttacgcgcgttcccgattctggatacctgagggacggctggaagcctgcacaaaacagcaggcggaactttaccgcaaatggaatcaagcgggatatctggaatttactgatggggatgttattgaccatgccgtgattaaagaggaaacgatcgagtgggcacgcggtgaatcactgaatgaattcgcgtacgacccctggagtgccactcagtttgctttgtcggtagcagctgaaggaataccgattgttgaagtccctcagacggtgaaaaacctgtcagaagcgatgaaggaagtcgaggccaagatttacgccgggcgttttcatcacgacggtaatccggtaatgacctggatgatgtcaaacgtcaccgtcaaaccagacaaaaacgagaatattttccccaacaaggccaccccagaaaacaaaattgacggccctgtcgcgatgtttattgcgatgagtcgcctgcttgttaacggtggtggtgaagttgacttcctgtccactatcgaccctgacgaagaccttttacttctatga

SEQ ID NO: 242474 - DNA, 714 bp, Klebsiella pneumoniae; identical to SEQ ID NO: 16849

SEQ ID NO: 242475 - DNA, 372 bp, Klebsiella pneumoniae
ttgactgtgttttttagccgtgaagtcatttccagaatcgtgcttatcatcatggctgttgccgtgctgagcagttcgcttatggcaaaaccacaggctgtctacaacgtccaggatacaacgaccatcagtgaccatcagcacgatagcgatgaaccgctgaatgagtacgatccgctgctgttccactcgcacggtaatgtgcaccacctcaatgccgatcattcccacgatctgaacaaactcttcaccctgactgctttgcaggcctggaacgcgggcatacgggcgacctttgcgctgagttcagaacaaattctgcgaatgccacaggccacccccgaacgccctccgagatccctgtttgcgtaa

SEQ ID NO: 242476 - DNA, 831 bp, Klebsiella pneumoniae
atgggcggatttccacacggcagcggcgcccggcaaggtgggccgattcccacgtggcagcggcgcctggcaaggtgggccgattcccacgtggcagcggcgcctggcaaggtgggcggatttccacacggcagcggcgcccggcaaggtgggccgattcccacgtggcagcggcgcccggcaagatgggccgattcccacgtggcagcggcgcctggcaaggtgggccgatttccacacggcagcggcgcccggcaaggtgggccgattcccacgcggcagcagcgcccggcaagatgggccgattcccacgtggcagcggcgcctggcaaggtgggccgatttccacacggcagcggcgcccggcaaggtgggccgattcccacgcggcagcagcgcccggcaagatgggccgattcccacgtggcagcggcgcctggcaaggtgggccgatttccacacggcagcggcgcccggcaaggtgggccgattcccacgcggcagcagcgcccggcaagatgggccgattcccacgtggcagcggcgcctggcaaggtgggccgatttccacacggcagcggcgcccggcaaggtgggccgattcccacacggcagcggcgcccggcaaggtgggccgattcccacgtggcagcggcgcctggcaaggtgggccgattcccacgcggcagcggcgcccggcaagatgggcggatttccacacggcagcggcgcccggcaaggtgggccgatttccacacggcagcggcgcctggcaaggtgggccgattcccacgcggcagcggcgcccggtgggtatttgcattcacttga

SEQ ID NO: 242477 - DNA, 1542 bp, Klebsiella pneumoniae
atgcaactgaattccaccgaaatcagcgaactgatcaagcagcgcattgctcagttcaatgttgtgagcgaagctcataacgaaggtactattgtttctgtaagtgacggtgttatccgcatccacggccttgccgaatgtatgcagggcgagatgatctccctgccgggtaaccgttacgctatcgcactgaacctggagcgcgactccgtaggtgcggtggtaatgggtccgtacgctgacctcgccgaaggcatgaaggtgaaatgtactggccgtatcctggaagttccggtaggccgtggcctgctgggccgcgtggttaacaccctgggcgcgccaattgatggtaaaggtccgctggaaaacgacggtttctccgccgttgaagcgatcgcgccgggcgtaatcgaacgtcagtccgtcgatcagccggtacagaccggttacaaatccgttgacgccatgatcccaatcggtcgtggtcagcgtgaactgatcatcggcgaccgtcagaccggtaaaactgcgctggctatcgatgccatcatcaaccagcgtgattccggcatcaagtgcgtctatgtcgctatcggtcagaaagcgtccaccatctctaacgtggtgcgtaaactggaagagcacggcgcgctggctaacaccatcgtagtggtagcgactgcatctgaatctgctgcactgcaatacctggcgccatacgctggttgcgcaatgggcgaatacttccgcgaccgcggtgaagatgcgctgatcgtttacgatgatctgtctaaacaggctgttgcttatcgccagatctccctgctgctccgtcgtccgcctggacgtgaagcgttcccgggcgacgtattctacctccactctcgtctgctggagcgtgctgcgcgtgttaacgccgaatacgttgaagccttcaccaaaggtgaagtgaaagggaaaaccggttctctgaccgcgctgccgattatcgaaacgcaggcgggtgacgtttccgcattcgttccgaccaacgtaatctctattaccgatggtcagatcttcctggaaaccaacctgtttaacgccggtattcgtcctgcggttaacccgggtatctccgtatcccgtgttggtggtgcagcgcagaccaagatcatgaagaaactgtccggtggtatccgtaccgcgctggcgcagtatcgtgaactggcggcgttctcccagtttgcatccgaccttgacgatgcaacccgcaaacagctggaccacggtcagaaagtgaccgagctgctgaaacagaaacagtatgcgccgatgtccgtcgcgcagcagtctctggttctgttcgcagcagaacgtggttacctggctgatgtagaactggcgaaaatcggtagcttcgaagccgctctgctggcttacgtcgaccgtgatcacgctccgctgatgcaagagattaaccagtccggtggctataacgacgaaatcgaaggcaagctgaaaggcatcctcgattccttcaaagcaacccagtcctggtaa

SEQ ID NO: 242478 - DNA, 864 bp, Klebsiella pneumoniae
atggccggcgcaaaagagatacgtagtaagatcgcaagcgtccagaacacgcaaaagatcactaaagcgatggagatggtcgccgcttccaaaatgcgtaaatcgcaggagcgcatggcggccagccgtccttacgcagatactatgcgcaaagtgattggtcaccttgcgaacggtaatctggaatataagcacccttacctggaagaacgcgacgttaagcgcgtgggctacctggtggtgtcgaccgatcgtggtctgtgcggcggcttgaacattaacctgttcaagaaactgctggcggaaatgaaagcatggtccgataaaggcgttcagtgcgacctcgcaatgatcggctctaagggcgtttctttctttaactccgtgggcggcaacgtggttgcacaggtgaccggtatgggggataacccatccctgtccgaactgatcggcccggtaaaagtgatgttgcaggcctatgatgaaggccgtctggacaagctgtacgttgtcagcaacaaatttattaacaccatgtctcaggttccgacgatcactcagctgctgccgttaccggcatcagaagatgctgatctgaaacgtaaatcctgggattacctgtatgagcccgatccgaaagcgctgctggataccctcctgcgccgctacgtcgaatctcaggtttatcagggcgtggttgaaaacctggccagcgagcaggccgcccgtatggtggcgatgaaagccgcgaccgataatggcggcagcctgattaaagagctgcagttggtatacaacaaagctcgtcaggccagcattactcaggaactcaccgagatcgtctcgggggccgccgcggtttaa

SEQ ID NO: 242479 - DNA, 420 bp, Klebsiella pneumoniae; identical to SEQ ID NO: 138654

SEQ ID NO: 242480 - DNA, 1344 bp, Klebsiella pneumoniae
atgtcctcatattatttaggcgtaggatccggacgtgttagtgatcaaaaagaaagacaatttagttttgaaaggttttgtgaatggattgatgatgtaaaaaccaatttagaaggcgctaacaaagtatctagttcatttcttaaatcatttgctcaaactgttgatggtataccttctgaaaaaccagttgcttgtattattgatctaagcaaatataacggtttgttgactgtgtgttgtaaaggcaagcacaaaaaaataatatcaaattatttatttaaaaaatataattttggaatttcattttttgataaaacactactcccgtttgttataaatactaatggcagtaatctttcaaagatgaggggggccataaggtcagcgacatttttaccaagggaactggatttttatgttgataaaggtgaattaaaaacacgtaatcaaactctaacctttatgcttgacaatgaagttgtcgatgaaattgacattttcaacaataacaccgtaaaattaatatttgacaatggaatcacttacttaaatggtttattttataaattcaccctccccacagataatgcaagagttgcagatgagtttttctcgcgatttgtagaattacaagatttgttgtcaggtggattatcagaaaaagatgaggatgggttgagcggagctagttttagcccctcatcgatattttatttgatagatcaactgtcaaatgtgagaactaaatctgttcaactatctcaattgggaccattttatcaatatatccctaatgttgatttgattctttgtacggatatggatacagaaccagctgactttgtcctttcctcaagagacaaacttatctatgtacatatcaaatgcggtaccgcaggaaaacctgaatcttcagcaggttcgatttgcgaagtcggtagccaagcgataaaaaacatacactacttgattagtaatgataaaaacttacaatttgccaatttaaccaggctgagaaacccttggccaaaattaggaggtaataaacatcatatagaattagatagtagaataagattgtttgagggaactttcaatatcaatcacgacataaatgatgtcttagaaaaaataaacagacgaagagccagttcattagtaagaaaagaaatatggatcgttgttggtaacggattttcattgaatcattttaagtcacaatttaatccttcagtagtgaaaaaatcacaagaatcaatgcaatcatatcaacttatagactcatggctattacaatccaaaagtcttggtattgatgttaaattttttgtttctccataa

SEQ ID NO: 242481 - DNA, 1284 bp, Klebsiella pneumoniae; identical to SEQ ID NO: 97190

SEQ ID NO: 242482 - DNA, 429 bp, Klebsiella pneumoniae
atggaaaaccgagttacacattttccagaccatcagcgcgacggctttctgcggctgctgcaacagggccgcctgaaccgccagtgtgcgttcagaagaaaggcgggtcagcaacgggacactgacggcgtccagcggatcgactttttcaggggccagatcggtggatgcatccttctcctccattttttcatcggcgcacagcaccacaccgcgctgtactttcacctcctggccagtccaggaaaccaccactccggcagattgcttcatttcatccgtccatgcccggtgttttgcccggtgcgcgatggtctgctgttcttcccagacggcttccagagccccggccaagacgtcatcattcacgccggggttctcgtcttcatacttagcttccagagcttccagttccgcaagacgttctga

SEQ ID NO: 242483 - DNA, 348 bp, Klebsiella pneumoniae
atgttcagcggcatcctttttcttcatcttcgcggcgtcctgtgctgcgccagccagtccggcctgagagagtgcctgtacaatgtgtggcagcttcatgtacgagaaaaggttatcagccgtcggtttccaccagtcacgaaggtcaaactgaatggcgttttccaccccatccagcgaactctggtgtttacgaccaaattcatccttgccctgtacaccatctatggagcaggcggtgcagaaagccatcagtgccatcagggttgcgccatcgagcgtaaagaaggtggtcatatcctttcgccagttttccggcagcagggcttcaagacgttctttttctga

SEQ ID NO: 242484 - DNA, 660 bp, Klebsiella pneumoniae; identical to SEQ ID NO: 217098

SEQ ID NO: 242485 - DNA, 633 bp, Klebsiella pneumoniae
atggaagaaggagaagatttttcgacctattttaatcgcgagcggttccctactgatgagtttgacatagaaagtagctgtgatgcttccggctttatcaaaggggataaagaacgctggagtatcagtggtgatgttcaacaaattaaaaacctgcctgtaatcctctatagcaaacagacattgatgacttcgtcgaacgacggattgttgaagaagaacgtatcaggggtgcagagttccaagcatagctgctttgtttatggcgatacctcgttttctttcagtgaggtaatggtagccatcttcattagcgggctgttcttctatgcaccaaaagatgccgccagtagtcttgatgagctgaaagcgagtctggctgggctggaagaagaactggccgaagtaccaaaagtggattcgactggcaatgaaacagataaagaaccttctatagtcgtagccgaaggtgcttttgattcggtcacagctcacatggaaacagaagctgaggagtggcaatccattaagaagctgtgccagcgagaaggtgagctacccatacgcatcggtagtattaagatggctgagcctgctgagctacgcttgtgcgggaaaattatacgtggatag

SEQ ID NO: 242486 - DNA, 612 bp, Klebsiella pneumoniae
atgatggaagcaaaaaataatatattaatgatttcaggtgcaagtccaaatgcaggaaaaacatttataagtacaaatttagcggcgacaatggcctctagcggaaaaaaggtattatttattgatgctgaccttcgcaaaggttatgtacataaaatattaggttccaataatgataatggcttatctgactatttatctggaagagtatcccttgaaaaagtgattacaactgttacaaaagggaattttgattacattccccgcggtcaggttccgcccaatcctgccgaattgttgatgcatcctcgctttaatgaattgatttcgcaagtatctaagctttatgatttagtaattatagatactccccctatattagcagtcacagatgctgcaattattggtcgttatgttggtactactttactcgtggcaagatttgaaattaatactaccaaagaaatacttgtgagtattaaacgttttgagcaaagcggagtgaatgtaaaaggttgtatccttaatgggatggtaagaaaagccagtagttattatggctatggttacaaccattatgggtatgcatattccgaaaagaataataaataa

SEQ ID NO: 242487 - DNA, 603 bp, Klebsiella pneumoniae
atgcaaggctgcgctaatgacaccggcaagctgattggtaaggtggccgtgctccgcatggcttttggctgtgctgatacggttcctgcgctttccgaatggaagcgactcggcgccatgactaccaagggttttgactactccatgaataccgtcacctctgaggctgacgatacgaaaggtctggttgagaacctggtcaacaacatggacttcaccatctcaggagaaggtgagttccgcaagaaagacaagacgacggaagtcggcgctattgccatctcgaaatatattttcgatgaagtgcaggcaggccgtcagccgacagtctgggtccgcttcgacttcactggtgaagacgccggcacttatatcatgggctacttcaacaccacttcctggtctggtgatttcggcacctctgatatttccaccttctccggagagtggaaagtagctgatgcagacacggtggtatttgaggtcgctccgccggcgctggcgtttaccaccaacctgccaacgaccaaaagcgtggcggccggatcggctctgactatgtcggtcgtggttgagggtggcacagcgccttacacctactga

SEQ ID NO: 242488 - DNA, 519 bp, Klebsiella pneumoniae
atgagcagtataacagcgactgaggtcagtactttttttctgtcattgattgttcctatcgcaacaggaattgttgcggcaggatttactgcgtactttgctttgaatcgattttatcgggaaaaatggtgggagaaaaagtttgtagcatacaattcagttcttgataatctttttgagataaacgagatatacaaggctgcgtcgttatattatgaaaaagaatggatagcacagaataacgataactactctttccctgaagataatgttgattgggataagtttcaccaaattaaggcacaactactcagaatgtatgccttttcaccaatttcgttaagtttagcttcccggacattgctaaagagtttttttgaggcagataaagaagctgaaagaagatctttcgaggatggggagcatgactttagaatatatgactcaatgtcttctaagattgaagaaattattgaagcaattgttcgtgatgctgaaagtgagttaaaattcaaataa

SEQ ID NO: 242489 - DNA, 192 bp, Klebsiella pneumoniae
atgaaagagacaaagacgcgatatgacagtttgctggatagctatcaacgttggctaaacgggtttacaaaactggccatcataaatggcatgtgtcaccccaatatccaggccagccaccatctgatggtgggcagtctgtactttcccggcgtgacctgctccccgttgattagtacaccccgatgttag

SEQ ID NO: 242490 - DNA, 2397 bp, Klebsiella pneumoniae
atgtttagtcaggttgacatcggtagtttcggtagttttatgggcctcagttggaaaaatagccttaaggatgcaggcaacaacgtccagaatttcaagaggctcaacattctctacggacggaactactctggtaaaactacactctcgcgaatttttcgcgctttggaaacggggcgcattccgcacaactacgtggacccaaatttcactattcgtggtgacaaaggtgatgtgacacaagtaggcattgccggtcatggctacgatgttcgggtctacaaccgggattttgtgagcgataacctaagcttcttggtcaatcagaccgacggcgagatcaatacgtttgctatcgttggtgaaaagaataaagaaatcgaagatgccattaccgcaattcaaactaggctaggcagtgttgaatcgaaggcgggcctccggcatgagcttgaagctaaaaagaaagagcgagatcgaacgaaagacaatcataaaactgcgtctgatgctctagagggcaaacttcgttctcatgccaacaataagattaaacagaatcgcatctacggccctgctgtctacaacatagaaagcatcaaaaaagacatttgctcagtcaaaaaacctagcttcatagctctgacaaccgaagaacaagcagccaagatcaatctcttgaagcaagaagccctacctgatattaccgataccgtatcgattaacctcaacatcgaatcaataagcaaagtagctgtagaactcctttcaagattgattaagccaaccctgccaattcaggagttgttgaatgagacggctctccagatgtgggtgaaggaaggtataccgctacacaaagataagcgggacacttgtgcattctgccgtcagaatcttcctcatgacatctggcaggtattagactctcacttcagtaaggaatcctcggctctggagtcgagtatcgattcatgtctaacttctatcacagccgaagtccaagccattcctaacttcttgactttgactggcgataaattctacgcagaagaaaaaatattatttgaaacaagcaagatagcacttgctgaacatctgaaaggctacatgcaggaccttatcgctctgcaggcggcgttggataagagaaagaacgccatttttcagcaggtttccatgcctgtctatattcatgatccgactgcaattcagcaatgcgtgggcgacatcaatgatctgatcgccaagaataatggccgcacaatttcgctggagaacgataaaagcactgcacgagaatctctacggcttaccgatgtggcgtcttttatcgcagacatcacatacgatactgaattagcccgtattgccagtctcaagacagatgctgacaccgccaacactgcatttatcgaagctgaagccgaaattctcgaacaagaaaccgaagtgacccgtctacagggtcagcagaaggatgaacgcaagggcgcggagcgagtgaatgagttgctcagccacttctttggtcatgacggcatcgagcttgaagccaaagacaatgttgagaatacttcggttaagtttgaagtcaccagaggtggcaaatcggcctacaacttgagcgaaggcgaatgcagcctgattgctttctgctacttcatagctaagttggaagagccagaaagcaaaggtaaggatctgatcatttatatagatgacccgatttccagcctagacggaaatcacattttcttcatgttcagcttgattgaaagcctgattgcgaaacccatcaagaatgcagatggaacaaacagctatcgctacaagcagctttttatatccacccacaacctagatttcttgaaatatctaaagaaaatatcacttcctaatgagaggaatcacggtggataccaacatttcatcgttgagagaaatggaggggcaagtcagatttccctgatgccttcatatctgcgagactacatcactgaattcaactacctgtttcatcagatctacaagtgccgtaatcaaggtggagcgaatgaatctcatgaaccatactatggattcggtaacaacctccgcaagttccttgaggcatttctgttctttaagttcccgcaccatgatgacaagaacgatgcctttgaacggatcaagaaattctttggcgaagaggatccgacagcgattgctcttgtgaatagacttaacaacgagttttcacatctcgaatcaatccctgatcgcggattcaaacctgtggagattccagaaatttccaaggtggcaaactacgtgttggacaagatttatgcgtcagatccgcatcaatacaactccttgttaaaaagcattggcgaaccgccaagatcactttag

SEQ ID NO: 242491 - DNA, 1158 bp, Klebsiella pneumoniae
atgggtacatatgcaagtatcacgctaaacggatttacaatcgaagagtggaaaagtacttggcatcgctggcatttccgtgaaagcgagcgcgtacgtgagcttgataaagattcaggcgaagttatatttcaaggatatcgttcaactgctggtactattcgtaaacggctggcactggaaggatacacagagaaaaaactggaaaatgagtttaatgacgtgcgaaaaacctggattagcaaattggaatcgtggggagaaagcgattacgaaagtgagctaaaaattctcagacatcacactaacatcaatgaatggattcatctgtttattgacgctaataaaattagatattctgagcaagaatcacaaagtctgcacaatgataataacctactaaaatttatgctttcagacgattttgatgaatacccaaattataccgctggagactttcactttccatgtaagacatccgaatgctggacagttgccattctgagctttaccacagatgatgcattggttgagttagatatgactgatctaattagtgctggctgggcagatgactttcacgacattgcggaaatgcaagcaggtaagacgtcattttatagtaacttctccagtttcattgatgaactggtaattcttcccaagaatcttccggagtttcacttaatgcaacgcttagcattcagtggcatattctcagcattagaagcttacctgtctgacacaatgaaaaagcaggttcttaatcgccccgcagtaaagcgtcgatttgttgagtcccatgacaaattttctggcatgaaaaaattcacctttaatgaaatatttgaaaaaatggatgaaattgatcagctgataattaatgaattggattttatatcctttcataatatggatgttattcctgagctatttaaaagagtcctttttatcgactttccaaaagattgcattagagcattacgtgaagcggtaaaaaaacgtcatgacatcgttcacagaaacggcaaggatacatcggggaaattaatttctgtaactaatcaagatgtgatagctcttactgatctggttaggcgagttgtttcccatatagacaatcaaattctaaatatacaacgaaatgatatcaaatga

SEQ ID NO: 242492 - DNA, 147 bp, Klebsiella pneumoniae; identical to SEQ ID NO: 220317

SEQ ID NO: 242493 - DNA, 255 bp, Klebsiella pneumoniae
atgggttttatcgtcaactctaccgatttgaaagaaattgcaatagcgttgatagaatccaaagccttctgggggtgtttgggtagcgcgatatgggcattcaccaagcgaaactcccgtaaaaccatttttgttgagaaagacggctataaatttaaggctaccgggatgtctcaggaggaattagcaaaatctcttgaaaatgcgaaaagcctcatagttacagctaagaataatgatgaccgtataagctag

SEQ ID NO: 242494 - DNA, 264 bp, Klebsiella pneumoniae
atgtcgttttctttgagagtggcgcaaaaggcagcagaaatatccgaagggaactgcaacttcaaaggggctttgtccattaaaatcacctatgagacatggggggcaaggttaagaaatttcagcatttttgctcaggccgcactgtcatcactgcttaacaaagatactgagcttctgttttatgatgacgatattgcagagtggacacgtggcatgaaccgtcaagagactaactctggaagaaacaatctgaaatcctga

SEQ ID NO: 242495 - DNA, 675 bp, Klebsiella pneumoniae
atgagaacaatagtttacgtagatgggttcaatttttaccatggattggtcaaacgttcgggatataagtggctggacctttataagctctttgaagaacaactacttccgataagagcaagagagtcacagttgattcaggtgaagttcttcactgctgagatcaaagctaaatttgctacccgaggtgagttagctcaccaggctcagcaagcttaccatcgagcattactgcagatttatggcgagaagctacaaataatcaaagggtactactcagaacgtcaggaatgtgcgatgaccttcaatgaggggtatcctccatcgaaaacggatagaacaacggtctggaagttagaagaaaagcagactgacgttagaatggctttagaaatgtatcgcgatgcgattcgtggtgaggcagagcagttggttctctgtactaacgattcggatatgataccgccaatagaaatgataaaagccgatcgacctgaattgaaaattggaatcgtagtaccaagggagcaagatactagtcgagttattagtagtctggctagtttaggggattggagcctgccatatgtatcctacgaagctttgagattagcgctattaccagataaggttcccactagacggaaaccaatactgaagccaaatcactggtaa

SEQ ID NO: 242496 - DNA, 489 bp, Klebsiella pneumoniae; identical to SEQ ID NO: 227992

SEQ ID NO: 242497 - DNA, 831 bp, Klebsiella pneumoniae
atggttaagggcgtggcagacgttactcattaccacggaacacctgtatggggtgacgccggtaacgttcaccgtattgcggtcaccggtgctggcgcatttgtatcgtatgcacgtcctgaccaattagctgcatcaattaaatacgccctctctgttgctatagataatggagctttttcagcgtggaagcgtggccttgttattgactggcagcaattctatcaatggctgattccttattatcaccatcccaagctgtcattttttgttatccctgatgtggttgaaggtggcgaagctgacaatgacgcacttatcgccaagttaccacgctgtttcaaagacaaagctgcgccagtctggcatttgcatgaatcattgcaccgtctggttgagctttgccgggagtggccgcgtgtgtgctttgggtcgtcaggtgagtacgcaaccatcagaacccagctctggcatcgcaggatgtcagaagcgtttgaaaccatttactgcaaacatagtttctcaacgcaggtgcacgggctccgcatgctcgatggtagggttttggggaactatcctttggcgactgccgatagtacaaaccttgcctgtaatgtgccgaaattcgaagtcaaatacccggagctcacaaaagcaattcgcgacgccgattatgcgaaaaacctttctgaggatgaacttaaagccgtcattctcaaacgccgttgcgccattctgaaaaatactattgaggccgtatcccctccatcgattgaaagctggctatcaaaagggttggctccgcttcaactggagttggctatcgcatga

SEQ ID NO: 242498 - DNA, 990 bp, Klebsiella pneumoniae
atgatttttaaagtcggtgatgtacatccgaatgcacctcatttgttcgcagatcttgccgaattagcgacccttataaattacacgggtcgctttgacttaaataaaaatgatttgatgactatcagaaatcaaagcgtaacaagtgctgatgatgcagaccaagaggaagaagaagaaaagaacgaaggaagtgatgccgaaaggaatgatagacttgagagacaagttgaggatgtttggactcagcttgaatatcgtcagagcttcctaaatgataattacccttttaaagtagagggtgatttcatttacttgaaaaatgatctcaacgaactacagcgaatttatctgttcctcttggcttgttctcgcctaagatctttcaaaaaagcccgaaagggaataattcagttttgggcaagatattttgcaattataagcaaatttgccacaaccgctttgctaccaaatcattcaacggttcggatattcgatgctaactctcaagatagagtcgattactatggcacagatcttagaaaagcattagtcaaaatgggaacagatctagcagttccctcaattaatcatgccgaatgccataaagccggcccaacgggagatgctgggtttgatattattgcaactttagaatttggcgatggtttaagtagtaactatggtattttaggtcaatgtggtgcacaggaaaccgaatggccaaagaaaacacttgaagcacatgcgcttaagttacgcacgttttttcaagtacatttcgatttacccagcattatgtatacgccgatcttctatcgtgattctcagggaagttgggttgatagtagtccttgctccggtgtactcattttagatagagcaagaattttattcttacttgctaaaacaactcactgccctactctaacagcagagcaatggtttgaagattttgagaacgttgtacgagatttgaaaatagaataa

SEQ ID NO: 242499 - DNA, 1119 bp, Klebsiella pneumoniae
atgcaagaaggattagagttcattgaacttcgcttcttagagctagatgcagaaaaccctcgattgccggaaagtgtagaacgtacaccggaagcaatgcttaatcacattgcgttaacaacttcaatcgaagacctgatgaatgccattgcggagaatggttttttccccggagagccactggtagcaattaaacaaggggacaaatacattgtcgtagaaggtaaccgccgtcttaccgcagtgaaactcattcataatccatatgattgtgctcgtcctagtaccagaatgttgacgattgcagagcgcatgtcgaacaaacttgatactttgaatgaacttcccgtaattgtccgcaaaactagagctgaaatactgccataccttggatttagacatattactggtgttaaacaatgggaaccattggcaaaggcacgttacattgagcagctttttcaattgacgccccatggagcaacaactgatgagcgttattggcatgttgcacgtgctataggtagtcgtaaagatcatatcaaacgaaatcttgatgctttagctgtctacaagatacttgagcatcataacttttataatattgatggtcttgacgaagaatccattaaattctctatcttatcaacagcgttagctgatgagaggattggtctatttgtgggaactctctctattgatgaagatggcgacagtatatcgaatgatgtaataatcagtgacactggcatcaatagagaacacatccaagaattaacagaatggctttaccgcaaggatgaacttggtaaaactcgcgttggtgaatctagaaaccttagagaactaggtgcaattattgataacaaaaaagcactaacagcttttaggcaaggtgctgaattaaaaattgcataccaacagactgaagatgtcaggcaagactttatgcaactgctatttagagcggaggctgctattaccgaagcagcaggcatggttgctactattgactatgatattgatgcacttgaactttctcgccgtctatctgcaaacatcaaactcatcggaaaaactttagtcgataaaaaagttgaggatgatgatgatttttaa

SEQ ID NO: 242500 - DNA, 3636 bp, Klebsiella pneumoniae
atgaatattaacgaaactccccgctgggaagatggcatttatcagattaaacgtggcgacagggtcagcggtggaaaagatggcacggcgaatattcagcccggccaactggcaaacaggacgctattcctttatgaaaacctgatggaaattcgcgcggcggtgtattcggaaattatgattgcatcggatattgcagacgggatttccagaacgcagccggggcagtatttccgggtttatcagggtgaaagcagctataacgcctttatttattattataacgatgacggcagggcgtatgctgtggcaaaagaggcgagcggtaaaatgctgtctctttatcacacatctgtcgggctgtcaggcagtcagccgaacctgtttgataatgatgtcagcgatattcgttctctgccatacctgaaaccatccaatgttatcccggtaatgactgaatggaatggtaccccctgctttgcagtcagcacattggcaggggcagcagcagaacatcagatttggatgggcgattttgaggcgagtaattttccgtcagaatacatctcgtcgtctttaacagtattgcatgcagacggaacggaagggacagcacctgtcagagtcattttggttcagtgggatgagggaggtaatgaaatcctttctcatcgcgccattgttaccgttgccacgaaacttgaggtgacggatcctgttattgtaccgttgccaggcattgcaaaagccccggagtgtacacatgtttctttgtttctgggggttcggtcgtcagtcgcggatacagtgagaagtgtgcattttcgggatttaatgctatgtgatggtgtgaatcctgtctatcgccgccggccagccagcgcaccaaaaacagaggaagcgattgccggactggatcacctgtctttccatacgccaaagactctggcagagacatttgaccagtggatgcagtcatttggtgcaaagaatatttgtaatgagccggtctttgaaaaatatactgacggtaaggtgccggagggatggtcaggcggcgcggttgttgcaaccattgatggcgtaaaaacactaaaaacgcccgggagcgtgggcgcgctggggatcatgtctccgctgtatgacgtatcagatttaaccgatcgccatatttctgtttctgtcgatatttatcggaagaaaggcgatcagggtattgatgcgggcggaaataataacctgcgcattcgccttgccggatatgatgaaagtggaagactgattgattcagcatggcagaatgcgaaagggaatgatgataataactggtctgctacagcaaatcagtattacacaaggaatgttacccgcagtgatatcacgacaagaaagcgtattaacgtcgcccgttctttggctctgtcggctgatatcaaatatataggtcttaatattcgtgttgaaggggtaaacggcatcgcctgccctgaaatgcatttatcgaatatcgttatttgtgctgcgcctaccgcgatttttagtccgggcaagctcccgcgcagagcaacttactcaggtggtgacgggcttaactggatcactgagcaaatggcagcggatattacaaaagaaaaatcgttctggaatgacctgccgaatctgtttaccgacagccaactgaaaaataccgctgccggacaggccgtgccggggtgggataattcagcaaaagcggtgctgaaacgcggttatatgacgctcgaacaacctcctgctggtactgtttcagcagtggggccaagtctgttacccggttttgaagtgtctgtatcccgcttcccgtcaggccggttctccgctgcggtggatattatcgaaaaaacaggcgaccagggcgtgaacagcagcggtcagaataatctgcgcgttcgcatctgggcgaaggatgccagcggcaaactgataaataccgcctgggcaggagtttccggaaatgatgatgcggcatttgctaccgggcctcagtattacacgcgctatgttccgagagaggatattacgtcccgaaccagactggttattgcggaaaatatccccgtaccagcggaggctgtggcgctggtctttaacattcgtgcagaagggaccaccggtgcgccgtgcccgcagatgtatatgacgaacttcgtgctgcgaaacggggctgactgcacctggtgcgcagaagcgcaatccggccaggcgtcctccgcgctgtcagaggtgtttatgtcgccgggcggttccgacgctaatactggtgtttctgcgtcttcaccgatgaagacactggccgctgcaatagcaaaaattaatggcgtgggttccgtttatgtcgctgccggtgattattcactggcagactttcaggcggatttttcggcggtcagaaatgtggcgattatcggggtgacgactgcggcctttaaatacccgaccatacgcggcggcgtgaaactgacaggcatcagtaaggtcagcggctacaaccagatttattctgcgccactgaccggattcgccagcggtacgcacccgtcatggctgtggattgataacctgcctgatgaggatacccgcgaaacggctgaacactatcatccggttatgcggggaagagcgcaccggatggagtgcacaaaaatatggctggccaatacggtaagggatgccatcaatcgtgatacgccggtggcgtggtcaaaatcggacgcactcactgaaattgacggcagcacacaaccccgatgtgtatgggtggagtctgagggggtggtgtatttcacatttcctgatggtggcgacccgctgacgtcagggctggatgtgtatgcggcacccactgtacagggcatattccggggcagtgaaacgcagttctcagcaaagggacacgcaattgtgacaggacttcacttgcgatatgcgcggctgggaacgtggggattcaggcaatcagtaatcagtgatattaccgtgctgggggccgctgaaaattgttttgatatcgggaactggacgacggcttacaactgcaaagcggctggctccgggtcgaggaattttgtcgggacgtatgacggattcaacatgcataacttctcggtattcacgcattacacttgctgggctaccgactgtcttgatgacggctggtcaagtcatgagaactgcacagagacgggttattcacctgttgcaaccctgaacctcggctccgggctgactccggcatacggtgcggaggccacgtattacgatccctatacgcgcggtaatgcgttacaggttcgcaagaaaaacagcaaaacagcgggtattgaatcgcatcaaagtccaatcgtcagcgacccaggagtatcaacggtggtatgggtttataacgggatatctgtaggagattatagcggttatgtctcaggcgacactttcaatacaccggcaaaggccacgcttgttgcggtgaactgtaaagcaattgatcccgtttactatggttttcgctgtacccggattattgactgcgggcattcaggaacgggcacgccacgtcacgacagaaccagggtttcagcaacaaaactgataacagagtga

SEQ ID NO: 242501 - DNA, 759 bp, Klebsiella pneumoniae
atgggtacaatgatccgactgctcaacgctgtggcagataatgacagcctggaaatatttccaattccctacacgggggttccgggagcgaaattcgtctctgaaacacgtatcagtgcaaatctttcgcgtgatatttccggtaaccgaacgcctgtttcaatcagcgggtctccgtcattcagtgatggatacgtcaggggcggaggagctatatcaacacataacggactaaaagcggcatatgctccggcggcgaatagctcacgaaccatgtgcgtggttgcgagattagtcgcaggggttaacggggatgcttttgcattcagtgattacaacattaatagcggatgctctttatttattcgcccatcagatggatggcgtgctcaggttgtggtaaaaaagaaaaatgacggcgcactcagtgtggtatttcccgcgccattaccgaacctgccagtaatggaaaaaacggactggcattttgccgtactggtcattgatgcagaaaaccgcaccgcatcgtttaagctcccggcgctggggtattctaccagtgcgacatggaccgcagataaaacgatacctgtaggggctggagaactgcgcattgctggcgcttccgcagcagccgccgatagttgcgatgtcgcctttgcgacataccatgaccgggcgctgacagaaagcgaaatactccagcagtattatgctgcaaaggcttactgcgatgctgtcggtgttgacctggtatag

SEQ ID NO: 242502 - DNA, 150 bp, Klebsiella pneumoniae
atggatgaaatctgcattaattcgctcgattatccgcccctgccgatccgcaattgcgtactcatactcatcatcaatgtcgttcgcacttacaccggcagcggcgggcgactggcttgcatgtgcagcttctttgatcggttcccgtaa

SEQ ID NO: 242503 - DNA, 1026 bp, Klebsiella pneumoniae
ttgaataattcagccatgccactgcgtctgacggtggtctttgccgcgtctggcgatcgtaacagcattcctaccgacgccaccaccgaaacgctgaatgggggaaaggcatcattcgatgttggcttccccccaatcaccagaatcgctctctcatcaggcgggaaaccacctcaaggtcaggattttaacggtatattctatgagtcttttttgaggcaccagtggaatcaggctgggggtggatatccatttgattcggcttatgcaaccgctattggcggttacccaaaaggggccgttgttccatttagctctctcgacgggctttggctgaacaccctcaatagcaacaatgggacacctgaaaatacaggtggtggcgcatcagggtgggtccctttgtcaagttatggtatttcgtcaataactgcatccggatctgcaaatatcacgctgactgccttgcaggcttcacgttcagaaatagttatcagcggagtgctaactgggaatatctatttgtttttccctccgtggattaagaaatggaaggtcacaaataatacctctggtggatttaatgtcgtttgcaaaacaattaacgggagcaatacagcaacattatatcctgcagggcgggggcatattcgctgcgatggagcgaatatttatttcatagatgctaccagcgggcctgggcagtccggagggttcctttttggaaatggtgctcgtcttgcctggggttatacggatgccaattgcaatgttgctggggccgatggtgaatacgaaacggataacatttttgttaccccaacgtttacaaccagcgacggggtatttggatttaataccatctgttcggtaaaagtgatgcccattgatatttctggggtcgggcagaatgaacgctcatggcttatggactcgacgttttcaggaagtggtttttcatttcgttctgcatgcaagacgcagaacgcaaccattagaactcgctgggaagtaataggattctga

SEQ ID NO: 242504 - DNA, 648 bp, Klebsiella pneumoniae
atgaaaaaaataataaccctttctgcaatttttataattatttccgggtgcgccagaacaccaccgacagccgagcagcaagctaacgcttttgataacgcgcatcaccgatcaaactctggtaaaatatggacagttacagagcttaaagatgattataaaaaaataacagggaattatttgattgttcctgaagctctgtcttgtgggtggcatgatgtatgctattacaacgcatatgctaatgctcatgatgatggtattaaaacattcaaaaataatgaagtgcttaaacgacaaagtgagcagaaaaggaaagaagaggattgtagaagcaatgaaaaatgtgcggctaaaatggaaattgactcagcttcatacacgttaaatagtatttactattctctaatggcccgatacccataccagcaggctgattctgatgctggggtaaggcgtatgtgccgggcggctggcgaggctgagagatctggcgtttctcttgaattgatgaaaaagaacatcagcttaacagaaggaattggccctgaaatgagataccaaataatccaggttgctgaggcctgctggacaatgagcaagtacggcgttcctgacggtaccacgcagatcaaatcagtgtattaa

SEQ ID NO: 242505 - DNA, 270 bp, Klebsiella pneumoniae
atgacaaaaatgagcaccatttacagcagactttcatacggcaccgggaccgcactgacgggctgcggtgtctcagcaaaggcgtatgccggggcagttaaggcagaggtatggattttggccgacaaaatagcggggatgaccctgagtgactgggcaattattgtcggtatagcctgcaccattaccacctgtggggtgaactggtactaccggcggaaagaacgcgaggatcggctcaatggctatgacaccaaaactgaggaatag

SEQ ID NO: 242506 - DNA, 753 bp, Klebsiella pneumoniae
atgattcattatcacggaggaccgattacccctgacacctgcgcattgaaagcgtggaagggtcgacatgcctttattagcttcgcgaacccagggcaactggccttggccagcgaggtcacccaatcctttgcacttgataatggagcgttcagtttctggacaaaaaaacgcgtcgtcgactggaacgagtattacgaattcgtccaaaagtggatgaaccatccgcgtttttcattcgcagtgatcccagacgttataggaggaacgagcgaggaaaacgatgcactgattgaggaatggccacacggaaacatcattggagcacccgtgtaccacttcagcgagcctgatgaacgttttattcgcctttgccatgagttcccgcgggtatgcatcggctctatgggggagtatgacgccaagcggccccgggcatgccgcgcgaaactccgcgatttaattcgtcatgttgtggataagaatggctatccgattaccaaactgcatgggcttcgcatgcttaatgcagacatcttccggcacattcccctttcgtctgccgacagcacaaatgtagccagaaatatcggcattgataagtcatggtcaaagtcagcctatgcgccagcgagcaaggaaacacgagcctcaatattggttgagcgaattgaatcatacaacagtgcgagctcacttaattacgacgaagagcgagaccgttttacacctcaactggctctggaggtatga

SEQ ID NO: 242507 - DNA, 219 bp, Klebsiella pneumoniae
atgacccccgaactggaaaacgctctccgcgcccaggctcgtcgctgcgcagaagagataaccaaagcgatgagcgtaaagcctaaaccgaagtggaacgctgtatgcccccccatccttcgcaagcacttcgagaaggtaaagccgatgggtgtcagcctggtgaaatttgtcagtgttattggccgcatgaatgggcggtatggagtggaatcatga

SEQ ID NO: 242508 - DNA, 783 bp, Klebsiella pneumoniae
atgaaactggaagcctccctcaaacactttagcccacagggcatgcacatcagcgacgacgtgaaaagcacatcaccgaatcgccttaacggtacagacattatgaccgggatcggagtgaccagcagccgggcgcggttcgggctggcggcgttcttcggtaagacgggcatcagtaagtccgatgagcagttggcagttcaggcgctggcgcgacatgccattgatacagcccctaaaaacgtgcgaaaggccgcgggtaaagcgctggggcgctgctgcctggtactggcgcagtttgcttttgctgagtattcccgttcagcggaaactaccggggtctgcaagacatgcgagggaactggtgtaacaaaatcagttgaggccgttgttaagcatcctggaatacacaaaagcgacggagaggaaattgtcgccccgattgtcaggcaggagatagtagtacggcagtgcgttgtatgcggtgggaagggggtcattaacgcccgctgccgttgcggtggttccggccaggtgctggaccgcaaggcgacaaaagggcagggagtgccggtatataaaacctgtgagcgctgttcgggaaatggtttcaccagcgtcaagtcagcgaacgcacaccgggcgatccagatgtacatacctgacttacatcagtcctcatggtcacgcaactggaagccgttttatgaagggctggtggatatgctccacaaaggagagagacaggccgcggctgaatttgagaaggcgacctgttattaa

SEQ ID NO: 242509 - DNA, 243 bp, Klebsiella pneumoniae
atgattttttcatttataaacattgcgatcaacgggaaaatacatgctaatattaaggtgacgcccgtagataacaggttacgaataattttaggtaaaattttattttgttttaaagcaaaaataattccatcagtgcttgaacttgcagaactaaagatggaaatggcggccaatacaaacccaaacaaaatgcctgccaccgtagataatactccggctgtacttaagatatcagagtga

SEQ ID NO: 242510 - DNA, 933 bp, Klebsiella pneumoniae
atgactactacagccacctccgcgccactaaccaaacaaaaaaagatgcgtatcggtttcttccaaagctcttcaggaacgaagtcaactacatcaaatgcacaacttgcatttgacaaaatgtatacaaccgttgttacaccttcgcaaaactcttatacagctgagttcaataagaaaaaattaaagattgtattcttagaaaaagactcacaggcagagttctattttggttatctatcatgctctcgtgatggtttccacttaccttatattggtgatgaaaattgggacgaacacaatattccattagatgataaaaaatatatagtcgaacgcacttattttatttactactataagaaagatattcttgttttatctcaaaatcatttagggcctaaagattccgatttagcatttcttttattcaatttttctgaagtaaacaaacctgtagcgtttgaggcaatttggaaaaaagaaagcgtaaaagaactacttgaaacaggaagcactttacgtagctgtgaaattacactcgccgctccgcgtaattttagcgcaacggattatgacctttcgaattcattttccaagagtatgattgaaatgatggctgggatgggcggttcacatttaaaactatcgctcagaggtagagcatcgcaacgtaaattagtccgtggatatctcagcgatgaagtaaaaagcggaataaaggaattactagaaaaagttcctcatttattacgtaaagctaatgttaccgaacctaaaaatactcgctcaaggagtcttctcgatcaagttctgatcagtgaaaaaaacgttaatacaaaagatggctacgcaaaagaaactgatgtgcgtactgccttgatcagtgctaaaattgaacatagtcagtatttaaggcaatatgaaatctga

SEQ ID NO: 242511 - DNA, 354 bp, Klebsiella pneumoniae
atggcggcggtgatgcaccatgatttcttcggcctcatgcctttcaataacgccatcttcaagcgcctgttcgataatctgatcaacctgtcccctggcagcagaggtacgcattgcacgactaaacaggtccacgcgatcgagttcttccaggtgcggcacatccaccagcagggcgccacgacggcgggcgaagtagtctgccagcagcgacgtgttggaaatgtcttccatcgcttccagctccgatacttcaaaaaatcgacagccgtttttctcgtagaggttgttgttgaactgcgtcacggtcatacccaaggcgccagccattgcttcgcggccacccggatatga

SEQ ID NO: 242512 - DNA, 198 bp, Klebsiella pneumoniae
atgcaccatgatttcttcagcttcatgtctttcgattaccccatcctcaagtgcctgttcgataatctgatcaacctgtcccctggcggcagaggtacgcattgcccggctgaacaagtccacgcgatcgagttcttccaggtgaggaacatccaccagcagagcaccacgacggcgagcgaagtagtcagccagtaa

SEQ ID NO: 242513 - DNA, 501 bp, Klebsiella pneumoniae
atgtatctcattgatgccaacgtcttcattgaagcgaaaaataaatactacaatatgtctttctgtcctgcattttgggactggcttctgcgcgagtgtgcggggcagcatattttcagtattcaaggtatttatgacgaacttgttaacggaaacgatgacctacgtacgtgggcaatgaataatcggcattttttcttgccgatgagtgatgaacatacgcaacgcaatttggctgcggttgcagctcatgtcgctgagagacaacagaatgttccaatggctgcagttgctatggcagagtttctgaggggagcagatacctggcttatcgcaaaagcgataactacaggtgctacaatagttacgcatgagagacttgatttacaatgtaaacgtaagtttctgattcctaacgtttgtagtcactttggtgtgcggtatattgacactttcgcattgttgcaacaattaaacgcatcatttattctggctgcatag

SEQ ID NO: 242514 - DNA, 1140 bp, Klebsiella pneumoniae
atgactgatttggcttacattaatccgcagatttttaattgggcactagcaagagcgcaagtgtcgcaggaagatctgtccctaagtttaggggtgaagctagaaaaagtggttgattggtctagaggcacccaaaagccaacttttgggcaggctcaaagattggctaaaaagttacatataccgtttgcgttctttttcctccccgcaccacctaaagatgagctgcaaatacctgatttaagaacgcagggtaatcatggattagccacaatcagtgtagatcttaaagacaccattgcttctgttgttagacggcaagaatggtataaagaatatttaaaagatcaaggagcagaagccttgagctttattgggtcttatactgttaatagtcagccaactgaggttgctgaaaatattcgtgaaacacttggacttcaaggcttagatcctagaggtttgggttgggaagaatatcaaagaaaaatagttgaagcggccgaagcggctggagtgctggtaatgcgaagtggtattgtagaaaacaatactcaccgtccgttaagcgtctctgaatttcgtggttttgctataagtgataactacgcacctgtggtgtttgtgaatctgagagatgcaccctctgcaaggttattcaccttattgcatgagttagcgcatttatggttagggcaaagtggtgtatctactggaagagctattgaagaacgtagggaagaacagttttgtaatgcagtagcaggtgaatttttagctccagccaaggatgttagggcctactggagtgatgaaaaggatttggacggtaatgtgggtgatcttgcaaggatgttccatgtcagtcgttacgttattatccggagagcatttgatctcggtttggtgtcttacgatacgtatcaagatttctacagagagctaatgcaacaattcactaatgctgaagggggaggcggcaacttctatgctagcgcaaagactaaaaatagcgcccttttcagtaaagttcttctaaatgagactctcagtgggagagttcttttgagggatgcagggaaattgcttggtatatctcctgcaaaattaacacattatgcaacagaaattggtgcctaa

SEQ ID NO: 242515 - DNA, 579 bp, Klebsiella pneumoniae
atgattaacccgtccgaggttggaaaagctggtgaaatggtcaggctgaaaacgctggaggccatctggattcaagggaagctgcgcatgtggggccgctggtcttacatcggcggcggtagtggcggcaatatgtttaaccagttactggcttccgggaaagtcactaaaacagccatcaacgaagcattacgccggatgaagaagtctggcatctcgaagccagagcttgaggcgttttttcgtgaaatactcgcggggaaaaacaaaagcggcctggccttctgtacagacgatgaaggactgctgattgataaggtactgggggcagtccttattacaggtggtcacaaagagctgtatcacctgctggtggagcattaccggttacggaagagcaaacgccgcatagcggaagagatatatgaaaagcatcccgactggtgctttatgacctgtagacgcagagttgatacgtggcttagtttggcagaatcgatgctgtacgcaccgatgtgtgatgtattcggcacaaatggcgacaagttttacttgcaaaatgagccagaaactgtttga

SEQ ID NO: 242516 - DNA, 267 bp, Klebsiella pneumoniae
atgaaaaaagtacttatcgtgtgcggtaatggtttaggcagcagcttcatcgttgaaatgaatgtcaaaaagatccttgccgaaatgaataaagaagctgaagtcgcacataccgatctgacgtcggcaaaaagcgaaactgccgatcttattctcagcgccaaagacattgcagaacatcttagcagtcactctgcaaaggtcgttggattaagtaatttacttgataacaataaaattaaagaaattttagcagaaaacatttaa

SEQ ID NO: 242517 - DNA, 1746 bp, Klebsiella pneumoniae; identical to SEQ ID NO: 180295

SEQ ID NO: 242518 - DNA, 786 bp, Klebsiella pneumoniae
atgaaagagcataggtatgaggaatttgtcaaagatatgttgaaaaggactttgagaaagaatgtagctgtatcagaaaaatatcaaacattatttcataaaaatatgtgggtttcttttgctcatgaagtaaggggtaagttaaatgaaattgatcttggtcatgatgctaagaaaataacgattcaactcaattacaacgaacttaaatttgagaatttcgctaaattggatagtattcacttcttgctagattgggatttacttcaggtaagtgatatttccttcaatggattgacagagaaaaaaaggttaggtttgtcaacctttagttccggccagcaatgtatgttgcttatcatcttaggggtcttgagtagcattgaaaataactctcttatttgtatcgatgaacctgagattagcttacacccagagtggcagttagaatttattaaactcctccaagatgtgttttcatcatttagtggatgtcattttttaatagcaactcactccccgcagatagtatctggattaagggacaagaatggttatatactttctctagaagataagaacttagttcaacatgattcttttatgaagtcagcagattttcaattggcggaagtttttcagtcacctggtttcaaaaatgaatatcttattagaacactgttggtgattatctcaaaagtgtcaaaggatgatgttttaaattcttctgatttaaagaacttgaggcttgcgaaggctttgttgaataaatcagatttcgggtaa

SEQ ID NO: 242519 - DNA, 279 bp, Klebsiella pneumoniae
ttgaccaccctgcgcgaggcgaagcggctgggtattccgaccatcctgctgacccaggcggtggactcgcgcttcagccaggaggcgcaggtggtgatcgacgtcccgcgcggcggggacagtagccggatgccgctgcacggtacggtgctggtctgtctcgagatgattgtcctgtcggtggcctctaccacgccacaaaaaacggtgaaatccctgaaacgaatcaacgatctgcatcgggctatcggtaaatccggcggtaaacggggccattga

SEQ ID NO: 242520 - DNA, 654 bp, Klebsiella pneumoniae
atgtttttaaaaactaataataccgacataattaaaactatagatagagttaacaataactaccaagatattacggccctattgcaacaaaaccaagacgtggcttttgcttcctatatctatatatcaaatagatgtattggttatggttcaactttatttggacctaaagttggttcattttgtaaatattatgataacttttttttcaatgctaataataatagaaatattagggttgaaccgattagtaaaactgtaactcctgcccaagcgttacaatttgctcacatgggaagaattaatgttaaattagaaccaaactcacctttcgcattacgagaaatgaccaattttctaggcataactgcggttgatctcacagatgtcgacagctttgagatcaccattaagcctaagcatcttaaaaatattaaagataccataagtccaacgctaaataacttgccagcgggtattcgggagatgacaatagctgctaagcaggcattaggtgatcaggctattgagattcatgttgcgacaacgggcggcatctatgatatagttaaccctaagggtaacacatcaattcaagctcaaatgaccacgaactttattaataatgcagatcttcgggctgcaggatactga

SEQ ID NO: 242521 - DNA, 429 bp, Klebsiella pneumoniae
atgattaaatggattccccccgtgattttaacaatcataactaatggcataggcgggttagtgtataaataccgctatgacttgttgccgggggtgaattttaaagagcatctagatggtcttggttctgctttagcgtcctatgcaaccgcaatgatggctctaatatttgctctaatagttattttaacctccatcgataatgcaaatattcaaaagttcagagcgcatggatatttgcaaggttccttgatcttttattttatttgttttatacagcttggagttacacttttattgtcaatactatgtctttcaagtattaaaacacattttattgcttcgcttgctctcacagttgcggtgatcactttagcccaaataattcttattgttattcagatcgttttgctatcactcaaaagttaa

SEQ ID NO: 242522 - DNA, 141 bp, Klebsiella pneumoniae
atgatgccggttagcgtgctaatcatatatttttgcaaccatgagttagtaatctacttacgtcatggcattgctacagacactctccctgaatatatttttcgtgttagtagcatcgttaacttatatctttacctgtaa

SEQ ID NO: 242523 - DNA, 1068 bp, Klebsiella pneumoniae
atggataaagcaacattagtttatcttatcaagtttatttttaggccaaaagatcaactttccaaacttacacttggtttactgagtttaggaatgacaggattagttggtgggtgggggtttagcgttgttttatcagaggtttttgttaaaagatatagtgatgctattgaaagggtaaatttaacttatcaaagatactcggatattgcccaaataattagcttgtcctttgttgcgttgggctttattttatggtgcatctgcgtatttcttgctcttcgggatttgaataagcgagacattgctcttattcgtgcatatgggtttgaaaatactgatccacaagctgcggagaaaatgctctcctcaagagaaaaagcaaagattttacatgtggactttaaagcgtttgattcaagggacaaaaataataatttgctcaattcaagctttatcaggcaaactattaaagataggatacatcacacgggtgctacaacagcttatgttgcagcacttggtagcgtaccatatctatatatggtcggtagtttcatggcggatggacatttgacattaaagttgtttgattttgaccgaaataaaaaaatttttcatcctcttgatgccaccccaacaaatgcaaagatagtaaaactctacaacggacaggtaattcatgatagtaaatgcgtgccatcacatgatggaaaggttatcggtcttgcaatttcatttacaatggaaatattagaaaaagatcttcctgctgagtttattggacacaccttacatgctcaactgaatacagggttccaatttgataatcttcctgaagaagaagagcaagaaaaaatagtaagtgatcttagttatattatctctgaattaaaaaagcaggcgaatgaggttcatctttttgtttccgcccaagcatccgtaatcgttcgacttggtactctttatcaagaggggttacatggtgttatcagtatttggcactggaactctatcgctaatcaatatgaatggtccctaaagtttacaggtaaagatataagttaa

SEQ ID NO: 242524 - DNA, 492 bp, Klebsiella pneumoniae
atgatgagtgtgatatctgcaatggataatttcgaggcactaatcgtggatactgaatattttagtattcacatatcaaaaaaaataagtgatatctggcataaatatcgccaggtcaaatcgatggatcccgaggcatttggagtgctcgttggcgacaaagaccttgagattgagcgttacggtttagttgaaattacagtgccacagaaaggagatcgatgctcaagaatgagttttactctcagggatcccgcgcatcagctcactgtcgatcgactgtatgagaattccggaggtcagttgacctactttggcacatggcatacacatcctgaaaaaagtccccacgcttcatacacagacattcgggactggaagaattgtaaattacggaatccaggacagaagcttttttttataataattggtatagaaaaaaatgctctctactattttgataatgaaaatctcatgcgacaggaattctga

SEQ ID NO: 242525 - DNA, 1620 bp, Klebsiella pneumoniae
atgccagttactctttggcatgtcgctgtttctgaactttcaaaaatgcccagctttctcctggccgacccatcagcattgcccagacttgcacacaccgcattctatcctgaaagtcaatttgcaagtatttgtgtgaatgtacctgatgcagtatccgtcaattttgagtgtcctgaactggcctttgaagaatcgctcaaacgacatgtctctttgttaagtcaggctttaaccgatagtgaatggaatactcaggaactacttagggaatttgaagctggatggttaaatatagttgagccggacacagccccctttctttgtttaactgaaagcgaaacaccagaagagttgtgcgttcttaagccacgaaaaggcaacataggtctgggaagatattatttaggctatacagagggagcgatcccaaagaatattttttcacctatcaatcaggttataaaagagcgccaagccgcaaatggtaatggattcgttataccgatgagtgtcacaaaacctgcgccatggaaaaaggatgaacttactgattggtatctagatctgttgtctgatctaccagcggatgttctaacaaaattaacacaacagtttgctcaaaagcgttcacatgagttttggttagtctttaatgctcaaaccccttctggaactacatggtttggaatccatttttcccaaaagaactctggcaaaggtcgaaaaacattacctttcaaacattcacatctgaccgaatggacgcttgaacccatcatcgtattaacttttaataaagaaaggattatgccaagaagtggagcggaacaatcccttaatagcaaaaaagttatgcttgttgggtgtggttccgtaggaggagatgttgcagataaactagcagcttctggcgttggccatatagacttatatgatccagatacactttcattgaataatctttaccgacatattcttccgccgcagtatgtttcattcaataaatcgtatgcattgtggcacagcctcaccagcaaatacccatggctcgagatcggaagttatactgctaagttacttgatttaaggcgtcgtgatttactaataaagtacgatcttatcatcatagcaataggagcaccaacccaagaaagattgtttcatgactatttgatcaaggaaaaaattaaagttccaattattaatacatgggtcgaaggatatggcataggtggacacgcagttctggcaattccagaaacaaaaggttgtttgcggtgtgcatatgttgacccagctgatttttcaagagggctggcttctaatctaaattttttggctccaaatcaggatctaacgaaaaatcatgccggatgtggcgatgcattcttgccttatacctacatagcttcaactcaaactgctctcattactgctgatctaggagtcaaatgccttctcggtaagattcaggaatcatccagagtgagttggaagggaaactctaatgatgctacagcgaacggattcaaattaaacgggaggtatcatgcattcacccggacattagaagtgctccccttgttcaatgatgagtgtgatatctgcaatggataa

SEQ ID NO: 242526 - DNA, 1044 bp, Klebsiella pneumoniae
atgagtcttcaaaacaaatttaagagctttcacgaagctatcaagttaggaaggaaggatttagagtacacgacggcccgtcttaaggacgatagcattacctccgatatcattgagcgtttcaaggaggatggatatccggttattgaggatttcattcagggatctttggcgacctttactggtatcagggaaaaagggcaagatttcgatattgatcgcgcaattgtaattgaggcgggattggccccagaaaacccgataacacccaagcttgcagtgctagaagtgctggaggaccggggctttaaaaatgctaagatcaaaaaaccttgtgtaaccgctgattacaaagctgatgatcttcatatcgacatcccaatttaccgcaagtacgataacggccagtacgagctcgccgtcggcaagagacattcagatgaggagaatcgtgagtgggccaaagcagcaccacgtgagcttatcgactgggtaaataattacgacagagatgaaccccatggctcaaataagcatgaccagtatcgtcgtattgtcagatacctcaagcgctggagaaatttcacatttggcgatgatgtgcgtcgcaaaatttactccattggtattgcggttatggttaaggagtccttcaactcttccattaacgatgaaggatttcctgatgacctcactgcactaagagagacaatcaaccacattctcaactatcgtagctatttcactatggttgatgtggataagtacagggtcaatgctgcacttccagtaagtccttacagggacatttttcatagcagcagtatcgcgacaggtacccagtttcgcaacaaactgagcgcactgttgaaaatcctggataaggttgctaatgaagagaaagagtccgaacagtgcgagttgctacaaagtgtatttggtgaagattttcctgagtgcgcagtaacttcgtctgcttcgtcaactgctgtaaaaactgttttcgcatctgccggagtagtggggacatcgcaaggcgcatga

SEQ ID NO: 242527 - DNA, 204 bp, Klebsiella pneumoniae
atgctcaccatcgaagaaattggcaaacgtgcagcgttgctgaagtgtcggcgacagtttggcccatttgagaaatgcccggtctgctacgggcttctttcttcctgcgagctgtgccacggtagcggcaaggtgattcaggaggatatcgactcctggaataacctaatcaccaaaatgagacgggaggcgagaggcgcctaa

SEQ ID NO: 242528 - DNA, 300 bp, Klebsiella pneumoniae
atgaaaaccttacgttgcatggcttatcagcagaacggggtgtttgtcgccgcctgccttgatttgtctttggcagcacaggctgacactatgccagaagctatgagcaaactggatgcccaggttcgtgactatctcgaagaagcattttctgaaccggcttacacaaaacaattacttaatcgaaaagcaccgctttcgatgtggattaaatactggattattgcattccggattttcttcgggaaaaaacaaggtcctagtaagttgtttagcgaaccttgtgaagcctcggtatga

SEQ ID NO: 242529 - DNA, 285 bp, Klebsiella pneumoniae
atgttcggtaggaaactttccccgctgaagtatgctgaagttgtgcgtgcgctgcaggcgcttggtttcgtaatgaaaccaaaaacgggcacggcccatgagcagtggatacgtaaaacggaaacgtcgaaacatgtagttactgttgataaacataactccccattttccagagacctaataaagtcaatggcaaagcaagcgggggttgatgcacgtaaattccatgctttatgtaaaggtgaatgcacccttaaagatatagggtttgagcccgcagaataa

SEQ ID NO: 242530 - DNA, 480 bp, Klebsiella pneumoniae
atggcggcattaaaaccagagattaaagccttcatagttcaatcagttgcgtgctttgataccccctctcaagtggtcgagtccgtcctgaaagaatttggtgttcagattacccgccaacaggttgagcaaaacgacccgacgaagataagcggcaagggcctggcgcagaaatgggtcgatctcttcaaccgtacccgtgaccgcttcctcaacgaaatttccgacatcccaatcgcaaacaaggcgtaccggcttcgcgttctggaccgcatggctgcgcgcgccgagggaatgaaaaacctcgcgctcaccgctgagattattgagcaagccgccaaggaatgtggggatgcctacaccaataagcacaagtttgaacattccggcccaaatggtggcgccatccagacgatcaccatgagcaaagaggaatacaagtccgcacggcaggagatgatggaggatgacgactgctga

SEQ ID NO: 242531 - DNA, 453 bp, Klebsiella pneumoniae
atgataaaaatcagtaagttagtgcatcacgcccgccactttaactgcgtggagggcaacaccaccctgtatgcgctaccaaagccggagattgtcgcccgctggtacgaacagacccacgatgacttccgcttctgcttcaaattcccggccaccatctcgcaccaggccgccctgcgccattgcgacgagttaagcagcgaattttttgcccgcctggcgccgctggcctcgcgcatcggccagtactggctgcagctgccggcgacgttcggtcctcgcgatctccccgcgctatggcattttctcgacggactgccgaaagatttcacctacggcgtcgaagttcgtcatcccgagtttttcaccaaaggggaagcggaacagcagctcaaccgcgggctgcacgagcgtaacgtcaaccgcgtgatcctgaagagacctttctattga

SEQ ID NO: 242532 - DNA, 198 bp, Klebsiella pneumoniae
atgttcttttcgcaaacgccatactgctgtttttttctttcccagcaattcgaatacttctttttcttccataaagtctgtagaagtcataagcacctcattcaaaattaccgttataaatacacgttccacacccaccgcgagccccttcagtacaaacatcacagcggtttacttttttacgaggtcgttctttga

SEQ ID NO: 242533 - DNA, 1458 bp, Klebsiella pneumoniae
atgagtaggaaaatgactgcgttagttatcggtaattccaactatccaggacttgagctaaaaaatgccacaaatgactcagaggatattgcgagtaaactatctgaatttggcttttctgttattcatgtttcaaatgccactaaaaaggacatagacgaagcagtcaattcatttagagataatttaaatagcaatgacgttggcttgttttatttcgcagggcatggcatgcaaattgacggtgtgaattatataaatgctgtcgatacggattttagtagtgaaattgatgctaaatattcatcctatcctttaaataaaattattgagacgatggaacgtagtgacaataaaacaaacattataatattagatgcatgcaggactaacccatacgaaagagcttgggatagaggtccagcacaaaaaggtttagcgcctttatttgcacctaaaggtacaattattgcgtatgctacttctcctggggaagtagctagtgatggacgcgggaggaatggcagctatactgaagcattactcaaacacattacatctcctgatattcctatcgaagaaatgtttaaaagagtaaggaatactctagctgttagtacaaaaaataaacaaacctcgtgggagcacacatcactgtctggcgattttttctttaatataagtcttgtgaccacaatcgggaaatatgcgagagagtccatagttgatcagttgtttcatataaagccaggtgacaatcttcactatattatatctaaattaaaaaatcatgactggtattcacaaaatccagcggcaagaggtgtaacttttgatgatttgaataattctgatattgattctgcatttgtattcggtcggaatatatatcaagcatcttgtggaagcgcaaatggagcaactgagtttattgcaggttttcgcgaaaagacgaatggcataaaggatgagctaagaatatcgattctagagggcatgctattcgaaatattctttaattccaagggggagttaagagagaggtttaaaagctcaaaattcaatgctgtctttgattatcagcaatacccagagtttgatgagtcctttaaattcatatctgatatattagcaatataccctaacagatttcatcttatacctggtaagaatcgtaatgtctcaattgatattgttaccgaagtaaatgcggaagatgagcgtaaagtcatgggggtttatttgagtggtgtgaatatattaaggataagtcaggatttctacatatatgaagaagatggcgaagtcccatatgaggcactaatgaaaccaagattcgaacagcgtttatctgaggaaacgctcataccacttcataatttaacgattaactttgattttgatgcaggtaataaatcaaagatattgtttccatatggatatacagtcgcgaaatga

SEQ ID NO: 242534 - DNA, 1062 bp, Klebsiella pneumoniae
atgcctaaggaaagagacttatcaatagatatactcagatgtaccggtctttttttaattatattggcccatgtatcccctcctggggcaatatttcaattgagaaattttgatgtgccattaatggtgttcgtatcaggtttgtcgttctctatatctagcgagggtaaaaaatatcaggcataccttttatcaaggataaaacgattggttgttcccgtttggatatttgttacggtgttttatttgtttgttttttgtttatctccagttttatttggaaaatataatgatttggattcatatttaaataccttattttttaaagactcattagacgcttctagtaacaccttgggttacacatggataattaaaatatttttgttaatggctataattgctcctttagtgaaaaaaatcacacacaatctctcgcagtggaacataatgaccgttgctattattcttttgtgtttgaatcagtatttagttcttgctgttgtggataatgcggattctaatgcaagtttgattaataatattgcggttgcatacttattgccatgtttatcatatggtgtggtgtttatgctaggtgtaaattataagaagtattcaattacttttaaattatttaccgtcatattgtccttaatggcatttttggtatttctatggtcttatcgtgtagagtttggtggccttgtttctacacaaggttataaatatccgccaagcggatattatttaagttatgccttaatgatgatttttagtttgagtttgtttgttaaatcgcttacgcaaaaaataaatggattattgaaggggttaatagtttttgtatcatcaaatagtatttggatatacttgtggcatatacctgttgtagaatattttgctaattcagatgctggatataatttcatttttaaatacttagctgcctgttttctatctatggctattatgtatttgcaggttggtatcatatctcggttacgctcaagaatgtcaccacctgtatataagaatattaaggatatctttacgggatga

SEQ ID NO: 242535 - DNA, 957 bp, Klebsiella pneumoniae
atgctgactgatactaagcttaagcatctgaaagccagagagaaaaactacaagattgcagaccgtgatggtctgtatgttttggttacgcctgcgggttcggtgacatttcggtacgattatcgaatcaataatcgccgtgaaacactgaccatcgggcggtatggccctgaaggaattaaccttgttgaagcaagaggaaagctggcggaagctaaaaaactcatcactgctggtatttctccggcgatcaaaaagcagcaggcaaagcaggagataagaaaggcgctaagtttcagggaatatgagaagcactggcgtaaaacatggaatgttgctgaaagcaccagagccctcagattatccattatggataaagaagtgctgccgcattttggtaagcgaacccttaaagagatcagcccaacggatctccgcatcctgtgcgaagaaatccgcgatcgcggcgcgccgtctacggctctgaatgtcagacatctggtcagtaaggtctttgaatttgctattgatcgcggcgttgaggttgataatcctgcattacgtgtcagggcaaagtcgatcgcctcgtttaaaccaaaggagcgggcattaagcgaacgggagatcggcgtgttcttcaacgcgctggcccgtaccggggttgcgcagacgatccagatgtcagtgaaatttgttcttctgacattactgcgaaagaaagagttccgtctggcgcgctgggaaatggtggactgggaggagcagacgcttacgctcccgtcctccatcatgaaaatgtcgcgaccacatcgggtttacctctcccggcaggcgcaagagattcttgttgcgttaaatagcatctatgcctattccgagtatcttcatcccggacgttttagccccagactcccgctatctgacgctgcgctgaatgccgctattcggtcggggtaa

SEQ ID NO: 242536 - DNA, 309 bp, Klebsiella pneumoniae
atgcgtgcagcactcagaaaagaagaattgataaagttagtgccgttgtctttttatgccattgataaactggaaaaagacggcgattttccgaaaagcttcttactgacgccacgggttgttgcctggaaccgggatgaggtggaagcctggctggacgcgcgtcagcaaaaccccgacttaattgagcgtgacgcggggatgatgaaaggtctggaaaaaacatgggagatacacagacaaaagtttgcagcaaaacgtcagcgcgcagcttgtggggcagaggatagtaccgaaaataaagattaa

SEQ ID NO: 242537 - DNA, 1104 bp, Klebsiella pneumoniae
atgagtaaaagtaaagttcttatcatcggagctggggtgagtggactctatgctgccacgcttctcgaaaaagcacggatcgattaccgacttcttgaagcacgggagcgtgttggtggtcgcgtattgtcgagccagattttagatggtacccatatcaatacacatattgatatgggcgctacgtggttctggcctgatattcaacctgatctttctcatctgattcgacaacttggtattccgatcattcctcaaaccagagctggggatatgctctttgaacgtcaaaataacgttgctcctgaacgttttcctgcctacgcatccgcaccagaatcattcagattaaaaggcggcatgcaggcattcacgacccaactgctgcagtttttaccggcagaacgcatcttactcaatgagcaggttgatgcaattacctgttccggcgaggatattttggtcagaacatgctctaatgagggtaaaaacacaatcttcacttgtggacatgtctttatagcaatgcctccagcacttgcagccggaatcaaatttacgcctgcattatcggatggtctccagtcgaactgggagaaaataccgacctggatggccccccaggctaagtatgccgctatttaccaaggggattttctcacaggaaagaatctgtccggggatgccagtagccggataggaccaatggtagagatacacgatgtatcagaacctgataccggatttactgcaatatttggttttatcggtgttcctgcaaaaacacgatggactgtttccgaaaccgagcttaaacaactgtgccgcaatcaactcatacgattatttgggcctgaggcttcggaccctattgcagaatttattaaagattgggcatcagacccattaacaacaacagattttgatcttttacaggaggccagccacgtcttaccattcccggccccaaaacaaggtatatggaaaggtaaaatcacgtgtattgctagcgagtggtctccaggattttccgggtatcttgctggcgctatcgattgcgcattcgaaggtgttcaagactggttgttgcattccagacagtaa

SEQ ID NO: 242538 - DNA, 591 bp, Klebsiella pneumoniae
atgatgtttgaccggataggcaatgaacaggcaagagcaacaagtcttgtcagatatgagccaggttcaatttttccaatgcataatcatcccggtggtgaagaaattctggtattaagcggcatcttcactgaatacaacactgactattcagcaggatggtatttgcgtagtcctgacggttcttcacatcagccctccagtaaagttgggacgaccattttcgtaaaacttcgtcagatgactgctgaagaaaaccagtatgtcaggatagacactagtgaccccaaaaactggcattattatgcacaaggagaagtatgtcctttgtataagagcgtccgtgaatgcgtggtattactgaaagtcaaagctggagaacgtcttttttgctcaccactgaatggtggagccgaaattcttcttctggaaggcgaattgacagatccatttggtcgttatgaaaagggaagctggctcaggttaccaccaggagatatgccctccctgatagcatcagcatcaggcgctaaattgtacttaaaaacaggacatttgagtccagcgactttaaccggagctataccatga

SEQ ID NO: 242539 - DNA, 345 bp, Klebsiella pneumoniae
atgctttcaaactggaatgaatatcgtagtggcctgctggccgccattggtaaatttgcaaaattacagccggagttcatgaaaggctttcagcaaatggacaaggggactttagaaaatgggcatctggaccccaaaacacaggaattgattgcgctggccgtggcggttactacccgttgcgatggttgcctggcagtgcacgtcgatgcggccgtgaaacatggcgcaacccgggaagagatttctgaagcattgtccgtggctataaaaatgaacactggagcagccctcacctacacagcgcgcgcactggatgtgtacgataacctgccgaataaataa

SEQ ID NO: 242540 - DNA, 282 bp, Klebsiella pneumoniae
atggcttacttacaaatcacgcttaatatcagcaaccacaaccgccctgccgcagcaaatgtttatcaaaaatataaagcgccatttttaaataccattgccggagcgacctcaaaagaattgcttattcgggatgatgatgtgcaagttttacatggctttgaaactactgctcaagcgcaggcgtatcttaccagtgaattatttacaaaagatgttgtggaagaattgaagccttttctgaaccaggcaccagatattcgcatttatgatgtgatctga

SEQ ID NO: 242541 - DNA, 858 bp, Klebsiella pneumoniae
atgggaaatggatggcatgaatggccgctggtactgtttacggtactgggacagtgtgtcgcgggtgcgctggttgtcagcggacttggttggctggcggaaaaaaacgatccgcccgccaggcagcgtattgtacgcggtatgttttttctttgggtggtgatggggctgggctttctggcatcaatcatgcatctgggttcacccatgcgggcgttcaactcgctcaaccgcgtcggcgcgtccggattaagtaatgaaattgccgcagggtcgatctttttcgctgtcggcggtttctggtggctggtggcctttctggggaaaatgccagaaacccttggtaaactctggctgctgttcagtatggtgctcggtatcatcttcatcctggcgatgacccgtgtttatcagattgaaaccgtccccacctggtatactgggtatacgactctcgcgtttttcctgacagcaatcctcggcggcccactgtttgccgcactcctgttccaggcgtccagagtcccctttagcagcacaatatttgccagcatcagctcacttgctctattggtctgtattgctgtcatcgcattacagggtatggctctggccagcattcatagctcagtacagcaggccagcagtctgataccggattatgctgtattgcaggtctgccgtgtggcgcttcttgtcatcggcctgggctattggatctgcccattggtgcgtcgcaaagagccacatatcgttgggttactactgggtcttatcctggtgcttggcggcgaaattttaggccgcggcctgttttatgggctacatatgactgtcggtatggcagtagcaggttaa

SEQ ID NO: 242542 - DNA, 618 bp, Klebsiella pneumoniae
atgacaacccagtatggattttttattgattccagccgttgcaccggttgtaaaacctgcgaactggcctgcaaggactacaaagatttaaccccggacgtcagcttccgtcgcatttatgagtatgcgggtggtgactggcaggagaataacggcgtctggcatcagaatgtctttgcctattatctctctatttcatgcaaccattgtgccgacccggcctgtaccaaagtctgtccgagcggagcgatgcataagcgggaagacggttttgtggtggtgaacgaggatgtctgcattggctgccgctactgccacatggcctgcccgtacggcgcgccgcagtacaacgccgccaaaggtcacatgaccaagtgcgacggctgccacgaccgggtggcggaaggcaagaagccgatttgcgtcgaatcctgcccgctgcgcgcgctggacttcgggccgattgacgagctgcgtaagaaacacggcgagctggcggcggtagcgccattgccgggtgcgcacttcacggaaccgagcatagtgattaaacccaatgccaatgcacgtccgtgcggcgataccactggctatctggccaatccgaaggaggtgtaa

SEQ ID NO: 242543 - DNA, 2430 bp, Klebsiella pneumoniae
atggatcgttgcgaggaagaacggttaatcgaagttcctgtctcccggagaaagctaattcaggctggggcaacaacaggactaatggccgcagtgggaggattatcattaccattcagtttcacaagtcaagccgcgaacaaaaccgctatcgtcgaagataaggccgtctggagttcctgcacagtaaactgtggaagtcgctgcctgcttcgattgcatgtaaaagatgattctgtttactgggtagaatctgataccacaggcaacgatgagtacggaaaccatcaggtccgggcctgccttcgtggacgctccattcgtcgtcgtatgaatcatcctgatcgattgaaatatcccatgaaacgcgttggtaagcgcggagaaggtaaatttgagcggatatcctgggatgaagcactggatactatcgcggataatctgaaacgaattattgcaaactatggcaatgaagcagtacatgttatttacgccacaggtgtcgctggcggaaatattactaaatcatcaatgcccttccgcctgatgaattcctgcggtggctttttaggtcgttacggtacctatagtactgcacaaatcacagcgggcatgaattatctctatggtggcagaagcggaaacagcccggatgatatcgctaatactaaattggttgtaatgttcggaaacaatccagccgaaacacgcatgagcggcggtggtgttacctattatgttgaacaagcgcgcgaacgctccaatgcgcggatgatcgttatcgatcctcgctacaacgataccgcagccggacgagaagatgaatggctccccattcgtccaggaacggacgccgccttagctgcagcacttgcctgggttctcatcaccgaagatatggtagataaaccctttcttgataaatattgtgtaggctatgacgaggttacgttaccagcaagcgcaccaaaaaatggtcattataaagcttatatactcggcgacggtccggatggtatagcaaaaacacctgagtgggcagctcaaatcacaggtattccgacagacaaaattattaagctggcgcgtgagatcggccaggcgaaaccagcctatatttgccagggatgggggccacagcgtcaatcaaacggagaacaaacgtcaagagccattgcaatgctcgccattttgaccggcaatgtcggtatttctggcggcaactctggcgatcgagaaggcacctttgatctcggtgttgaaatgttttcccctctaaaaaatcctgttaaaactgaaatatcctcctttacctggaccgaagctattgagcgcggaactgaaatgacctctactcgtgatggcgtacgaggtaaagacaaactggatgtgccaataaaattcatgtggtgctacgccagcaacacgctgataaatcagaacagcaatattagtcgcacacatgaaattttgcaggatgaaaataagtgcgaaatgattgtctgcattgaccatttcatgactgcctcagcaaaatatagcgatattttactccctgacctgatgcctactgagcaggaagatcttatcccgcatgaagaggccgggaatatggcatatgttattttgggacaaccatcaacatcgccaaaatttgaacgcaagcccatttactggacaatgagtgaaatagcaaaacgtcttggacctgatgtttaccagacctttaccgaaggccgtacacaacatgaatgggttcaatatctttgcgccaaaacgaaagaacgtcatcccgatatgccggattatgaagagatgaaaacggcaggtatttataaacttaaatgtccggatgagcatgttgtcgcgtataaggattttcgcaaagaccctattgccaatccccttaaaacaccatcgggaaaaatagaaatctattctgagcgactggccaatatcgcaaaaacatgggaactgaagcctgatgaagtcatcgatcctttacccatttacactccaggctttaatggctgggaagatccagctcgtcgcaagtatccattgcaaatgaccgggttccactttaaaggccgcgtacattcaagctacggcaatattgatgttctgaaacaggcctgccgacaggagatttggataaaccccattgatgcccgggatcgtggaatcaaaaacggagacaccgttcgggtatttaatcagtatggccagacgttgattcccgcaaaagtcacaccgcgtatcatgcctggcgttactgctatgggcgagggaatgtggctgaatgccgatatgtttggtgacaaagtcgaccacggtggctcaattaacatcctgacaacacatcgcacttcaccgctggcaaaagctaatccttcgcacagtaatctcgttcaggtcgaaaaggcataa

SEQ ID NO: 242544 - DNA, 924 bp, Klebsiella pneumoniae
atgcgttcgcttaatcgcttgaaatggctgcacgctttcgaagcaactgcgcgtcatggtagcttcacaggtgcagccaaagagctaggcgtcaccccagcagccgtaggacaactggttcgggctcttgaagactgggtaggccacccccttttgcaccggacacgttctggtaaagaaaggctcacgctcgtgactgaggctcaggatgcgcttaaagagatcactcaagggctcgatagccttgagtcaggacttaataaactgcgcggtcgtcaggctcgatccgtcgtcatcctcacggcctcacaagttctggtgatgaactggttaatggaaaaattaaatcgtttttccgaaacgcatcaaaatatcgagctacgcctgaatgtgacggaaaaactcatggatgtggctcacggagaggcagatattggtgttcgttgtggcaaaggagactggtcgggggtaaataagacatggttaatggatgaggaagctgttctagtatgcagcccacgcattgtaccgcctgagaaaattacgtgtggcgaatggctggcagaacaaaaactcattcatgatgataccctgcatcctggtgcaaattttccttcatgggaagaagtcttagcagcaacgcaagctccagctacgcgttatacaggattgcatattaactctacctcagcggttattatggccacgcttagcggccagggtgtggcaattgtccgccgtgcgctggttgaacagttaattgccacaggacaactgatacaacttcatccaaatatacgctggccgctaacatggtcctattacattgttacaccacaaaaagcagtgatgcgtcctgaagtaaaagtttttcatgactggttaattaatgatattttgattaaaaatagcccaacctcctga

SEQ ID NO: 242545 - DNA, 780 bp, Klebsiella pneumoniae
atggaatggacttcactgaatatagcgcaccatatcaccgctccgaatccgttaaccatacggaaagaatttatacctgcaaatcattgttttcctgagcataagcataaatggcatcaggtcgtttatgcgacagcaggtgatttaatggttaaaacaattgaacaatcatttttgatttcaccgaaattacaggctgtttggttgcctgcgggaactcaacatcaggtcggctcatcacaaggggcttattttaatagcttatggatagctaacgatgctcataatcaatttgacatatcggaacccaccatttttgatgtttccccattccttaaggcgcttatcttagaaatatcagacagaagaataaatgatgaagattatatagagaaactaatacagttaattttataccatctggaaaatgttcgtagtgctcaatttattttaccctggcctcaaaatcgatcattggtaaaaatatgtgaatcattatgcgaaaacccttcggatacacgatcacaggaagaatggtgccatgaactgggaatgtcggagcgtacattatcaagacgttttactatcgaaacgggaatgagtttacgttcctggaaaaaacgtctgcggttaatgaaagctattgagctactcgactgtggtaaaggagtaacagaaacagcgatagaattaggatatagctcgagttctgcatttgtttatgcatttcatcttactatgggacatgctcctctggattatatgaagaaaaggtattaa

SEQ ID NO: 242546 - DNA, 303 bp, Klebsiella pneumoniae
atgggggacgagaagagcttagcgcacacccgatggaactgtaaatatcacatagtctttgcaccgaagtaccgcagacaggcattctacggagagaaacgtagagcaataggcgcgattttaagaaagctatgtgagtggaaaaacgtgcatattctggaagcagaatgctgtgtagatcatatccatatgcttctggagatccccccgaggatgagtgtgtcgggcttcatggggtatttgaaaggtaaaagtagcctgatgctttatgagcagtttggcgatttgaaattcaaatactga

SEQ ID NO: 242547 - DNA, 1188 bp, Klebsiella pneumoniae
gtgaagattacgaagatagaaacacttgaaattgatctgtccgggcaaaatggacttgatttgtggcgaccaatttacgtgcgaatacatactgatgaaggaatctctggtatgggggaagcgagccttgcttatggtacggcatcagaggctattgctccgatgattcgtatacttgctgaacgttttcttctgggacaggaccctaatgatactgaaacgctatgggaaatcatgcgacagcgttcattttgggccttagggggaggacccgtgatatttggggctatgagcgctttggatgcggcactttgggatataaaaggcagagctgcaggcttatcggttcatcgcctgctgggagcaaaaacaccagcacctttgcgttgctatgcgagccagcttcactttggttggaccgatgaatcattgatgcttaacgatcctgctgaatttcgagaaacagcacaaattgcgcgagctgaaggctatgattgcgtgaagctttgccctgtttatgttgatgctaatggggaacgtattcgtaaacggggggtgtttactccagccgaacgcaaactggcgcgttctcgtatggaggcggtccgtgaaggaattggtgaggagtgtgacatcattattgaatggaattcacttacttcaacttccggagcgttacagcttgccgatcacttttctgatttaaatattttgttcatggaagaacctacccactacaatagtccagaggcgcaaataaaagtctccagggagtcatccattcctgttgcaacaggggagcgattatatacccgatggggattcctgccgtatctacaacaaggtgccatcgacatgattcaacctgatattggcctggttggtggtatcacagaaggtatgaagattgctcatttggcacatgcttttgacgtcggggttcaggcgcataattgtggttcgccacttgctatcgcgatggcattacaatttgaagcagctattccaaattttgagatccatgagcaccactcttttaatcttaaatcttgtaaccgggagttgtttgaagaagatttacagccagtaaatggaaaaattgctgttcctgtaacccccggttttggtatgacacttagaaaagatgctgaaaaacggatgaatatagtaaccatctgtgaaaaataa

SEQ ID NO: 242548 - DNA, 1305 bp, Klebsiella pneumoniae
atgaaacaagaaatggcattagacaatgttaaggaaaatgttggaaaaaataaaatcccatttacttcttatgatgtcggttgggtaatcatgtgtatcggcatggcaattggctccggaattgtatttatgccattgcaaatgagtgttaaaggtttttgggcaactgcgattgcattactcattacatatcctatagtttatctattaacaaaattgtatattacctctctttcagaaacacaacagacagattatgcgggaactataacgcaatatttagggagaaactggggggcttttttgagctttctctatttttttacaatattgaaggggatgttgggttatgcggctactataactaatgatacatcgagttatttgcagcgttttggtgttactcaacattcactatccgatacgttatggtttcctctggtattgttggtagcaatggttctggttgcctctcgtggggaacgtttgctctttaaaatttctgggccatttattgtatttaaactcatggttataattgtgttaggtgcattgatggtcccttattggaacatcaataatgtcagtatgacaagccctgacagtttaattgatttaatgagagatgttttggtttctctcccttttgcattattttcgattgtatttattcaggttcttaatccaatgaatattgcattcagaaaaattgaatcagaccctaaaatcgctacatttcgcgctctccgggcaagtcgaatagcatatattatccttgttgtgtctgtcctgttttttgcgttttcatttatgttttcgaccacacctgagcaagcagagatggggatttctcaaaatacctcagctctggcgctgatggcaaagattatccctgagaacactggtgggtttataccagcactatcagttttattaagtatttctgctattttaacttcttttttcggtatttatctcggtttttacgatgcattatcaggaattattatcaatattgcagaccgcttcattgtacgtggtaagaaatttaataattttctcccttatctggttacacttactgcgatcgttcttctttggggatgggttgttgccgatgtgtctacaatggctttactccaatggaccgtgggaacctttgggttagtttcttgccttattccgtgctacctgatctggcgagtgccatctttacaaaaatataaatcccctgcggtgattttcgtatcgcttatgggctttatgctggttgtatcaccattatttaagctccttgaaaaataa

SEQ ID NO: 242549 - DNA, 504 bp, Klebsiella pneumoniae
gtgtgcggcgcaggaggttatatggaacacgacgttgcgaaatatgatcttgtaacgacgtggaaggggggcaaagccagccaaacatgctgccgatcgtgcattatcggggaacaaattcaaccctcttcacatcatgttattgattcagatgaacctgaaatgctgggcggacaagggctggctgcgaatcctcagcaactcatgctggctgcttttaatgccggtatgacagctgcttttgctcatgaggcagagcaggttgggatcatccttacgtatcttgaaattcagacgtgcggagaactcatgacaaatatatccgcgcgttgccaatcatccgcagataatagctctgataggcttcaatacgttattcgtgtcagtggaaatggaaatatccgccagtttgagcagatccattgccgggttattagtgcctctccaaacagatggcttctggcacaaaacatgacgattgaaggcgatctaattctgatctga

SEQ ID NO: 242550 - DNA, 519 bp, Klebsiella pneumoniae
atgacgacccctcgcgttacaccctggcaagacggagaacctgtagagcaggcacttctcgaggcgataaaggcgcgtcgccccggcgctaatctaattggtattgatcgtgtattactgaaaagctttcctcttgcgaccggctggaatgaactgttagtccgtgtccgccaggcattttctctgaatcttgaatacagagagctaatcatgctgcgtgtggcattgctaaataaagctgagtttgaatggaatgtgcattatccggcctatcttgaggcgggtggtacacctgaaaaagcgaatgcgttgcagttagcagatatttcatctctgtttgatgagacagagtcgctgttaatcagtcttaccgatcaatccacctatgatgttgttgtggaagaaggggttattgaagggctcaaaaaacggctgggtgaaaaagagacggtagaggctgttgcaactgttgccgcttataacatggtgtcacgttttctcgtcgccctcgccatataa

SEQ ID NO: 242551 - DNA, 1008 bp, Klebsiella pneumoniae
atgcagatcgcttctcatggggtgctggagttggttgaaaggccgatgccaattcccggtttcaatgaagtactgattaaaattgatgtatgcggtgtctgtggagccgatcttcgtgactgtgaaaaaccacaacaaggtttaaaccctccacgcattccaggacatgaaattatcgggcatatcgctagtaaaggcgaggccgtaccggcgcactggaatattggacagcgcgtgggtgtggggcgtctgggcggctactgtcagtattgcaaaccctgtcgtaacgggctttttcatctgtgtgaaaaccaagtaacacccggtctcagctgtgatggcggctatgcggagtatgtcgttattcggcataacgcattgattaacataccttcagaattgtcctcagtccatgccgcacctgtcctctgcgcggggactgcgacttttaatgcactgcgaaagtcgggggccagagcaggcgacaaagtagcaattctgggtattggaggtctggggcatatggcaattcagtatgcgcgaaaaatggggtttgaagttgttggcattgcccgtgggcatgaaaaggaagctatcgcgcgggaattgggtagtcatcactatattgatagccaccgtgaggatgtgactgaacgactgaaaagtctgggaggagcagattttattgtggctacagcacctgattcagaaaccatttcgttgttggttcctgccctggcaccacaaggaaaagttattctccttggtacggggcgaaagccaatgcagataatgcctggtatgttaattggcgctgagcgctctctttctggatcttttatcagtactcctgcggaaactgagcgtgcattacatttcagccatctgtttcaggctctgccaattactgagcttatgcctttcgaacaggcaaatgacgcactaaacaggctaaaagcaggaaaggcacgctatcggattgtactcaccatgaatcagggtaattaa

SEQ ID NO: 242552 - DNA, 1203 bp, Klebsiella pneumoniae
atgacattggaacacacactgccagcggctgcgcagaataataatatcattcgcttatctgcggctcaggcgcttgccggggctaactctgtggtcttctacgctaccggtgccattgttggtaatgccatagctcccagcggcgctctgtccacattccccatcaccatgtttgtcctgggcatggccgcctgcattcttccttttggcgcactggcgaaaaaaaagggacgtaaagccgcatttatggtcgggacgggggctggagtgattactggcttgattgctgcccttgcggtttttattagttcatttttgctattctgcctggccgctttcctgggaggggcttacgctgcagtggcacttagttttcgctttgctgcaacggatggagtgacatccgaaaggcgagcccgtgcattatctctggtaatggggggcggcgtggtagcaggtgtcattgggccaatgctggtgacgggaacaatgaatcttctgccaccacacacatttgttattacctttatagctcaggctctggtggcggctatttcagctttcattcttaagggcgtgattcctgctgagccaactgtgacagccaaatcaggagggcgttctctgaaggaaattgttcggcagccgggtttcctgaagaccgtgttcagtggcgcagttgcatatatggtgatgaattttctgatgaccgccgcccccctttcaatgcatatgcatggaatctctcaacaagcctccaatctggggattcaatggcacgttattgctatgtatggtcctggattttttaccggcaggctgattaaccgtttcggcgctatgcggatttcagcaactggattgcttatcacggctggttctgttcttgccgggctcagcggaacagatatcttccactactggctctcgttgatattactgggagttggctggaattttggttttaccggcgcttcagcgaagatcattgattatcatcgccccgaagagaagactcaggtgcagtccctgaatgattttgtggtatttggcgtaatgattgtcgggtcgttttcatccggtgcgttgctgaatctttatggctggaatgccgtattgtggggttcacttatccctgttggcattgcattcctgtgtatcttaaaaggggatcgtaagatagttgtcgtaaagcatgagtga

SEQ ID NO: 242553 - DNA, 309 bp, Klebsiella pneumoniae
atgctgagttttgtgcaattcgccctgttctttcttaccttctggtgggagttggcgcgctggctgatgcagatactgtatgacagcgatactcactcctgggccaacctcaacggcctgcagaacacctctgacgatttaattgtgaatatcattatgggagtgatgtttctggtgttacccgtgttctggcacggggcgcttgcgtcacaaatagcttgcagttccggtcaaaaacggaatccgtcttcacgaataaaagcaagaatgataccaaggtgcactgttgctctctcaacccggagataa

SEQ ID NO: 242554 - DNA, 1425 bp, Klebsiella pneumoniae
atgaccgatcatgtgataactgaaagtcgtaagttggcaattaacaaacgaatgaagctcattaccctcatttccaccattggcgggctctgctttggctatgacactggagtgatttccggtgcgctgatctttatgaaaaacgatctcggcctcagtccgctgcaggaagggttggtgacttcatttttactgtttggcgccgctatcggctcggtagcggggggctggctgtctgaccggcaggggcggcggaaaaacattctctgggtggcgattatctttatcttcggcgcgctgggtaccgctggtgcctgggatatttcgtcgatgattatcgcgcgctttattctcgggcttgcggtgggctgcgcttccgtcacggtccctatttatatttccgagctggctcggccatcgcagcgtgaacggttagtcacggtgaatgaactgatgatcgttaccggtcagtttcttgcttactcgatcaatgctgcgattgtgaacttctatcctgatatgtcgcacaactggcgactgatgctggcgattccggcgttccccggagcactgctgtgggtaggtatgttgatgatgccggaatcgccgcgcttctttattcgtaaggggcaaaccgataaggcggcagaagtgctgaaaaccctgcgccatccgcaagaggtggaacccgagctccgcgctatcgagcgagtgaaccaggctggtgccgtacacggaagattcatcgatgagatcaagaagaagtgggtactgcagttgatccttattggtcttatgatcgtcctcgccactcgtgtcaccggggtcaataccattatgtactacgcgccgacggtgctgaaggcgaccggcctcggcgatgccgccgcagtgaccggcgcggtagccaatggcgtggtgtcgattttggctaccctgttaggcatgctgttaatcggcaagcattcacggcgtaaaatgttcttcaccgggcaaattggtgtcacccttagcctggtgctgatcggtctctcttttaaattcttttttcacctcgaaacggccaatggcgttagcggcctacacgctaacttcgccggagccagctacatcattcttggcctgatgctggtattcctgatctttatgcaaggctggatagcgccggtcttctggctgatgctagccgaaatatatccactacggatgcgcggtctcgggatgggatttgcagtttttggcctgtggatcttcgacttcatcatccagtcgatattcccgattttacttaaccactatggcggcggcatgaccttcggcgtctttgcctgtaccaacctgatgatgttgatgcttttggtgaaatatctgccggaaacccgcgggttaacccttgagcaaattgagcaaaaattcagattctaa

SEQ ID NO: 242555 - DNA, 1011 bp, Klebsiella pneumoniae
atgacagtgaatatcggtttaattggattgggaatgattgggcgcgaccatctgcagcgcttccagtcggtgattaaaaacgctcgcgttagcgccgtttgcgatatcaaccgtgaggtcaccgacagtatcgctcgcgagtatggcgctacggcctggtatgacgcggtagagatgatccactccgatgaggtggatgcagtctttatttgctctatcggcccggtgcatcagccgcaaatcctagcggcgatgaagctggggaaacccgtgttttgcgagaaaccgctgaccccaaccgctgccgaagcgcagacaattattgatgccgaagtagcccacggtacacgcctgctccagctcggttttatgcgccgctttgaccctggctataaccagttgaaggccatactggatagcggcgaactgggggaagttctgctgatgcactgtgcgcaccgtaatgcctcggtaccggaaagctacaccctcgagatggcgatcaacgattcggcgacccatgaaatcgacatcattcgctatctgctcaatgaagacatcgtctcagtgcgggtagataaaccacgcaagaagacccgtcgcgcctgtacccatctgcaggatcctctgatcgtgattttcgaaactgcctccggcgtgcgtatcgatgatgaattgtttgtgaactgcaactatggctatgacatccgttgtgaagtagtgggtgagaatgcggttagcgcgctgaccgaacaggcgctgtgtaccacgcgttcggcgcagggttatgctcgcgccattgccaaaacctgcatggaacgcttcgctactgcctatgaccgggaagtgcagcactttgtcgatcgggtcagcgccggggctgaaatgagtgggccttcatcgtgggatggtttcgtggtggcgaaagtgtgcgatgccggattagcgtcgctgcgcgatggtcaaacccacagcgtttcgctgcccgactgcccgacattgtatcgctaa

SEQ ID NO: 242556 - DNA, 432 bp, Klebsiella pneumoniae
atgctaaacctgaagcaggatgacatttttattggctgccgggcgaattcaaaacgtaaggcgttacgtatcgcctcagatgcgctacaggcaagcggctacgttggcgaaggttttttcgcctcgatggttgagcggggaaaaatgctttcgacctggcttggcgctggcgtggccatgccccactgcacgaaagaaggtatcgaccaggtactgcaaaccggctttcagctcttccagttccccgacggtgtcgggtggggagaggggaaggtggcttttctggtggtcaccgtggcggcgaaaaataaccaacatatcgacgttatcgcggatcttgctgacctgctcgacgatgaggtcaaaacaacgctgctggccgcagccgacagtaaagaagcgtttatgcgaatcctcgacgatcaaaaataa

SEQ ID NO: 242557 - DNA, 942 bp, Klebsiella pneumoniae
atgaaactggcactttgtaccgatgttcttgccgagttgagctttgtgcaaatgctcgatcgcgttaagcaatatggtatcaacggcgttgaaatgaccgctggcggctggtcaccctgcccgcatgttgcaaccgatgaactgctggcttctccggctaagctggcggcgttccagggcgagctggaaaagcgcgacatgcatatcgtggcgctgaactgttcaggcaacccgttagcaccgggagcattaggcgaaaaacatactgccagtagctataaaacgctggagctagcgggcaaactggggataaagaaaatcgtcatgatgagcggcctgccgggtggttgtcgggaggataaaatccccaactggatcacctcgacggtttcgtggccggactatatgccgggggttatcgactaccagtggaatcatgtggcgatcccatggtggcaggattttgctcgtcatgccgccgaacacggcgtggagcaaattgccctggaggagttcccgagccaactggtctataacccctccacgctcctgcgcctgcgggaggcagtaggcgatattatcggcatgaatcttgacccgtcgcatctgatcgccatgggagcagacccaatcgctgcggtgcgcaaactggaaggggcgatttatcacgttcacggtaaggacgcacgaattgagcgcggattggccgaggttgacgggctgctggaatacaagccagtgaccgacaccaaaaaccgcacctggaattatgtcgctgtcggatgcggtcaggatttgcaatggtggaaaacctttttctcggtgctgcgcatgaccggttacaacggcgatgtgtcgctggaaatggaagatttgacgatgagcgttgaggcgggcctacgtacctctattgacgcactcaacgccacattgagtcagtaa

SEQ ID NO: 242558 - DNA, 303 bp, Klebsiella pneumoniae
atgggggacgagaagagcttagcgcacacccgatggaactgtaaatatcacatagtctttgcaccgaagtaccgcagacaggcattctacggagagaaacgtagagcaataggcgcgattttaagaaagctatgtgagtggaaaaacgtgcatattctggaagcagaatgctgtgtagatcatatccatatgcttctggagatccccccgaagatgagtgtgtcgggcttcatggggtatttgaaaggtaaaagtagcctgatgctttatgagcagtttggcgatttgaaattcaaatactga

SEQ ID NO: 242559 - DNA, 1002 bp, Klebsiella pneumoniae
atgtgcgccactaaacgacagaaagcgaccgccagcgatgttgccctactggcgggtgtttcaaaatggacggtatcccgcgcttttacccccggagcctccattcagcccaacacgcgggaagaggtgatgaaagccgcgaagactctcggttaccggccaaacctgctggcccgtagcctgacgcaaaagcgcacccatattatcggcgtcgcggtcgatgagctgcgtaaccccaatatggtgcagctacttaatgaagttacccgccagctgcaaaatcgtggctatatggcgctggtgattaatgtctctgaacagcaaaacaaccgtactgcaatgtcgttggcctatcagctgcaggtcgacgggatcctgtttatggctacggtgctgacaccggatctgatcgcaattgctaccgaaattcatcgtgtaccgctggtacaaattggccgcaataacgaccaccaggatattcaggtggtcaatattgatggcgccgaggcaggtaaggcgatcggtgaactgctgctagcccaggggcatcgcacctttggctatatgaagggtccagataccgcttcccatcacctgatgcgtaaagaaggctacgaggccgcattgatgcgggcaggttgtgcgctcaactgtgagttgattgccggagaatatttgcgccgccggggctacgagacgttgtgtacctatcttgatgtaactcccgcagcgcagcgtgttgatgcgctattctgcgaaaacgacattctggcaattggcgccctgcaggcgctgcgcgagcgtaacgtcactatgggtgtggtgggatttgacaacattgaagaggcatcggcaccggaatggcagctcactacctacgatcaacaccgcgaacgactggttaaagaaggattgaatcggctgattgatgcagtaaatggcgatccggaaagctggagccgtggcgaactggtcgtgcgccagactcattgccgcgggtag

SEQ ID NO: 242560 - DNA, 1626 bp, Klebsiella pneumoniae
atgccaaaagcaatctcatacattcgattttcctcaagaattcaggcatctggagactcaaccaaacgccagaacaagtacataaatgaatggctcaagaataatccagactatcaattagatgagtcgctcaggtttcaagacctcggcataagtggttactctggcgctaatgctaaatcaggtgcatttggtgaattcttagccgctgtagaatcaggggttattgaggcgggttcagtgttgttagttgaatcactggacagggtaagccgtcaagacattgacactgcaagggaacgtctgcgaaagattttgttagctggtgttgatgtggtcacattggcggataactcatggtacaagaaagagagtcttaatgaccctctcagcttgattaaagctgtgcttatcatgcaacgtgctaatgaagaatctgccacgaaatcaaagcggttaaggtctgcatgggatgcaaaacgagaagaagctgctaagggtaagataatgtcacggcgctgtgtggcgtggctcagagtgtctgatgatatgtctcactttgagctaatacccgataatgtgaaagcggttcagcgtgtcttccagctacgtttagagggattgccttttgtacgaatcgccagacagatgaatgaagaaggtttctatactctgaatcaacacaaacctgtgaaaggcgcttggtctcacactactgttaaagcactcttggataaccgctctgtgattggtttcaaagtgccgtctaattgtacagttacgaaaggcgtaaaggagatacccaactattaccccgctgttattagtgaagaacatttctacgctgtgcagcagttaaaacagggttcaggccgcagaccaacatcagacaaacccttacttactaaccttttcaaaggtgtaatgcgttgtgctgaatgtggttttgtgacaattgttaactgtgcaactgaaaaatggcatggggtctatagatgctcaatgagatatgaggggcgatgtcatgccaaaagtatcaaccgccgattggccgataaagcccttgttcaggggcttctgtataacactaaccgtctttccctcaatcgtgataacgggtctgctattggttctcttcaaagtgagttagaacagattcagaaacagcgtgagaggctcattaagctggctatgctggcagatgatacagaatctatggctaaggatttgaaagctctgaacagtcagattaaagacgctgagaatgctatctccctgcttcaccagcgagagcaatcaagccagcttgaaacaataagccatcttgatttaaccgtgaagaaagaccggatagaggctcaaattatcatcaaacggatagtcaaagaaatccggcttaacacggctggaaagaaatgtgatgtcttcttacataacggcttaaagctgctgaatttcccattggatagggtggttgatggcgctcagtggctggaggttttaccgctgattgatggtgatgagttcgactttgaagggttcaccactaagccacaacacatagccttagaagaggctccagagtgggtgaaatatatggaagaacaatctaatcaacccctgtga

SEQ ID NO: 242561 - DNA, 897 bp, Klebsiella pneumoniae
atgaactcccccgttttacaattgcaagcactagctgaagacccaaaaacagaaattctagctgtattgcttaaggcaaaatctattgctgtaaaattgaatctgcttgagttaattacgtgggtcgagcatgaaatcaatggctatccgaacaaatcggatgtccctgaatatcgtacagggcatggaattgttaaagggtttaattatgcacaaggaagatatttacctctcgatttaaacggtatgacagcagagatggtagacatgataactacctatactctttatgaatcaatatcatcaatggataagcaggataataaaggtgagatggttaggttgcctcttaacccgcgtcaggttgaaatactattaggggcggggaaaggtggaatggaattatgctggttctttagctctaataaactagagcatattgtcacaactgtgagaaataaaattcttgattggtctctggagttagagaagcaaaacatatttggtgaagacctgcgtttcaatcagcaagaaaaagaggtggctcctgtgacggttaaatatattttcaacgatgtgtttacaaataatggtgtgtttgctcatcaagttgagggtgacgtaaaccagcagaatacgataacatcaggcgatttctcatctctggctgattatctcgaaaagttgggtgttgagaagtccgacatcagggagcttgaggaaattatatctgattcacctgttcctgaatcatctgaaaatttaggtgctggaattggtggttgggtgggtaatatgattggcaaggcttatgctggtggcttaaacatagctggcgctgcggctccggcaattcttacaaatgcaatttgccatttctttaacatacctgtttga

SEQ ID NO: 242562 - DNA, 489 bp, Klebsiella pneumoniae
gtggacatgctcaaaaaggaaaagttaactgaattatctaaggttgctgagcgaactgaacagacagaaaaagagaaacttgagcgtcagaaagcaagaaacgaaagcaggttagctttaattcggttgaaagaggtagccttaactaaagctacagcagacctcgaaaaggcatatgaggatactcaagtaaggttaaacaaactactcaatgaaacgaagaaagttgaagagtcatataacagcaaggtcgaagccttgaacgaagcctcagatgggcttaataaggtggggcagctctatcataagtataataaactggcaactcacgaggactttgtgtcattcttgaacgagcttaataagaaaaaactttttggcttatcccagctagataaagactttaaatcgatgacagaaagagaaattatctataattcaatgagaaaaaatgctcatggcaatgttaattctgatggctccgaataa

SEQ ID NO: 242563 - DNA, 186 bp, Klebsiella pneumoniae
atgaatcaattcttcaatgaacatggtcagccagtacgagcaaacgtagttctgaaccttcaccctttttatttgggaaaactggaaaggctggcaaaccgaatcggtgacgggattaagtcagaagaacagcgtctaatactggcaattggtgagatgctacgaaatgtggagactgaacaatga

SEQ ID NO: 242564 - DNA, 648 bp, Klebsiella pneumoniae
atggcggtggaaacggtagcgcaatatgattggcttggccttttaacgagcggaacgctcataccagcatcagccttcgttgcgatttgtctttttatcctaagagaatggttagattggcgtcgtaaatccaaagccagaaaaaatgaagtttgcgcattaaagaagatctttgcacgtgagtgtcagttagcctggaacgtaaaaggacaaattaagacactatgtgaaaaattcgcgccttacgaaaaagggcctatgcacgagtgccctcttgacttaagcgttacaaaaacggtagctggtaaaactcgttataccgtcacagaaaacgacgttccgcgctggggtggtactctaagcgaaccatcagtcgcaaccttcacaaagcatttatatgatgtgtctaaactcgattctgcattttatgaaaaggttaacttagcctataccgccgtgattgagttgaaacatctttatgaatcgttggtcgataatgaagatgctgcgcaggtgattggaatcgacaacattatgtatggtttttcaggctacgccctcaatgagatgatatggattgaacgggaacttaaagctctttatcaatactgtactggagaagaactgactgtaggtcttttacgataa

SEQ ID NO: 242565 - DNA, 291 bp, Klebsiella pneumoniae
atggctttcaagttatcagcacctaaaaccgttcagatccattatctcggcgggtatctctgcgatcaggaaactgaaatcgagctgatttacgccgtggaaagcgtcagacaggacagcggcggcacagttaaggcctcgctatccgtgcgctacgacgaccaggcaaaaatcatgacgggtgattatccggtcacgatcgagccagattctcaggactcctggactgagcaggcggaggcacagattatggcattgagtgattttactggtgcggtaaaaatccagtaa

SEQ ID NO: 242566 - DNA, 2526 bp, Klebsiella pneumoniae
atgacgcgcattaatgaaacccctaaatgggaaggtgatatttatcagatctcccggcaggataaagttgcagggggcaaagatggtgtcgccaataagcaggcgggtcagcttgcaaacagaaccctgtacctgaaggaggcgattgacgatttatccgatgccgtttattccggttcggatatttacgagacgaaagaagccggattactgaaaaccagcgagggggaatactttaaagttcctgttagcggaataagtgatatttcttacattctttatcagaataaatcaggcgtagcggttgagatacttcgcgagaagagcccttattcgtcaggttaccagtcggctacggtggtcagcagtagcgcagctaacacggtcgctattactattccaggtctgttgggtgatggcagtctgatttattttctgtccccgatcctgaacactggtgctgtcaatgtcacggtgactgatgcgaaagggaacgtcgttacccgtgctatccagaaacaaaactttgcagcattagtcggcaatgagctgctgctgaatcagccggtactgatggagtttcgcacaggtacggctaataattttgtactcgtggcatccggtccggtggcggctgagcttaacgctcgcctgctgagtcttgagctgaactcactgaccattgtatcttctgtcgcagcatcagccgacgcctatacgggaaccaccgctaacaccacctcttcacaggtcctggtgaccggccgcgcattcgttttcacgcccagcgcgagcaacaccacgagagcgccgacgctgtcgctgaacgggtggacggcacgcacgattaaacaggcgggcggtactgctctggcggtcggggacctggtatcgggtaacccctgcttcctcatgtacaacgccgcatcttctgattttcgtctgctgacctacccaggcgacagggcccgtattctcagcgcctatgtcaaaggaacggtcacgagcgacgctacgagcccgaacgccatttctcttactatccccggcctgctgggtgacggtactcagattacgtttgaacccgtggtggcgaacaccggcgtgacgacgctggtcattactgacctgtacggaaactccgtaacgcgcaacctgctaaaaggggcaaacacagcgctgacgggaggcgagttgcaggcagcgaaacccgttacggttcagtatcgcagctccccggtcaataatttcaagcttttgctctcaggcgatccgaccacggacattttgaacctcaaaagcagcgttaccactttgcagggtgctatcaccgacccgtataccagactgagcaaaaagctcatcggtgacggaacgcaggccaacaccgcgccattcggaaaaatttcgttcagcaatggcgtcagaactgttactaagaagcgcataattataaccacaccaggctcttccataggccggggggcggggtccactggcgggggcgtggtgggtgcgccgttctctcctagcgcattgtttatagaagccatgaaatcccacctggcggggtacggggagtttgagtttatcgacgacaaccagagtatcggaggccaggcgatacaccagtttgccgcgcagctacaaaactcgccctatttcaccagcagtgaccctgaagactggccggatatcgtgctgattgtcggcgggatgaatgatgccacaccgaccgggaactttaaccgcgggcgcacgtacccacttcagcgggcagtgctggaagatctgattgaccagtgcacggcaaagggcgcagtggttattgtctgcaccacgccgcaccacaatgtcgagtccgccaccgtcaaaaacatcaggctgggtgacctgaatgtcctgtggccagtccgaacttttaacgtcccaacgaattactcatttgattcagctaacaaaactataaacagcacagcgtttgcctatgataccggcaacgctgcgagcagctggggcgggcaaattctacgcgttggacatattttgcgggtgaatgggggtgataatactggcgattacaccattacagctatatctgaagaccggcagactattactgtggcagaaaacattccggcttctggctcaatttacaccaccattcagcacatcaacctcgacagtattatcgaagaggttctcgatccaccgccgtcaaaatcgtttgtggaggccaactggtcggggagcggcgttaaagttgtcggggatgcgcgtttcggtctctacaacagcatggtgcgtacagtggcgcgtgggagatcagcgtttgtactggaggctgaaatcccctcgttcaggctgggtgttgaggttcacggatggtcggcgcttttcaactttcctaattacaaccacccgaatgacctcggctataccgtcagttacaaggctggcgcagatactgcggcattcagtctgtgcaaactgatttatggcgaaaaatactacttaccttcgtga

SEQ ID NO: 242567 - DNA, 795 bp, Klebsiella pneumoniae; identical to SEQ ID NO: 191763

SEQ ID NO: 242568 - DNA, 228 bp, Klebsiella pneumoniae
atgcaaaatgtcgaaacccgtcatttcaaagtcgataaagacgcgctggccatgttgctggaagaggccaaatctgaagagcgtaaaggtcgcgcactggctatatcaatccaccttgaggcacttgctacctatatcactaacaaaggtttaagcgctatcgaagcggccgagctgttgcaccgcgaagccatccgctatgaaaacgaatctcaggagctgcactaa

SEQ ID NO: 242569 - DNA, 156 bp, Klebsiella pneumoniae
atgatctatctcatcttcgactgcgtgagcgccaatcgcgatgtgacgatcaacgaggagtttgacgattacgcctgggtcaaagccgaagatctcaaaaactacgatcttaatgccgctacccgcgttactctcagcctgaaagggctactttag

SEQ ID NO: 242570 - DNA, 1572 bp, Klebsiella pneumoniae
atggctgctcgttctaaccttgtaaatttagatgcactgataaagcgtgctgatttaggtttaaagatccaagataattcttcatttgaaactctaaacagtattcctgccagagaattgaaatcaggcaatggaattgctgcgcttctaaggaaaccagatttccagcgtgaaacaaatcattgggggcctgagcaggttgtatcgctgctcgaatgctacataaatggtgatttgataccttccgttattctttggcgatcatcaaccaatctttttgtgatcgatggtggtcaccgtttaagtgcgttacgtgcctgggttgaagatgattatggagacggtcatatatctcatcaactttttgggcatgatattcctcgtgagcaacgccgcgctgctgatagaacgagaaagcttgtgaaggacagggtcggcagttgggaatattatcagaagctgcttgccgatgatgcttcattgaccgaggaacaacagagaagaatcagtgtactaacatcccgtggaatctcagtccaatgggtagtcggtgatgtagataaggctgaaacctcattttttaacatcaatatgaagggtactcctcttgatgctatcgaagagatgcttctaaagaatcgcaagaaaagtattccaatagcaacccgagcaattattcgtgctggtagaggtcatcgctactggtcggagtttgatcagggcattgcccttcaacttgaagataaatctgcgaagctacatcgtttgctcttcgaacctgaggttgatcgcccgattaaaactcttgatcttccattaggcggttctagaggggtcaggacagcgatccaagttttgaaagatttcttactgatcactgattgcaaccagaatggtgttttgaaaaaaatcgaagattaccctgatgatgtgtcgggtaccgatacattaagaatccttaccaaagccacaacattgagcaatagaattacaggcaatggggatggtagcctggggcttcatccagcaatttatttttatggtccgactggaatccactcaacgccaatgtttttaggaaccgtgctactggtagcaaaacaactctccaacaataacggtcaattctttaaagacttcataacaatcaggtctaggcttgaaaaaataatgatcgaatttaaggacttgatcgcaatgatagtacaaaagccaggcagtaatgtccgagtgactcgctactgtgattttttaaatgcggtgatcaaatcactaaagcagggagagaatattgatgagagtaagctcatcgagctggccgaattggaggggagaatactctctggcgattttaagagaacatctgcaaaaatcagcgatgaacaaaaaagtaaggtgttcattgacgtggctctacgtaacgctttgaaatgtccgatttgccaaggttaccttgatactgaaaaatcagtttcttatgatcatatcgtacgtgtccgtgaaggtggtgatggtaactctgacaatgtacagttgacacatccttactgtaatcagtcagtgaagtgttaa

SEQ ID NO: 242571 - DNA, 789 bp, Klebsiella pneumoniae
atggtgtacttaatctattcagctacggaggctgttttgaaaaagattcttgcattaccttttatgttcttttccttctcgtccctctctgaaggcgttccgtctacagatgtacagccttatcctgagtacctagcagcctatgtcaaaacgttgattactgctggatgtgaacaaacattgaaaggcggttctgaggtcgtattgatcaaacaggcaacgaagggtatgaagaaggacacggcgagttacgataatgtacacaatgctatcgttttgggggctggtttcggtaacgaactgaaggaaaaaggtaaacttatcaccaaagaaaaaatcgcgattgatagttgtggtggtgcagcggcctataccatgatgcaaaaggagtttataaaaatggtcattgctagtatgactaatctggaacaatcgcaggttgccgatagtaaacccaaagtgtcagcttctgatgatggaatttaccgtacaacatcaaaagctctggctgaactgtacagcgcaaatgaagttgcagctgatgacgaaattggtggtcgtaacgtcgaaatcacaggaattgttcaggatataactaaaaatttcacggatgatgtagttcttaaacttgaaagcggtaagcgcttcatgcctgtgagcctaagcatggaaggagcagaaaagccgcaggcatcgaaacttaggaaggggcagaagatcgttgtaacgtgcggaaagatgcaactattcctaggtgcgccatcgggtagcgactgtacatttaactaa

SEQ ID NO: 242572 - DNA, 627 bp, Klebsiella pneumoniae
atgccacaaactatccagcaaattgtagagcagagaaatatcacaagactcattcatttcacgcgagtagaaaacttagccagtattatgcagcatggcatagttcctattgcaaacgctcaacagcaacaggtaacccctgtaatcaatgatgaataccggtgggatggtcaaagaggtgcatcttgtctcacaatcacgcaccctaatcatcatatgttttatgggcttagattagctaacccgcaaactgattgggtcgttttgatgttacgccctgaagtgctctggactctaccgtgtgccttttgtagtacgaatgcagctaatggggttgtaagttctttgccactcgcccagcgccaaactccagcagctttttctgcaatgtttgatgacactgaaaatccaccatcgcgcttaaacaatcgcctgcaagtcttcgacactacagatgtccaagctgaagtgttagtatttggtacaattgccccagagtttatctttgcagctgcattcaacaaacaatcagctaaggagcaatatgaaggtttgcttccaggcagaagcgttcaacttaatagcaccggaggcgggttcttcgctgctcggtcatacgttcgataa

SEQ ID NO: 242573 - DNA, 858 bp, Klebsiella pneumoniae
atgtcattgaacataattgaagcatttgaagctaagccgcaaccaattgattacgtcttgcctaatttggctattggtactatcggagcgattgtttctccgggaggcgttggaaagtcaatgctggcattacaattggctgtgcagattacttgtggtgtagatcttttaaactttggtgaatatccgactgggttggtggcatatttacctgtggaggactctgaaaccatcgttcaccatcgtttatatgctttgggaaaatatctaacagcacgtcagcagcagattgtagctgataagctactggtcgaacctttggtagggaagtgtccaaatattttcttgccggattggagcaacttgatcaatgaagtttcaaaaggtagacgtttaataattttggatactcttcgccgtttccaccaggaggatgagaataatagcgcagcaatgtccaaagtcattggaaagttagaaggtattgctgctgatacaggatgttcgattatatttctacaccattcaaacaaaggcgctgccacgatgggtgttggtgatatacagcaagcaagcaggggtagtagcgtcctggttgataatatacggtggcaatcttatctggcgggcatgaccgccttagaagcgaagacgcatggtatttctgatgatgttcgaggtcaatttgttagatttggaattaataaagcaaattatggagaacgtacgccagatcgttggttacagagacatgagggaggagtattaaaaataacggcgctcagctcgaagaataataaaaagctcactagagaaagaacatctacctggagtggcgctgacaatgacaactggtaa

SEQ ID NO: 242574 - DNA, 1362 bp, Klebsiella pneumoniae
atgaaaatagtaagtaagctcacctttttaggtatcatacttttcttttctataaatgcctatgctggtcaattagatagtagtgggttacttgatactttgttagataagtttcaacaagtagctagcacatggacaacagtaattggtaattatgcgaattggctcttctgggggttggtattaataagtatggtttggaggtttggtatgatggcgatccaaggggaagggttgacaactgcacttgcagaaatagttcgcttttttgccgttgttggttttttttattatcttttaatcaacggcccagccatatcgcaatccataattaactcaatgagacaacttgcagcaaacgctttaggaataagtactggtatttcgccctcaagcatagttgatatggcgtttgcgatattaacaaaggtcagttcagccgcatcaatttggtcgccaatgatatccaccattatgataacagtcgcgataatcgttttggtagtgatgtcccttatagcgataaatatgctaatcatgttggtttctgcatgggtgttatgttatgcaggagttatattgcttggatttggtggttcgaaatggacctctgatatagcaattaattacttacgaactgttttatcggttagcattcaattattcacgatgacattaattattgggatcggacaatcatttatagatcaatgtttttctcttattaaagatgatgttcctgatcttaatagccttatcgttttgcttctggcgtcaattatcctattagtattaacgaataagctaccactgttgttatcaggtgttgtaggaggggcttctttacaagggattggtggatttggagcgggtatgattaccggcgctgccgctactgccatcagcggtgctggagcaatggcaatgagcgctacagctcaagtcagtggtggggcttctgcattaaaagccgcatttgaatctgcacaaacggcaatcgccgaagaatccggatctgtcggtggtggttcaagcggcggatttggtggtggtgtagataccggttctgtagaaacgtcgggacagcaaccatctggtaaaggtagttccagtgggggcagcgaaggttttgctgcatcgttctctcgtgctggccgcatggcaagccatatgggaagcagtatggctaacggggctgctgagtaccaggcaatgaagcgaagtagcaactcttcccgagtccagcaaacttttggaggggaattggcggctcagatacgtaaacaaaaacctactcgtcgggataaccgggagcatgatgattttgcaggagatagcttatccggcaataataaatcctga

SEQ ID NO: 242575 - DNA, 435 bp, Klebsiella pneumoniae
atgtccaggactccctatacacggttacgcattgagggctttcgcaaagcagaggcttccctgagacttgaaggaaaggaccccagtggtacgccactctacgagtccattaaagcacgtattattttaggtgagctgacatatgagcaggggcgttcagagattcttgcatactacacaaaagtagataccgccgggactgtgacagtgggagaaattctgacagaggagtttttaaaaccgctgaacatgtctcatgatgagctagcggaagctatggggggttctcggcaggatgttggggatatcatatgcgggcagcgttgtctcaatgctaatgaggagcgcattcttgctggcatatttggtactgatgaggatttttggaggaatctgcagatattgcaagattcgaatcaacgacggcagaaataa

SEQ ID NO: 242576 - DNA, 1719 bp, Klebsiella pneumoniae
atggcaacaaaggagataccgatagacaaggcaaaactggctacgcagctccgcactcgcggcttggttcagacagttgcagatgaagggtatcggtgcttggatgagagccattctgcattgatcgagacgcttgcaactatattgaacgctactgatgcgccaccgattgaccttcatatcgaagaagcgctgtcggagttggagggaccacgcttcttctttgttcagcgttttctatgcgatctgataccgcttttgaacgtagatcaggatgtccttcttgcctttatcacgcgtctgcttgatgcaggtggtagtgatctggctgcaggcaccccaagtacggcttttggggaatggacgaagaagaacccagccaggtcttccagggtctacgaagcggtacatgctggagataacttagctctgcgtcaactattcacggttcttgtaatgaacgccgatatcgaagaaggcctcatttttgcgcaggctcaggagcgggaggttaagcttgctgccctctcggctttgggggccatggaacttggtgaacgctacggtgaggtgctcgacatcctgctcctgggagcgtccagcaatgacgaagaaatcgcactcaggtccttggaagcgggctatcgggctgctgcacagcgcaagatagttgcaccggtcggttttgacgaacaacttgatcggatctttcagacgaggagccccttgtcgatccacttggcagtggaccttctgtggcgtcaccggggtgctctcacagaaaacgctatgaacctgtgccttgatgtcgctgcggatgttgactcagataatgtagggacgatttcacatctcaaccacgcagcatatcaactcgtgggggctgggcatgctgaaaaagtgatttgtctgcttactgagttatttgaacgctcaagaggtcggattacactagacgcgttcgagaccacctaccacgggttgcaaaatgccggctctgaggtgttggggaatgctgttatgtactggctgctgaatgggagcacgtatacccacaaatgcgtggccagtgaagtttgcggtgtcggaaatgacgatcctcctttctcaatctccgcgtcatctcttccagtggagccatcggagcaactatacctttgtcgcaaggccgtcgggtggttcttcattgatccagtggttgcagcagtcataccgttagcagtgcttcgcgacgggtcgtctgatatcaaaaatgatgtcctcgatctgatctatcaccccttgctcgtgagctatgggggcaagttgaaggactaccttgagcgttacgccgaaagcattccggaccttgctggattgctcacacgaaaggtagcacttcaggatgcaatggaaggtattgagcgtttagttgagttgcaccctagtgaaatgcagcgtgagacggcacatatccaatggcacgagcagatggaacggggcatggagcaagggcgccggaaatctatttttgaggacatcttcgccaaacaatacatcctgtatggcagagcgtcattgacgccgatccacaccggacaggggggcacacatctcaccgagactgcgatgcattcattttcgatctcatcagagttgcccatactcgacattgttgacccagttggactcgagcatatgctcctccacttcaagcttgagcagcgaggacagagatga

SEQ ID NO: 242577 - DNA, 1731 bp, Klebsiella pneumoniae
atgaaactcgtcgttatgcattatctgcgctcgctacgcgagcgcgacgaacttgacgctattcttcctgatcttttggctgagagtggtttcgaagttctaactcgtcctcgtcgtggcacacggcaagctggtgtcgacgtagcggcagtcggccccgatcgtgatcgtgatggtactcgaagtctgttcctattcacgatcaagtccggggatttgacacgagagcattgggataccggccagcaggctgtgcgtccgtcgctaaatgaggttttggatgactatatcccgaaccgcatcccgccccattttgcgggtctgcccgtcattatatgcgtttgcatgggcggcgagatgcgtgaggatgtccgggcacagtggagcggttactgtcgggcgaatgagaaagccaacattcactttgccgaatggaacggggatcgtctctcagatctgatccttagcggtatgttgcgtgctgagttaattgagagcgagaatcgagggctatttcataaagcgctagcgatgcttgatcagcctgaggtcgcttatcggcatttccgtcacttactcaatgtcattttcactgagacgaagaatcagacagagcgtacgcgtcagctacgcaaagcctacctgtgtctttggatactttttgtctgggctcgcgatgccgataaccttgaggccgcatatcgagcatcagagctagtacttctacgtagttggccttactgtgatattgctcgtctgcgcaggggaacgacgcaacacgagcggcttgctcattttgatcaagtattgaagctgcacctcatcatcgctcaacttctacttgtcgggaagattggccctttcgccgacaagcgctatgcgctttcaatggccgtaaattcacgcaacgcagtggatattaacatcgcgctattcgagatgctggggagaatgtctcttcatgggctatggctggatgctatgagtggcggggaggacgagtcattcgcgcaagcaatgaatgaaagggcggacaaggtgctcaacatagcgattggtatgctgaatgcgaatccggcgcttgccgttcccgttcgtgacgattttacgatcgaactggctctgtttatgcgtctcgcaactttgcgtggccgcctatctaatgtcgctgattatatccgcagcatgtccgaccatctctgttatggactgagtgctcggtggcattatccgacgccgaagacagaatatcgtgatgtcctctcccatccgagggaccgcagcgatgcatactttgaagagcatacgcgtgcggggattctttacaccttcgtgcttgcttggctggctatgataggcgatcaggagcgagcagagcatttgcgccgcacgttgttagagcacgctccacacatgactcaccaaatttggattccagacggacgaacggatgacgttttctgggggggggatcgggaccacggattgtcggtgcctggcctgccactcaacgattcgctagatgcagtttttagcctattgaaccgtgtgatgaaagagcatcctctggatgagcgaataagtgccgttcgaaatcacctgacgccaatttttcttatggcctgccgccattatcgcatgcctgtaccacctcatgtgtggcaaggtaagaagagtgcaccaccagacagcaccgcttccgatcaagcaacaccggatgctgagatatag

SEQ ID NO: 242578 - DNA, 3450 bp, Klebsiella pneumoniae
atgcatcgagctatcgatgcctttctcgcttataacgagcgtgagaaggcaattgtagaaccagtcgcacaatggctcaccaaccatagggtgcagacacatttctttgcgcgcgatacgcagtatggggagcctgtcgacgacaccggaaacctggacgatgccgcaacagtgattgtatttctcggtagcgagggctggggtaagaaccacctacggcttgtcgagcgggcgctaaaattgaacaaacccgttttcccagtcctcatcggcgatgccagtcccgatgaccacaacatggcgcaggggttgtttattaattttaaatggctcgacttgcgaatgggtgatctagagccgcttgaaaagcttttgccatcgatactcgaggtgtcggaccagtatgatccggacatcaatacggagatcggcgtgctgatctccggccccgacaatcgcagacaggtggcgctcgataggcttattgatcgagccaagagcaagcgcgagccgatctcggccgggttacggaaagagctggcgcgtcgtggatccaacgggccaagattattgtctccaaatgagtcgccttccgactcggatgctgaagcacgcagctggctgcgtgcggccctaatccaatgtgatcccgagagtccgcagacgcgtgatatcgccctgcgtgacataatgccggatgccgagccagcagaattcgcaagattctggagtcttgcggcagcgcaacaagcgaatgcgtcgtatctccccgcccttgctaaaaaggctgcagtggatccgaccactagcgtcagttttgctggtgttgcgatgttgaatccgaattctcccaaagtgtcgccactttttagagccgcgttgcgcaatgatgatcatcggacaactcgcggtgtgctgcgtgccttgcggattgtccacgttcccgaagtcatcagtgatgtctgcttactcgcggctgaccacaaccgggcggaagtgccgatgtacgatgtattctgtgcgctagccacccccggggctgctgccctcgcggcaccactacttgccgaaacgcccggaatcgatgtagtcgttgatcgaatcatcgaagctgcatacgatgcaaaccactcggtcgtgcgcaatttctcatggttcctcgcaacgctcgatgcgacacgctcccatgctatcctgaacgagcgttccagaaaccctcaagttcgcgcagtagcgcaacgcttgctggaaggcatggactctgtatccgccatggcagagaaaccctaccatcttccaggcttcgctgccgatacgatcgatgaacagcacgaccagctgggtatacagaccgaggtgcaaacgctcgccgcgatcatgatggcgcgagatgtaacgcccccgctcgcgataggtctgttcggtgaatggggctccggtaagagctttttcatgtcgcagatgcgcaagacagtgaagacgctcgctcaacgtccgcagcagcagggcgcgtcaccgtattgttctagtgtcgttcaaatcactttcaatgcgtggcattacgccgagaccaatttgtgggccagcctggtcagcgctattttcgaaaagcttgccatccacattttcggaggcacgcctactgaacgtcagcaggcccagttgatcgccgaactggcaagtgctaaggcggttacagaagaggttcgtgcggaagagagacgagccagcgagcagttgaaggaagaggaagcccggctcgacgagctgcgcaagaagagactggccgaggaacagaagctcgcgaagttcaacccgacctacttgatcgacttgctcgaagacagcactctgaaaaaacaggccgaacaggcatttgaacaactggggctgcctgtagtgctcgaccgagttgatgatttcaagcacgctgtggcggacgcaggcaagctatcaagccaaaccgttgcattgctcaaggtgttgtccgccaagagacgcagtccgctgtatctggcgttgttcgtcgcggcgctggcggtgcccgccgctggttatgctttctataactggctctcgcccgacagcaagctgttcacgacgctcggaaccatgttcgcgggcatcgcgacgttcgcgaccgcgggcattgagatcgtccgacgcggcatgaaagaggttaacgtaatcttgaaacccgtcatggaagcaaggaaaaaggctgacgcggaactcgagaagatccggaagaagcctgcggatgccgaactggcactcgcggccaacgtcgaggtgttaaaggtgaaggagcaggatgcgcgacgccgcgtggccgacgctgctgcacgcgtggccgccaccgaagaacgcctgcgcgaactggaggaaagccgcgatctagcccgcttcattgccgaccgccacgattcggcagattatcgcaaacacttgggcctcgtgtccctcgtgcgtcaagatttcgaagcgctttcggagcggattcgggagcacggaacggcggctgatggcgggcgcaaagtcgaacgcatcgtcctgtacatcgacgatttggaccgctgcccggcctcgcaggttgtcaacgtactgcaggccgtgcacctgctgctcgcgtacccgctattcgtcgtcgtggtcggcgtcgattcgcgttggcttactaattcactctccatgcactacaaagaactcggcgcggcgttcaccgaagcgcctgaggcagctgctagcccccagcactatctcgaaaagattttccagattccgtattcgctacgtccgatgagtgcggagggctacggcaagctagtgagagagctcacagcgggcggccagcgcatgcctgtgacgcagctacttaccccgtccggtccggcagacgtgaagccgtctactcccgcatccgccgcgattggatccgcgctcacttctgacgcaaacgtgaccgcaccgcagtcggcactggcatcagaatcagcagcggtcgaggagcgcgcactggtcattcatagctgggaggaatctttcgccgcgagcctttacccgttgatcccctccccacgagctgctaagcgcttggtcaatgtctatcgcgtgctgaaggcgagcgtcggaggtgcccaactgcaggcgtttgagggcactgagacagagccaggccagttccagattccgttgcttttactagccatacagatctgtgatgcctcgacggcgacggcttggttcgctgaccttatggccgagcaggggcagcgtaattccccggaggaggccttcatacgtactgccactgcggacgcccgcaagcggctgatggagcgaatcaagtacatcttcatggaggccggattcccgaaggatgccaccttgctgacgaactggatcccgctagttagccgttttacgttcgagacgcgctctatagtctga

SEQ ID NO: 242579 - DNA, 129 bp, Klebsiella pneumoniae
atgatcatatcgcatccaaatatcaagtcggtgatggttttttatacaatgctcgaggagcgtggttttatcatctccataagcaatggcggcaacaacaccatcaatttctttaccaggagggggtaa

SEQ ID NO: 242580 - DNA, 390 bp, Klebsiella pneumoniae
atgcttagagaacaagagatatctgtaggctctacaatgtgggtgattgctgacggatatatcccgccctatagcaacggcccttcaccagaaatggtcagccacgacagtatctgcatgctcaacgccgggaatgatacggcacgggtcagtgtccatgtctactttaccgatcgggagcctgctggcccgttcaacatagagatcccagcccgtagggcttttcatcaacgcattaatgatctggaaggccctgagaaaatccctgtcgggacggattacagtcttctcatcagaagtgataaaaagattgtcgtgcagcatactcgcctcgattcacggcaatcggataatgcgctgatgacaacaatggcgtatccagtcgcgtaa

SEQ ID NO: 242581 - DNA, 1434 bp, Klebsiella pneumoniae
gtgaatatagatactctgtcacataattcatcaaagattcccatcaaggttgcgtttatctcatgcggggcagccatcggtggttttctgttcggttttgatacagccgtcatcaatggtgctattgaccccatcaaagaagtctttgggctatcgagctttggtgtcggtgttgttgttgcgattacgttgtttggtgcggcctttggcgcatttgctaccggttggctggcagactgctgggggcgaacccgcgtcatgttactggcttcccttatgtttattgcctcctccatcggatgtggcatttccactggctattacgagcttacaatctggcgtcttatcgtgggcttgagtgtcggcataactactgtcatcggtccgctatatctctctgaaattgcacctgcggcagtcaggggcaagctctcctccctgcagcaaatggcgatcgtgctggggatttttgccgcactcctgagcaataccatcattgcccgtgtgctcaatggcgccaatgccgaactctggttggggctgcccgcctggcgctggatgttcctggtcgggctgatcccctccgggctgtacggcatattttcgctggtcatcccggactcaccccgttatctggtatcacgaggaaaaatagaatcggccaaagacatattgatgacttcacaaagcatcaccgctgatgctgcacaggaacaggtcgaaagaattcaggccacgttacaactgacgcaccgtccacggtttcgggatattctcgataaaaaggcagggctgttgccgattgtctgggtggggattgcactggccatgttacaggcgctggtgggtattgatgtgatcttctactactcaacctccttgtggaaatcggtcggctttgatgaatccacctcttttgaactctccgtcctgagctctttcgtcaatatcctggctacagttgccgccattgcactgatagacaaggtgggcagaagaaagctgttgctgttcggttctgctgggatgttcttcagcctgctgaccgtctcgcttggattctcaatggcacagcaagtagctgaagatgcgattgtgctgccggagccatggggagtgatcacactggttgctgctaacctgtttgttgttttctttgccgtctcctgggggcctgtcgtctgggtgttattgggcgaaatgttccctaacaggatcagagcccttgcagtttctgtttgcgccagtactaactgggtggcaggggttgtactgaacctgtccttcccgacactcagggatttttcactgcccatcagttatggcatctacgccgtgttcgcactactgtcctggatactggtcaaacgctatgtacgggaaactaggcatgttgaacttgaagatatgtccgaagacataaaagtgggatag

SEQ ID NO: 242582 - DNA, 801 bp, Klebsiella pneumoniae
atgaataaacatgaaaggggtaatgccagaataatatttgtaacaggggcgggctctgggattggcagagcgatagcactgaatcaggcgaagcagaatcatgcagttgtgattgttgatatcaatctgcaggcagcccagagagtcagacaggaagcactggccgcaggtgccacagatgccctggccattgagtgtgatataggcgatgaggtgagtctcatccaagcttttcaacagtgtaaagagtacttcggggatattcccactggcattgtcgccaatgcgggcatagagatctccaaacgggcacatgaaaccacgcttgaggaatgggagcgggtgatccagatcaacctgactggcacgtttctaacctgccgcgaagccatcaggctcctgcttgcatatgaccggcccggcgctattgtgtgtaccagttcgccctcggcctttgtcggttttgctgctggaagcaatagtgcttatggcagtagtaaaggcgggatctcagcgctggtcagagccttggcgattgattatgcagacagtcggatcagggtgaatggtgttgttcctggagcaacggcgacgagtcttttgaatatcacattggaccaccccagtaacaaggcgttttgtgagcgggtgaaagaacagatcccgttacggcgtctggcaacaccagaagaagtcgccgatgccgtcagttggctactgagtgagcaggcaagctatgtcaccggcacgcatatctttgtggatggtggtttaacagccagaggggcgaacgacttttaa

SEQ ID NO: 242583 - DNA, 735 bp, Klebsiella pneumoniae
atgaagaaaaaagacgaaacaaagacccctccttcctcacagaaccaaatgcaatggaaacccgttaaggccagaaccttggtggatgaggctgtgaatgcgatcgttgcagcggcggcccgtggcatgttattgccaggtgaccgcgtcgttgaaaccgatattgccagcaagctcaatatcagccgcatccctgtcagagaagcactcaggctgctggaaagccaggggatcgtggtcagtgaaccctttaaaggcattcgcctggcgccggtctccaaagcgcgtcttgagaatattttcgaggttcgtgtgacgctggaactgctggccgtcaaacgcatcgtcaaggctggcctgcataaagaagctctctttctggatacccttcgacaatgcattgatgaaatgcagattatgtcgatgcgcaaagacgcctacggcgtggcaaatgcggatgtcgctttccatcgtgagctgtgtcgtctgagttgcaacgatgtgcttctcaacttatgggaaggtgtggcacgtcaactaaccatcgttgtaggtctctccacactcgaaaaatcaatgcatatcatcgttgatgaacataatgagctgttacgtgttctggcatcgggagacctacccgagattgaaaagtgtatggtcaatcacattatcaaacagaacgaacttattgatttttcaggtctcacagaacgcaaggcaaccaaagaagcctga

SEQ ID NO: 242584 - DNA, 1185 bp, Klebsiella pneumoniae
atgaaagcgcggagtcctgaagaacacgtcaaaggcgtttcaaaaatctcaatcacgtctattgttgccgtacctttgtcaggaaaaagtcctaaaggcggctggtcaaacgagattaaaccggaagattcgattcacacactgattgccgttcatacagatgctggtatcaccggttatggtagcgtatttaccgatgggcgtctggtgcaggcagcacttgatgttatgacacccttgttccagggagagagcgcactagagcctgagcgagtgacagagaaattgcgccagcatactttctggatgggaagagggggcacgctcacacacgccatcagcggcattgatattgcattgtgggacatacttgggaaagtcaccgggttgccggtgagtaatcttctgggcggaaactatcgaaagcgtgtgcaaccatactgctcactcttgatggaggggcctgccgagatgtttcaaaccatctgcacttataaggaacgggggtttcgtgcattcaagatcggttgggggccatttggtcgcgtcagtcctgagctggatgatgagattgtcgccgcagccagagaggcggcaggccatgatgccaaactttttgtcgatgcaggagccagcgatgcattttggcccaatggcctgaaatgggcacagcgtacagccgaaatgctcaatgcttacaacgtgcaatggtttgaagaaccactgcgtcctgatgaactacaagactatattcaactgagaaaatccagcccggtaccgattgcaggtggggaggtactcacacgtaggcagtcatttttaccctggatctcaggaggggcatttgacattgtccagcccgatgttacgaaagttggcgggatttcagaacaacggcgaattgcctggctggctgatgaatttggcgtcaagtatgtcggtcacggttggaatacagcactgggattagcggcagacctacaactcgcagctgcactgccgcatgttgactatgtcgagtttattggcggaagcccttatatcgatggtatcaccacggaaccttttactgtggatgatgaggggtatctggccattcccgcaaaaccaggactgggtatagcgctggataaggataaactggcggactatacgtccaatgcggctgctttatttccgggttga

SEQ ID NO: 242585 - DNA, 591 bp, Klebsiella pneumoniae
atggcctttgagaagcctaaaaaacaaaacatgcctacactccggccagaagaactgccgaagttgatgcgttctttagtcatgtcaaatttatctgttccgattcgctgtctcattgaatggcaactcctgacgctcgtgcgcccttctgaggcctccggagctcgttgggcagagatcgatctcgatgccaagctctggactattccagccgaacggatgaaggctaagcgtgagcacatcgtacctctatctccacaggcattagacattctggaagtgatgaggccaatcagtaatcatcgtgaacatgttttcccgagcagaaatgatccaaagcaacctatgaatagccaaactgctaatgctgctttaaagagaatcgggtatggtggtaagttggttgctcacggtttacggtcaattgctagtacaacaatgaatgaatctggattgaatgctgatgtgattgaagcagctctggcacatagtgataaaaacgaggtcaggcgtgcatataatcgctcgatatatttagataaaagaattgagctaatgaattggtggggagcgtttgttcgcagaacctaa

SEQ ID NO: 242586 - DNA, 507 bp, Klebsiella pneumoniae
gtggcacggacaacacgcctcctgagcaacaccgaaattttgcgcgctaaagcgttagagaaggatctaacattgcatgatggcgatggccttttcctgatagtgaaaaccagcgggaaaaagctctggcgtttccgttaccaacgtccggcgacaaaacagcggacaatgatggggctaggagctttccccgcactctcacttgctgacgcccgagggttaagagcggattaccttgccttgttagccaacggaattgacccacaaattcaggccgaagttgcagaggaacagcagcaaatcgctctggatagtattttttcaacggtcgccgctaactggttccagctcaaaagcaaaagcgttacccctgattacgcaaaacacatttggcgttcattggagaaagatgtattccctgccatcggcaatatccccgttcagcaaatcaaagcccgaactttggttgaagcgctagagccaattaaagctcgtggggcgccataa

SEQ ID NO: 242587 - DNA, 144 bp, Klebsiella pneumoniae
atgttctcggacaacgacagacacaaaaaaagcccgcagagcttgtgccatgcgggctttctgtacttcaccggaagtatccggatcatgatttggtggagctggctgagagcgacaccaaatactaactgtctgattctttga

SEQ ID NO: 242588 - DNA, 960 bp, Klebsiella pneumoniae
atgataaacacaaaacgttcctctagtcttcacaattcccccaagctttaccctttgaaccaatcccctcttttcaaattgaaatcaaaaaagaaactgctagaaatcattgggttatcgaaagctcaagctgataaactcatgctagattctgcgtataaagaattcgaaaacgatgctggaagaaagattcaagaaccaattcctcagctcaaggcggttcacaagaagatcggcgttttgttaagcagaatcgaattgcccccatatcttcactccggtcggaagaagcattccacgctaactaatgcaaaagcacataagcaagcaactgaacttctgaagctcgacattcacaaatttttcccctcgactcgggctgcaaaggtttacaaggcatttgttgagaaatttgagatgtcacccgatgtagcttatgtaatgaccaaccttgcaacctttgcaggaaaagtgcccacaggcagcccgataagtatggccatggcgttttgggcaaacagagatatgttcgacgagcttagcaaccttgcgacctcaaacagcttagtatttacggcatatgttgacgatgtagcgttctctggttcgaaaatcccaaaaggatttgctgcccaagctaaaaagtgtattcgttctcatggcctcacctctaaagacaagaaagagcgattttatccatcatcagaagggaagctgcttacagggattgttattcaggatggagaacttaaggtacgttgggcacacagtgattcaatcagaaaagaattcgccactttggctgaagcaacagacaatgctgcaaaaataattcatctagaaaagctagcaggcaagcttcatgcagccggtcaagttgacttcagacagaaagacagagcccgcttcttcactcagcaactaaagatagccaaaaagcaatctactcaaggcagttag

SEQ ID NO: 242589 - DNA, 204 bp, Klebsiella pneumoniae; identical to SEQ ID NO: 100296

SEQ ID NO: 242590 - DNA, 210 bp, Klebsiella pneumoniae; identical to SEQ ID NO: 100295

SEQ ID NO: 242591 - DNA, 579 bp, Klebsiella pneumoniae
atggctacagttggctacgcccgtgtgtctactaccgggcaaagtctggatacacaactcgaagcgctatccggttgcgaaaagatattcagggagaaaatcagcggggcaaaagatgaccgtccagaactacaggcaatgctggagtttgttcgtgagggcgatgtggtacaggtaacaaaactggatcgccttgcccgtaatacccgccatctactggaagtctccgaataccttcagggtaaaggagtggccctgaatatcctcaatattggcatcaacacagccacacctacagggaagctgatgctgacgatgatcggggctattgccacattcgagcgtgaaatgatgttggaacgtcaggctgagggtatagctctggcaaagctcaagggcaagtacaaaggccgcaaagcaactgctcgcagtaaagcactggaagttattgagcttctagaaaaggggctgagtaagccggaaatatcccatcagttaggaataggcattactagcatttatcgcatcgtccgggctaatagacccgacttactggagaacaagcattgcagcgactaa

SEQ ID NO: 242592 - DNA, 195 bp, Klebsiella pneumoniae
atgggatacacatcatggggccccatcgatctggtcagtaactccaccgcggaattaggtaagcgttacggctttatctacgtcaatcgcgatgatacgggacggggcgatcttaagcgctacagaaaagcgagcttctactggtatgccgatgttataaaaagtaacggtgaaacgctggtgccaaatatctga

SEQ ID NO: 242593 - DNA, 693 bp, Klebsiella pneumoniae; identical to SEQ ID NO: 206653

SEQ ID NO: 242594 - DNA, 771 bp, Klebsiella pneumoniae
atggaagcgagggtggcgcaaataaaaatgcatttaacagaacattcctcgcctgatgattatgacagggagtctgaagagaccgctacttttaattcactttgcgagttgctgtatattaacacaatcatctaccttgaccaaaaaaaacttaactatagtattgagatgttcattaacatctttgggaaagatccggcatctctaaatcatctcagtgattttcaatttgatcactactattccggtgagttatttagtatatttcttgcaaaatttaatgcgtttttaagtgctttttcatttactgaaagcaacgatagtttatatgatagattagttggcattcggtatctggaaactatacttaaaaacacagctgttattgctaataagatgcctgtcccccctacgtcggaggctgcagtttacaacgcagttaaaggcacccttgaggctgtgtttactggtgcaaagagtcccaggagttcatttataaagagttttaaagaatataagccagacattcttataccagaactgcatgcagcagttgagtataaatatgcgaatagcgctgagaaattaaaaagcacaattgaccagatatgtgctgatgtgacaggttatactggagatagtgattatcgaattttttatgctgttttttatgtcactcaagatttttgggggcaggaaatgtttgcgagagtatggtcggagatgaatttccctaaaaactggaaagcattttatattgtaggtaaatag

SEQ ID NO: 242595 - DNA, 2406 bp, Klebsiella pneumoniae
atgaaaattaatttacagactactttaatactaattgccctctccgctttttcactcccctcatatgctcgtgtgtatgaatatgtattcaaggatgtctatggaacggataaatcagtcagtgcggaagcaggtatcctaaatacaaatgaaaaaattcaggtaagaataatatcgggactcgacagaaaaattcaggtaaccgtaaagaaagacaatgttggagtatatagctttactactgagagcgtgactgtcaatgaccgtataaaggcatcaactggtgaagaattttatggtaaaacgctgacattgccaccactgagtgatggaagttatgtaataacgtcagatatcctgaatactcaaaacactgttatcgacagcacgtctcacaattttattattgatactgtagggcctttgtcagataacctgagcgtggaccaaaaccccggatatgatatggtcttaacaggtgagcgttgggaactaggcctcggggctgaagcaaagctgtacctgaatgtgaaaaacgtcaaatctgccaccggttttgataaagcgactattcaggtgataaaacctgatgatactgttttttcaactacagatatggtttatgacagtggatcagcatccctttcaataccgtggacaaaagggaatatgagtcggtcatcatggatgcctgtatcaaacgctgatgtggaatatcgtttccgtgtgacgctctatgataaagcgggaaaccataaagttttgccggatcagaagttcatatttgactcagatcttggtgaatatactttatttgctgtttatgacccgacttctaaaacaagcgtagttccgggatttagtgaaggttacatagcatataagccgggaatgaccgttaaccaaaaccctttaacactcgtgtacagggttccatcgaataatcgaagggaatacagtaaagctggtttgaaatttgggacgattatttccgaagcgaatggatacagttatgtatccgcgaaaacggcctataaggtagcttacgtcatccataacggatatcaatggggtggaggctcactctcctataatatcaatttaggaagtgaggctccggccagcccggcagcacctgaagtatggttaacatcagatataaaaggtgaaatgaatgcaggcagctatctttgggattccaaagatctacccgtgaaattcagctctgtaaagatcactgcgtctccgcgaaattatggtcagagagcgatgagtggaaatactgagatttgtcagatacctgctggtgagactgagtgtactggtgcggtatcatggtctattccgaaatcagggaatggtattacaacatacttcttcagattgactgatatggataaaacactttcatcagtcactgtagaaaaaagacatcactggaacactgatctgttacccaagataactggatatagttaccaggaggaaaacaaaactgtactcttatttgtgacgcaaccagggcgcggaaaattccgcgatttgttgcaactcaaatctgctgctctgattgattcagataccggggaccaactactgtcaggtatccaaacagctctatctggcgaggattacacatacagttttgatctcagcaaactggccgaaggtaaatacaatttaggctttctggcaaaggacagctttaacaatgaaacttcatcaccattcataaatctgattaacgacaagacacctcctgttgttaattttaaatatgaaaatgcgccgctatcccccggtgctactgttttcgggcttgagaacatcagtataacgctaaatgatgagttaacagtacccagccttgtcagacttgaacttaaaggaggaccagcgtcggatagcgttatcttggggtttaaccagaatacggacggtagttatacacctgattaccctcgtctcttccccagtctggatgcaaatacggacaaatatacactaaccgcatatgctaccgacgcgaaaggtaacactactcaaaaaagcattcagttcgcctattacccaaaaaacctggtcacccttgagaagctgaaaactttgggtgttgtaaaggcgctaaaaaccagtgacaacacaccgttggccgtcatgcggacgggacagctacgacgtaacgatggctcactggctaagggtatacaaacggcaaacatcacggtcaggaaggacgcagattatgcgataaatatccttgggaacgttattcaccccggggagacaaaagaaattcagatagaccttggaaccggtgaaaactcaactgttcctattttcacagcagaaaacggttctacaggggaaagcaatttcataatcgaatttccgcaaatcaagtaa

SEQ ID NO: 242596 - DNA, 438 bp, Klebsiella pneumoniae
  misc_feature (384)..(393): n is a, c, g, or t
atgagtcttctggcggagtggttgcaaacaaagtgttctgcgaatgtttgggtattcgttaagcgcttatccgctaacgataccggcgctacaaaatcccaccagtctggtctttacatgccgggagccgtcattgatgagctgttcccctccctccgtgatactcagttaagaaatcccgaagctcttttttccgttcatgtgtcatctcatcctgattgtcctgacctaaatgatgtaagggccatttactacaacaataaatttttcggcggcacccgtgatgaaaagcgtctgacgggttttggtaaacaaaatcctctccagaatccggagaataccggcgctctggcacttctcgccttcgatcatatgccaggaacnnnnnnnnnngaacatcttcaagttattgtgatgtctgggtgtgcaaagacctga

SEQ ID NO: 242597 - DNA, 408 bp, Klebsiella pneumoniae
atgacctataaattgctggatattatccagaccatcaacgttcttactcgtcaggcacatcagttgtggttatacggtcagatatcacaacaggttcatgaccgaattatcctgcaactcctgagctcactgcgggttgcgatggacaacataactaaaatactgaacgctgaaaaccgcgtgaatggaaaatacgacgcattgccattcattcagaacattaagcggtttaaatcggtggaactttatattgccagtctcgaaactaaagcccctgttcagtccggtcacagtgacagttctgctgatgctggcagtgagccgacattaaaaccagaagcagcagctggcaccggtaaaccatctgacaaaacacagccttctgctactcctgtttcggtacaataa

SEQ ID NO: 242598 - DNA, 180 bp, Klebsiella pneumoniae
atgaaaggaataaatgaagtggtaaataatacggacgtaataaaagatattaaattatctctatcaccgttcgcttcgttgggtgagctgaatgttatagatgatgagtttaaactgaaaaataaagagtttgatgggtttgctaaacttaaagttaagaatgatgtaaaaagggggtga

SEQ ID NO: 242599 - DNA, 201 bp, Klebsiella pneumoniae; identical to SEQ ID NO: 234731

SEQ ID NO: 242600 - DNA, 372 bp, Klebsiella pneumoniae
atggaaatcattcaaggcaaagacagcttcaacgagatggcgaccggaattctggtgaaactgtttgcagcttatccctcttactcaactttcgaatattccgacttcggctggaatccgagaacaccgaaccgtcaggttgaccttcttgttgataccctcgatacgcttaaggatatggggtacatcaaagtcatttcggtaactgatatggactacaccgctaaattaactccgcttggctcaagcattctcaatcacaaagccccaagttcaagcgagacgattattagtgtactcaaaggtgtagcaggagaagccaggagtgctgcaattggtactgccatcggttggatttttggcgggaaataa

SEQ ID NO: 242601 - DNA, 234 bp, Klebsiella pneumoniae
atgataaacgtggcgttcttcggccatatactgcgccagcagctgagcgcgaaaggggagttctgccacgttaaaaagcgcgctggaatcgtcctggtattcatcactaccgaaagtttccacggtctcagaggttactcctgcatcatcgatgtgatgatccgcaggcacctgacctggcttcagagcccaggtgcgaccatcgtcgccgagctggtagcgttcgcaccatga

SEQ ID NO: 242602 - DNA, 1746 bp, Klebsiella pneumoniae
gtgagtgcgttaaccaatgacgtattcatcagtttgggtgaattgacagatggggtcgtagcacaaacagggcccactgatgattttgtatatgttgacatcagcagtattgatcgagaaacgaaaacaataagtgaagcgaagcatttaacttatgctcaagctccaagtcgagcaaagcaagtgttaagggctggtgatgtcttggtttccatgactcgtcccaacttaaacgctgttgctttggtgacaaaggacctggatggcgctattggatctacaggctttcatgtgcttagatcatcttggttgcatcctaagtatttgtttgcactagttcaaacacagagtttcattgatgcaatgtcgtcagtggttcaaggggctttgtatccaacagttagaccaaaggatatttctgcgtatcgagtcaaactggaaacttctaggcaacagagtcgtatcatagaaaaactagaagagcttttcactgagcttaatgttggagtaactgagctaaaaactgctcagaaaaaaatagttcaatatcgtcaatcactgctaaaggacgcagttgaagggaaactaactttaaagtggcgagaggtcaataagcccactgaaagtggaatgcagttgttggagaatcttctgagtaaacggcggattcgctgggaagctagtcagttggctagctatgagaaacgaggaaagaagctcaagaaggattggcagaaaaaatatcccgagccgcgaaagccagagacaactaatttaccaaaccttcctgaaggatgggtatgggctagtatcgaccaaattgtgtctgaatcgtcctacggaacatcagttaaatgtgattacgagggtaaaggggatccagttttacgaattccaaatgttagtaatggcagtattaatcttaatgatattaaatttgcgactactgaattgaacattggagaaacagattttttgtctgtaggtgatgtcttgataattaggacaaatggtagtattggcttagtaggtcgagccgcagctgttgttgaaactctgtcttctcgatactattttgcatcatatttattaagattgcgttgtacagaaacgaatattttacatcgttggttattagtagctctatcggctcaatctggtagaaaatggttagaagcacgagcttcctcgtctgctggtcaacacaacataagtctgtcgactctactatctatgccaattccactccctccgttagatgagcaacgctatgctctagatttaattgaggaagttaacgattcggtagctcagcaagaaaaagcaatagaccaattgctcaaacactgtactgcccagcgacaaaatattcttagagcagcctttactggccaactggtaccacaagatacaagtggcgagactgtaagtgctctgcttaagcgcatttatgccaaaaatattaatattaaacgtgcaacgaaacccaaacaacgcaaaaccaagaaacaggagagctcaaaggtggagcgcaaattagtcgatgtactcgctgaaactggtgattggatgttggcacaagacgctttccaacgttgtggtattgatgatggtacacacactgaagagatcgaaactctttatgctgagctacgtgcattggacaaggcaaagcgattagaagtcgatgctgtcatcgatgagcagggacgcaaaattgctgatcgtataaagttggtgggctag

SEQ ID NO: 242603 - DNA, 1725 bp, Klebsiella pneumoniae
atgcgtttagatatgcttactataggtagtgctaaagacagccctactcatcattttaaaaatctgaaaaatattacactcgactttgagcaggatcattgggtcactgtcgtgatcggctggaatgggactggaaagtcgaatgtgttggaagcattagctatcatttttcgagatttaattgcacggaagcggaaacctatttttgcttttcgattggcgtacagaatggggactggagaaagtctaagatatgttcatatcgatgctgacccagaccgagtaaaagagccttttattatccacgcagcgaccgcagctgaagtcggtaatgcagctaaaaataccttctcatttgatgatgtaacatccttaaatgccctcctcggtaaagaaataaaactaactgccttttttaatgctgaaaccgagtatttgcccagatatgtgtttagttactattcgggtgaaagcccaaggatgcacgaaatttttcgcccttatcttgaaagctatgatagtaagctgcgtaatggcgaagatcctggtttaaagagattgttttatgctatgccagtacacagccaatttgtactactagcttttttgattcaacaatctgcgataatccaggattttttggatgaccacttaggccttgatcctgatgaaggcatcgaatcagtattgtttgtccttcgccagcccccatggaatgctaacgctccagatggggatgatcgtttctggaatgctcgtggtgtagtacgcaatttcttagctcgcctctatgatattgcgttggctcctattgaaattactcgacgagtccctatttctctttggaatacgaaaaaactacagtttaagtatctctatgtgaaggatattgaggcattaaaggatcttgtaggtaatcaggcgcctgctcagttctttcgtgatttagaaagcacttatgtatctgagttaattgaagaagttagaattagagttcgtctaaagaaaaatgatggaagcgtgactttccgcgaattaagtgagggcgagcagcaattactgactgtattaggattgctcagattcacagcagaagatgaaagtctatttttgttagatgaaccggatactcatttgaatccacgatggagtgtggattatatttcttatttaaagcaatttattgcgagtggtacgaagcaagaagagactagtcacatattactcacaactcataatcctcttgcaattgcagaactggagcgagaacaagtacagattctgagaatggtcaaagaggataaccaacgacgggttgttgcatgttatccggaaatggcacctcgaggaatgggatatgctgcgattgtgaccagtgatatgtttggaattgcttcgtccttggatcaacctacgcaattgctgttagagacacagcgtgcatatgctgctaaagagcatctctctgttgatcagcaacaagaacttgataacattaatgctcaactcgatcgactaggttttcggttctttcatcctgatgatgaatattctcggtacttgcggctacgaaatgacatccttatggctcgttttgcggttaatacacccgaggatatcgcaactaaggttcttggtatgagtcgtgtagaaagagaagatcttgctacaaaacttatcgaaaagttattagatgacgatgagatggacagaggcgctccatga

SEQ ID NO: 242604 - DNA, 804 bp, Klebsiella pneumoniae; identical to SEQ ID NO: 201025

SEQ ID NO: 242605 - DNA, 1509 bp, Klebsiella pneumoniae
atgaacgcaaacacccttgtccaaaaactctggaatttctgtaacactctgcgcgatgatggtgtaggttatggcgattatctggaacagttgacttacctattatttctgaaattagctaatgaatatgcacaaaagccctttaatcacgatacaaaaattcctaaaggatacgactggcatagtttagtctcaaaaaacggtgaagctctcgaggcgcactatatggctactctacacaaactgggtgaagagcctggtatgttaggggcaatatttttcaaagctcagaacaagatacaagatccggctaaactttctcggctagttcaactcatagatgcagaaaattggatcaacttagatactgatactaaaggtgatctttatgaaggtctgttgcaaaagaatgctgaagatacaaagagtggtgcgggtcagtacttcactccacgtgctattattcaggctgtagttgcttgcatacaacctgaaccgatgaaagtaattgcagatcctgcctgtggcaccggtggttttttcttggtcgctaatgagtggttatccggctctggacactggcttgaggataatgctagttggttacaacgcgaggtgccaaaactcactaaggtggaaacacgttttttgcgtgagggaacattttacggaaatgaaattgttccaagcactcgtcgtatgtgcctaatgaatctttttttacacaatattggagatctatatggagaacctactatagatcgttccgatgccttgatttcagaacctaaaattaaggtggattatgtgcttgctaatccaccgtttggtaaaaaaagtagcatgatcatcactaatgaagagggggatgaagacaaagatgcactgacatacgagcgccaagatttttgggagactacatcgaacaagcaactcaatttcttgcaacatatagttagtatgctaaagatcgatggcaaagctgctgttgtcttacctgataacgttttatttgagggaggggccggtgaaaaaatccgtcgcaagctaatggaaacttgcgatgttcatacaattttacggcttccaacaagtatcttttatgcacaaggcgtcaaagctaatgttgtgttttttgataaaaaacctaagaatggccagatccataccaagggtatttggtattacgaccttcgaactaataagcatttcactctgaagacacgtacgcttaagttagacgatctgaaggatttcgtaatctgttataatgcgaagaaccgtcaagagcggcaggaaaatacacgctttaaatggtttagttacgaagatttggtggcaagagacaaagcaagtctagatcttttttggttaaaagataatagccttgacaatctagatgatttgccacctccagatgttctccagcacgagattatcgagcatttagaagctgctttgacggcatttcgagaagtagcaaacaatttgccaagtaatgaacactga

SEQ ID NO: 242606 - DNA, 234 bp, Klebsiella pneumoniae
atgccgtatgaactgtctcacctgaatgccctgtgggatgcgctggggaaaacaacggtcagggatgaggagggtgaagttgtgaccgacgaacccttcctgcatttcccgacgggtacccctctcttccatatctggtcatggtttgaatccctgcacaacgagttcgtcgttgccgcaaaactgtacaacacagctccccccgacgtgtcaaaagacaggaaaagcaaatga

SEQ ID NO: 242607 - DNA, 1290 bp, Klebsiella pneumoniae; identical to SEQ ID NO: 138818

SEQ ID NO: 242608 - DNA, 177 bp, Klebsiella pneumoniae
atggagcaggcgctggccagctgtcagcagcactggccgcaaaaggcgatttacctcggggcgcaggcgcacctgcaatccttttacgcccacttcggttttacgccggtgaccgaggtctatgatgaggatggcatcccccacattggcatggcgcgagaaaagcgcgctgtctga

SEQ ID NO: 242609 - DNA, 267 bp, Klebsiella pneumoniae
atgagcagaaaattaaccaaaaaagagcaggcctgggtggatgaggtaaacgcagttctggcacgctgcccgtcgccgaagaaaatcggctttttcaccatcggagaccaatcaattttgctttatgacctgcgtcgaattgatgaggtaactgacgcgctggacagcaggaactcatccgactggtgtaccgccatccaagacatcggtgcgggctttgatgaaaccattgattttccgtccgccgtcgaaagcacagccggataa

SEQ ID NO: 242610 - DNA, 447 bp, Klebsiella pneumoniae
atgaacatctcaacagtaaacgagctcatcgcctccatggagagcgcaggcgagctatcgatcagagagcagaagttcctgaagctggcgaaagcgtaccagcagctggctgcggagaatgcggggctgaaggctggcattgcagaagaaattgaagttatcaatcgtggcggtcaggcgtactgcgtgaaggacggcatgtccataaacccgatatatgcgcgcggatggaatgaccaccgggctaatttggcagcggaaaaaacccccgccaccgatcgcatcgtagccggcattaaggctgatggggtggaggagttcattggtcgcctgcagcagcatgtcgatgagggtgattttgtaggcgatgaagttgccgtaattgttggcgctatcgactgcggtaaggagtttttcgagcagctgcgtgagggggccaacaaatga

SEQ ID NO: 242611 - DNA, 876 bp, Klebsiella pneumoniae
atgagcgccgtcatcgatctacagtccagggtcaatgaataccttgccgagcgccgccgcctgggttttgaccttcatcacatgggcgggggcctggcgagtttggctcgtttcgtagcggccgcgcaccacagcggcccactgaccatcgacatcatggtcgactgggttcgccaggataaggcgcagcatcgtacccaggcaacatgggcgcggcgactcgaacttctgcgaccatttgcacgatggatgcggcagtttgatccgactacagaagtgccagatgagtccatctttggcccgataccagggcgggttacacctcgactgatcgcatcaaccggtttgcgtgtctcggaggctatgtccctcgtgaacgccgatgtggatttggtggccggtacgttgacggtgcgcaaaaccaagttcacaaagtcacgcatgctgccacttcacccaagcactgttcaggctttgcttacctacagacgcttgcgaagcaaggccggtcattgttctggtgactcaccgttctttattgggacacgcggacaacgacatggccagcccctttcggagcgtcaggtgcaccgcgtgttcttgagtctgagaagccagatggattgggttgaccgtggttgccatggagggccacgcatccacgatttacgccattcctttgccgtgcgtcgtgtgattctgtggcatcaacaaggcatcaacgttgatcaggccatgctgtcgctgtctacttacttgggtcacgccaagatcagtaatacctactggtatctcacaggagtgcccgaactgatggcgctggccggcaacaagtttgccgactttgcccaggcaccggagtttggtgatgagtag

SEQ ID NO: 242612 - DNA, 1017 bp, Klebsiella pneumoniae
atgagtagccccaaactgccgcaaccgccgccatcattccaagcacttgtgcaggcattctttgcggaacatctgacccaacaccgaacgttgagtccgtgcacagtggcctcctaccgcgacacgttcatgctgatgctggattttgcgcaagtgaagttcgccaaatctccagctggactgaccctggcagatatcacgcccgagttcctgctggggttccttgaccatttggagaacgaacgccacaacgctgtgcgaagtcgtaatacccgcctcgctgcattacgaacattcttaaaatttgcggcacatcgggacgttgcctcactgcatgttattgaacgcgcactgggcgttccaatgaaacgcttcgaaaggcccatgcttggattcttgtcgcgtgatgagatgctggcaataatcggaacgccaggtggtggttggacaagtcagcgcgatcatcttctatggggactgctctacaacacgggtgcacgtgtttccgagatcattggcgtacgggttgccgacgtggtcttgagtgctgcggcttgtgttcacctgcatggcaaggggcgcaagcagcgcacggtaccgctttggcactcaacggtcggcgagattcgagcgtggcagaaggctaacccccaacttgacgcaagatcacccttgctgcccaaccgcgacggcgagtcgatgacgcgcgacaacgtcaacaaacgcttggctttggcggtctatgctgctgccaagatcatccccgatttagcaacgcgccacgtaacgccacacacgattcgccacactaccgccatgcacttgctgcagtccggcgtggacatcagcgtcattgcactatggctgggccacgaaagcccgacaacaacgcaccactacgtggaagccgatctggcaatgaaagatcgggcgctggccagaatgcaagaacccgacgcaatgattcgtcgttacaaggcacctgactctctgctggcgttcttgaaggcgctgtga

SEQ ID NO: 242613 - DNA, 1002 bp, Klebsiella pneumoniae
atgaaagcctttattgtcgatagctacaagagcaaaaccggcatgcgcctggatgagatgcccctgccgcaactgcgcgaggacgaggttctggtggaggtgcacgccacggcggtgaacctgctggacgccaaaattctcaagggcgagttcaagctcatcctgccttaccgcacaccctttgtgctggggcacgacgtggccggtgtggtggtccgtgtgggcgctggcgtgcgccaattcaagcccggtaatgcggtgtatggccgcccccctgatttcggtatcggtaccttcgccgagtttgttgccgtcaaggaaagcgcgctggcgcccaagcccgacaacatcagcatggaagaggctgcctccctgcccctggtcggcctgacggcctggcaggccctggtaaagaaggcccaactcaaaaagggtcagaaggtctttatccaggccggctccggcggcgtgggtacgtttgcgattcaactggccaagcacctgggcgcaatcgtcgcgacgaccaccagcgcgggcaatgcggcgctggtgaagagcctgggcgcggacgtcgtcattgactacagacatgacgattttgaaaaagtcttgcacggctatgacgtggtgctcaatagccaggacggcaagaccttgctgaaatcgctgcaggtgctacagcccggcggccaactgatctccatctccggtccgcccgatccggcctttgccgacgccatcaaggccgcatggccggtgaagcaggtgatgcgcctgctcagcctgggtgtgcgcagcaaggcccggcgccgcaacgtggactatgccttcctcttcatgcaagccaacgggagccagctgcggcagatcacgacactggtcgagtcgggtgccatacgcccggtgctggaccgcgtctttcccttcgagtcaagcaacgaggcactggcctatgtggagagcggccgcgccaaaggcaaggtcgtcatcaagctgcgatag

SEQ ID NO: 242614 - DNA, 831 bp, Klebsiella pneumoniae
atgaaccccaagaacaaagtcgccatcgtgactggtgcatcgtccggcataggcaaggccagcgccgagcaattggcccaggctggctacacggtgtacggcaccagccggcgcggtgcccaggccggccagcaggcctacccgatgctggtgctggacgtgacccgtgatgcgtccgccgaagcagcagtgagcgaagtgatacggcgcgagggccgcatcgatctgctggtcaacaacgccggctttggtgtcgcgcccggtgcagcagaagagagctcgctggagcaagcacaggcgatttttgacaccaacttctttggcctgatccgcatgacgcgcgccgtggtgccgcatatgcgcggccagcgccatggccgcatcatcaacatcggctccgtgctcggctttttgcccatgccatttggtgcgctgtatgcggccaccaagcacgcggttgaaggctattcagaatctctggaccatgagctgcgcacctggggaatccgggtctcggtgattgagccggcctacacccgcacgcagttcgacgccaacatgctgcagcccgatttgcctctggacgagtaccgccagatccgcgccagcctgaaccaggtaatggaaaaggtgatggccagcggcgacgaaccctcggtagtcgccaccaccgtactgaaagcggccaccgcttcgttcccccgcttgcgctacacatccggcggactggccgcacgcttgcgcttgctacgccgctttgctccggcaggcctgatggatgccgggctgcgcaaagacctgcaactcgacgctcgccaggcaacagcatga

SEQ ID NO: 242615 - DNA, 141 bp, Klebsiella pneumoniae; identical to SEQ ID NO: 36145

SEQ ID NO: 242616 - DNA, 483 bp, Klebsiella pneumoniae
atgagcaactcactcaatttagccggtactgtggctgaatcgttcacctcacaacaaagtgatacagagggtatcctgtgcaacctcgtgcccgatgaacaacgtatcgccttctggccacagtattttggcaatatcccgcagtggacatttattgaaccccgtatcttcgcctggatggaccggctttgcgatacatacagcggaggtatctggaatctttacacgctcagcaacggtggcgcgtttatagcaccggagactgacgcagacacttgcgataaatggacgctgttcaacgccattaacggcaatggcgcggagatgagtgcagaggcggcgggtatcgcagcctgcctgctggaatacagtcaccacgcctgccgtacggaatgcgacgccataacacatcactattaccttctgcggaactactcgctcggacacgcagaatgccacgccattatgcgcattattgactga

SEQ ID NO: 242617 - DNA, 819 bp, Klebsiella pneumoniae
atgaaactggccagccgttttggacgcgttaatcaaatacgccgtgaccgtccattaacccgcgatgaactgatgctgtatgtccccagcgtcttctgcgaagacaaacatgaatcccgcagcgaccggtacacgtatatcccgaccattaccctgctggataacctgcagcgggaaggcttccaaccgttctttgcctgccagactcgcgtgcgcgacctgaataaacgcgatcatacaaagcatatgctgcgcctccggcgtgaggcgcaaatcaccggcaaacaggtcccggaaatcatcctgcttaatagtcacgacggctccagcgcttaccagatgctgccgggcctgtttcgctttgtctgccagaacgggcttgtctgtggcgaaacttttggtgaggtgcgcgtgccgcataagggcagtgtggtagaaaaagtcattgaaggagcttacgaagtgcttgggaaatttgaccggttggaggaaaaacgggacgccatgcagtcgctgttgctccctccccctgcacaacaggcgtttgccagagcagctctgacataccgttttggtgaagaacatcagccggtgacagaaactcagattctgtccgcacgacgctggcaggatgagggtggcgatctctggactacctaccagcgcattcaggaaaacctgatgaaaggcgggctaactggccgaacaacgaatggcaaacgggctcacacccgtgcagttaaaggtatcgacagcgatctgaagctgaaccgtgccctgtgggtcatggcggaaagcctgctggagagcttgaagtaa

SEQ ID NO: 242618 - DNA, 213 bp, Klebsiella pneumoniae
atgacctttcttaaaatgctgatgaccgccctgggtcaggctctgtcctggtatggcggatatcaggccagactgtatattgaaacccactttcgtcaggccggttacgatgacgacagtattgatgcagccagagacgcggtgacaatgctggttagcgcactgataaccgcgctgatagcgcaaatactgcgtcttctgaataccctctga

SEQ ID NO: 242619 - DNA, 357 bp, Klebsiella pneumoniae
gtgaaaataacgacgtgcctgatggccttctcgctcgtgctgtccacacctgcattagccgcaaagccattgccggtaaaagtggaaaccagcaatcttgtccatcctgccggaacccgctacgcaaaagtggttgtgaccgcgctcgatgacagcgtgaaagtgcaaaatattgacgtgaaccgaggtaactgccgaataaacaactacaaatcccccttttcgactaaagaaaccattttacccatcctgttacactatggtcagtccgtcagtgtgaacttttacaatgactgtgtcgcttcagaggtggtcgtcaccaccgataaaggcgcctggcgctacacctaccactaa

SEQ ID NO: 242620 - DNA, 468 bp, Klebsiella pneumoniae
atgatgaaagtaaaaacaatgcttccactgctctctctttttgtcctgactccgacagcctgcttggcattcggaaacaacagcgcctggagcagtggatggaaccagggcataactgaattcaccattctcggtaaaggtcagtctcagctctatcttgcctgtgacagtgagggggccagctctgccacccttatttataccgatatgaaaggccgccaggtcagtatggatactgatgctcagttgcagatgaaaattgacaggaatgaaactatcgacatcagtgagtcaggcagcagggctggagaaaacaatcttgcgctggcctggacgcaattacgtaacggtacacaggtgacggtttcaggcgctcacctcagtcagaccacgtttacgctaaaaggcgcacgccaggcgttgcctgaatttggtacccacggctgcgtctcaaaagcctcactatga

SEQ ID NO: 242621 - DNA, 1455 bp, Klebsiella pneumoniae
gtgagtcacgcatatacatcaggtttattaaatggagggccatctttcccactggaatgtgttccagacattatccgtcatgccattacgggagcggccagtaaaaccaaagctcctgttgtgctgatttttgcatccgccatggcaccggtgtctctgctttgtcaggggttattggatgtcagtccggcggaggggctgacatttccggtatcctgtaatttttgcaccgtagcggaatcgggagagcgtaagtctacggtggataagctttttatggccccgatacatgattacgagcgtgaagccggtttacggcacgaaaacgccatgcagcattatgagactgaaaaagatatatgggaggaagagcttaaggcgctgaaaagcctactgaaaaaacagacaaaacatcaacaaccactggaggagataaaagaacgtatccggaaacaccggagcgacaaaccggaggagcctgcccggatacagttactgggcagtgacatcaccccggcggcattgcagtatcagctgcacaaaggcggtggttccatggcgttgcattcggctgagggggatatcattctgggcggacaggccatacagaacctggggatgctgaatgacctgtgggacggggccccgtttacggtgtcccggcggacttccgaaagcttcacggtccacggagccagacttagtgccagcctgatggtgcaggatgcgccactgcgtaagtatttcagccgggcgcagcagcaggccaggggcagcggttttctcgcccgcttcttttttgcccgtccagaaagtgccatcggaacccggacaggccatacgctggaaaattaccgacaactgatggcaccgtatcataggcgtatcagggcattactggagacttacacagagcaaacggtaaacgtcctgccatccccccggcagaaactgactttcactccggaggctcagctgcggtggatggatatgggggagtattttgaacgccagatggcagaaaatggccggtattatcatttacgcgattttgcgtcaaaggagggcaataaagtggcacgactggcggcgctattccatctcttcagtggtgaagaaggagatatccctgaaacgacgttaatgaatgcgcagaaaatcagcgaatggtacctgaatcaggcgtttgtcctgttcgggccggggccggagttgcctcagcatatccaggatgcagagttattattgcaatggctggaggagcgttttatcgataataacgctcaggctttgaaacggagctgggtcagcccccgggtacccaaccggctccgtcagcccgggcgcttgcagccagcgttgttgcatctgcatcagaaccggcgtatcacattgtggcaggatcagcatacaactcttattgctccttacggctgggttccgtatacccgctga

SEQ ID NO: 242622 - DNA, 1023 bp, Klebsiella pneumoniae
atgcggaaagacgagaaaaagaaaaacacagcccggatacctattcgctcagacagctattatcagcagttattaaatattgccggctgtcgggcatcgaatcctgtcgaacagaaggatctcgcatggtttgatctcagccattacgattatgtgcgtcatctgagcctcaggcaactgatgacggaactgatagtccgtggttcgctgtgttccgcacccgatattgtgacgtgggatggtgctgtgctgggacctggagagatttttcagacctgttatcctgaaatcattgcgggtaaccccgaactacacccgttgtttatctctcatgagcatataccggaactgaactatctgcccggcccggatgcaccagcttctccagtgctcaccttaccggtccgggaattgagtatcggtgatatcgatgcctgctaccatgcattgtctgctgccgacatgaataaggagttttttttacttgaggagtcccggcatccttgttatctggaacgtataagcaaaagcgatattgatcctgacacaccgttgaccacacttcagacacaagcttctggaagtcatattgaacagatttatctggctgttgacccttcgttttcaaagtctcagcttatcgacgccttcagggtgttattaacagaacttgataaccagtatgggatttttaaaccgtctgccgggcaaaataacggaatacgccagaagctgctgtacgacatccaggcttatcagctcattcctttgattgacttgttgctgtggcagctcaacaacaggaagaagataccgttaaggaaaatctataaccttctgcaaaatcaggcatttgatgcttcgtcagtcagaacaggttactccgaaaccaatttccggagcagttatctgaggacctttgacctggtgatgaaccagggaaaccccggtgaaattttaagtaaacttttagagaaaacagaggattatgatacatcgtattacgatgctacccatgtataa

SEQ ID NO: 242623 - DNA, 204 bp, Klebsiella pneumoniae
atgaaacatgaacatctgaacgatacgaacccacttaaactggtggacctgaaatttatctgcgaaagtacggggctttccccggcttatatttacaaactgatgagtaatgacctgttcccgaaacccctgaagctgggacgtgcgagtcgctggtatctcagtgaatttaaggactggctggaaagtcgtcaccggatgtaa

SEQ ID NO: 242624 - DNA, 1005 bp, Klebsiella pneumoniae
atgatggaaaattatctggatgttgagtcaagtagtatgcatggtagagagaacgatactacgctaattgttactgaagactttgatatcgtacaaacacagcgtcggttactttcagttttaaagaaaatactaggctctgaaagtgaggcttttagagtgactcagtccggaagttacaacagaatgggctatttactcaaggaagctatcggtggattaactttacttgaaagtagcatcagtaagtatcaacagttgcatcccacgatacgactattcaattcgattctcaaaacatataacctgacagaactgtcagtaaccgagaccacgactataaacgatgtgttgagatgttttcgggaggaagcacaatcagtgactcataagaggcagctacgtaatttccagcgggctgccagtaaaaatctgaagggtgccctggactatgtcgaccacctttttgaacggtatgcccgtttactggtggttcgtgttgacctgtcctggcggaaagattttgtaaaaaatcagaccatttcaaccgctatggcacgtcagcatcgccagcgcttattaaaacgagtgcggttacatccattgtttcaggattatctggggtatatctggaagcttgaatacggacaatacaaaggttttcactttcacacgtgctttttctttgatggcagtaaagtcaggggggatgtcacgctggctagacgaataggggaattatgggaaaaagagattacagatggtcagggactgtattttaactgtaatgctataacgagtacttacgcacagtcgggaattggtgacattcattatactgaccagacgaagcgcgcagtattacgaagggtaatctcgtacatcgctaaagtggatacagctgtacggctgagtttgccacagggggcacgtactttcgggcgtagcgaatgtttattacaagaaggggggaaaagagggaggccaaggaaaagcatgaattag

SEQ ID NO: 242625 - DNA, 840 bp, Klebsiella pneumoniae
atgaaaaaactgttgataactgatcttgataacactctttacgattgggtctcattttacgcgcaatctttttctgcaatgtttgataaattggttgagatattagaagtatccagagacgaacttacaaatgattttaaaaaggttcacttaaagcatgggaattctgagtatccatttgcgactttggaattagaatcggtcaagaggaagttcaatggagtttcaaaggaaattattttatctgaattggatgaagcatttcatgctttcaattcggtaagaaagagaacgttggtttgttatcctggagtgctagacaccttagaggagcttaagtcacgaggtgttgtcattgttgggcatacagaagctccggttaggaatgctctatttcgtctagagtcgttaggtttgaagaaatacttaaaacatttatatgctcctaatgatagatattatgatgacttagatcagaatagtaagaattgggttgagtcttacggtgattttatttttaagctgagtgaggatgaaaagaaaccaaatccacatttgttaggtgatatttgttatcgagagggcgttgatttaaaagacgctatttatgtcggcgattcaataatcaaagatatatctatggctaacagtgctggtattgagtcaattcttgcctcatatgggaaacagcataatcctgaatattgggatgtattagtctcgattactcattggagtgaagatgatgttcagagagagactaaactcaaagagttatactctcatgtcattcctacctattctatagataaattttgtgagattttggaagtgatttga

SEQ ID NO: 242626 - DNA, 1614 bp, Klebsiella pneumoniae
atgaattgcaaaactatcattcttcgtttcagggatttggttacccccgccggagaaacaatcactctacatcaggatataatcaaatctaaggaatcagtttggtggggatggtgggcaaaagctgatgaacaatgtccaagggattttaatattttaaaaactaaaatatcagaaaaaaatcctttgaaaatatacctttttgatagtggccagttaaaaatatacgttgcaaatttgatcggtatttctaccaatttcgataagcactcttgtcctgttcgtgacatgacaccgccatattatagtgaccagcagtatagtgtgtggttcaatttttcatctatagcggaagttactgattgtttaagcttaataaatgggttggcatactcaggtgctgtgaatgattttttcaaaaataatgatatgttccaaatttactcggataagcaaatatcttccttacttgaattgcgttgtcaagataggactatatggtttgttgatgaatttgactcaagtaaacataaaactcacgaaataatattgagtaatgcaaatgttagtgttccctctgtctttcaaaaaaagccaatcgagttaactgaaggaaggctactgtggttatctgatttacactttgatgaaaataaaaaatatcatcagttcgatcagcgtgatcaaaaaaaactaagtgcaataataaaagattgggggcaagaagttgagggggttcttatctctggggatataacttggcgcgcaacagaaaatgagttcaagcaagcacaagaatttatagaaaacttatgctcatctaaaagagtaaatattgatggtatcggcatgtgtcctggtaatcacgatgtgagttttagcgaaggttactcgacggatgttaaaaatgctctagagaaataccacgaaatgcagcatggtgaagggcgtctgtcaaacgatgagtgggaatcattaattgcagtagatgtgttgccagaattcaaaagaaattatgaaaagttcttcagaaatattgttagtaccgacgctaatcaatatttgtcaatgggaaagcgttttttaataatgaatcaaaaagtagtggatgtatgcttcttgaactcaaactcattacaacagcataaacttgcattccaaggacagggctatgtaggtgtcaaacaaagagatgatgcagcaacagaaatggaatggaaacgtaataaaaaaatcacaggtggttatcgagttgtagtattgcatcataacttatatccagttaattacgctgaaactccttatattggggttgctagcggtttggtgtatgatacagaagcaattttaaaatggtgttttgagaatggtgttgatctcattcttcatgggcatacccacgaacggtgtgttactaagattagtagaaaggttgacaatcaggataaatcagtatggatcgtcagtttaggtagtacaggcgtaattcaaggacatcttgtcggatgcaacgaatttgctgagttagatttcgaaggagacaggataaaggttatgttttataatattaaacataataccattgaaaataatggcgaaattatactggactaa

SEQ ID NO: 242627 - DNA, 558 bp, Klebsiella pneumoniae
gtgaaatgggttcactaccgcttatccccccatatgccttcctgggttactcaggcgattgagcaggcctggttaagccaacaggacgacgtacaggccatcgcccgtaagctggcatcgacaaactgttctggtagcgataaggctgtttgcatccaagaaatttgcctgaacatatatgtttttttcgattgtgatgtattcagaatgaagacgttaacggtgtttgacccggcaatgtgccacagtaccggcgtatgtggctcagatgtcgatcaggttctggttgctttttctgttgatgtgtattggctgaaaggacgtggcttacaggttgaacgctacaacctggcgcagcagcctatgagctttgttcatgatgagaaagcgaaagctttcctcaaagcatctggagcagatggactttcgctacagctgttggacggcgaaacggtgatgggagggagatacccaaaatgtgctgagctggctcgctggttcggtatcccgctggagaaggtaaggtgcatggttttgcatgtgttttacagacactga

SEQ ID NO: 242628 - DNA, 192 bp, Klebsiella pneumoniae
atgtctgaaacttccctacaactcttcaaaaacctgtccgatgaaacccgtccagggatcgtgctgctgctcagagagatgggagaactgtgtgtgtacgatctttgttcggcgctggaacagtctccaagatctcccgctatctggcgatacttagggaaactgacctatggctggatcgcaagcaggtga

SEQ ID NO: 242629 - DNA, 1911 bp, Klebsiella pneumoniae
atgtttttaagcaaattaaaaataaaaggttttagatgttttaatgatgaatttaatatttcattaaatgaaggccttagtgttattgtaggtgaaaatggtgctgggaaatcagctattataaactcaataaggcaactgtttattgattcagaatcagagcgatataacataacagaaaatgattttcatagcccattcagtaatcctccaaaagcaagtgattcatttacaattaatgcggagttttctaatttagatacaaaggagataattgctttacttccttggactgggaactcagatgtagctaaattaaatttacacgttgagaataaagaaataagagggcggtataaaaaatcactttggggtggtgattcgcagaattctcaatttgattatgaattattagacctaatttattgcatatatctccctccattaagagatgcagaatcaaaactgaccaacggtcggcagtcaagattatcgaaacttttaaaagctataaatagaaaagatctaaaaacacttaaaaaaagtggtggagtgcatcctttagtagataaagtgaataccttcaacgatgaattatcaaatagtgatttatatagtattaaagctgcgaatcaattaataaaaaatcagctacagaatgctataggggttaattttgggcagaacacagcaattcaatttgcagagagtgactttactagaattgtagaaagtttacggcttatatttttccccgacttaaatgagaatgacaccaaactttttagaaacttagagcaaaacagcttaggctataataacctcctttatattgcatctatattagccgagcttactttcggcaacgaacaagactcatctacttgtagagtgttattaatagaagaaccagaagctcatttgcaccctcaacttcaaataagattacttgagcatttaaaaaaagtatccgaagataaagaaaataatgtgcaagtaattgtcacaacgcattcgacaactcttgcttcttcagtcagcgttgattctatcattcacttatccaaatcgacttctccagtagcaacacgtgtaaaagactgtggattagcaaaaaaaagtaaagagttcattgatagatggatggatgtaactaaatccaacttgcttttcgcaagtggagtaattctcgttgagggtattgctgagcaaatgctattgcctgttttagcaaaagaggtattagatagtagagatgcaggaaagaacaccttatcagatttaggcgtttctgttataaatcttaatggcatctattttagacacttcatgggaatatattgtaactttgcaatcccaagcgaaaagacaaagcatgaaggattaaacatacctgttcgctgtgctggattaacagaccttgaccctcccaaaaagataaaagaatgtatagatgaaaataagttcattgaaaaaatagttatcccccatgatgatgaaatgtatgatggaactaatcatgctatcaagctcgtaggagagataaatagttctaaatatgcaaggctttatgtaagtaaatataaaacacttgaatacgatctagcaatgacagggaataacatttctgttatgtcaactgtactatatgaaatttggcctacagatggggaaataaagaagaagataaaagcaattatggatgcaaatgacgattggtcgaaaaaaaaatctagcgaacgagctgtgattgcaaatgagttattagagtatatcgagaacaatgagttaggaaaaggatatttcgcacaaagtctgtcagataaaatattaaacaataaaattaaatttgaaacaccagactatattaaaaatgctattctctgggtatgccaagatggagaggtataa

SEQ ID NO: 242630 - DNA, 654 bp, Klebsiella pneumoniae
atggaggagaaaaaattagatgaagttgttatcacaaaggagaaagtgatttttgttgaagggatggatgaagttaattttttttatgccttattaaaaaaaatggagatgggagatgactatcaagtaatcgactataagggaaagtcaaggatgagcgactttatatcaatgatgtcaaaaacagagagttttaatgagaatgcaatatctgttgctgtaattcgtgatgctgataacaactatgactttgttgctgaagaaatcaaggatgcactaaaaagaatatttaatgttattaatcttgagcatggggtaatgaaaagtgaaaaggatattaatatcgggttttacataatgcctggtcttaaaaagaatggcgagttggaagacttggttttatcttcccttgacggcaatgaaatatttaaagaagttaataattatcttgatgtgctaaaagggatgacaagtcccgttaacaacgggtcaaagttttgttatccaaggaaagagtcaaaagctaagttgcaaatttatttttctagcatgaaggaatcagataccaggatgggattgtcagcgcagaggaattacgtggattttacacatgactcatttaaagaaataattgattttattaggtctatgtga

SEQ ID NO: 242631 - DNA, 1107 bp, Klebsiella pneumoniae
atgataaaaaatatagaaatatcaaattttaagatcatagaaagcttgaagttgtctagcttgaagagagtaaatgtaattgcaggtaaaaatggcaaggggaaaacctcgatacttgattctatatttataaccaatgatattgcttctccggattgcttgataaaacctattgcttttagaggtggttctccagacttaactaataatgagctatggctatcttatttcagggattttgatagaaaaaacgaaatatctattaagatggaacttgaaaatggcatgaaacaagaaacaagagtatctattgagaatatcaagtctgatacatcgaatataggtactgtttcaagtaatgttattgagagaaaccagatatcaccaaggtcatcatatagaggggatgttctgaaaattagaaagtatgatagaagtcaaccagaaagtttatcgatgaaaatggaagttacacaacaaataagtggaaatcaactcacctctaatttggttaagcacggaagtggcattgatgcaacagcaacaacatttataacaacatcaagcacaataaataatacaaatactatatctgtacttggcaacttaataaaaaacaaagatacaaaatcaataatagaaagtatgaaggaaataaatgataagatattaaatattgaacttggggttttaaatcaagtgcctgagatactctttgataccggaggggataagttagtaggactttcttcaatgggggagggtgtagggaaactactaacaattttggttgtgtcttatagtactaaaaatggaataatacttattgatgagatagaaaatggtatacactattccctcatgccgtcaatattaaaaacccttgtttctcaatctcatagaaataataatcaaatatttgtgacgacacatagttctgatgtagttaacagcatagctaaacttttctctagtggttcagtgagtgagtcagatatttcatttacaagaattggatactctgaaaagaagaaaaaatcactggtaaactcattcacgctttcagaggttcagatttcttctgaagggaaatgggagatccgctga

SEQ ID NO: 242632 - DNA, 483 bp, Klebsiella pneumoniae
atgcgacagtcagacatcaatcaggcattccgcgagtcggtattgcgcaactccaaaggctaccagtacctgcacacaaaggattttgtgtcagcgctgcgccggcgcggcattcactttacagaggtggaggcgaattcctggaacgcacgggggaaaacgtatttcgtcgatagcgcgctggatcacagcgaaaaccgactgtggataatggctgaaatggagcgcgagttaatagtggagcgtacccgagccggattagccgctgctagggagcaggggagagtcggtggccgccgccgggtaatgagtggagcggtgccgccgaatgctggagaatggcgctacccggcagcaggtagccgatgtgataggtgtagacgtgaaaacaatctacaagtacctcccggcgacttgaagacaaagatttcactacttttcctgatatgttacgtttggcttaatcaattcattcagctttga

SEQ ID NO: 242633 - DNA, 195 bp, Klebsiella pneumoniae; identical to SEQ ID NO: 229908

SEQ ID NO: 242634 - DNA, 543 bp, Klebsiella pneumoniae; identical to SEQ ID NO: 92454

SEQ ID NO: 242635 - DNA, 288 bp, Klebsiella pneumoniae; identical to SEQ ID NO: 182627

SEQ ID NO: 242636 - DNA, 1161 bp, Klebsiella pneumoniae
atgagacaacgatggtcccctcaacgcttccaggcaagtgcgaaaaatcagggtatcgatcagaataccattgaacatgctataaaacatgcaaaaaatataattcagcatgggaaatatattctacctatttttacccttagaaatctatctttcttagctggtgtcgaatactcattcttaagagaaatagttagtagagaatatatacatccttatcgttttttctatattagaaaaaaaggaaggaatcgtagaaggaaaatatgcattcctaatccacaattatgcaaagtacaaagatttctgcataaagaagtcctccaggaatttcagacacatccagcatgctttgcatatattcgtgactcatcgattgtggatgctgcaagtgttcacgttgaaagcagatggttattgaagttagatataattaatttttttgactctatatctgaaatttctgtttaccgtgcatttagggagaatggattcccggcgcttgtttcatttgaaatggccagaatttgcacttggcttagttttagaaatcctcaagaaattgattcaagatggaaaattgatcatcggcacaactataaaatttaccatcgttatagcatttcagaaatgggtagtcttcctcaaggagctcctagcagcccaatgttatcaaacattgtatgtttcaaattagatgaaactttagaagaattagcagttgaaaacgggctaagatataccagatattcagatgacctcacattttcaacaaactccattaactttaatagaaaaagtgccaaactctttataagtaaggttttttcaattttaaaaagctatggttttgaaccaaacaaaacaaaaacagaaatcattccccctagttccaaaaaggttgttttaggcttaaatgttgataaaaaaaatgtgagcttagataaaagcgtaaagtacaaaattaaacagcatattcatttttgtttgcattctgatgtaggaccgattaagcatgcaaaaagaaaaggcttttcttcaattatcggttttaaaaaccatctcaaaggattaatcaattatgcaaaaagtattgaacctgaattcggagagaaaatgctaagtgcctataaaaaaataaaatggccattagatacataa

SEQ ID NO: 242637 - DNA, 1251 bp, Klebsiella pneumoniae
atggatacagaaatttcattagagaagtcgaaaagagcacaactatggctagaacagtttgaagaacaagatcaaccctatgccagcttattgttgaaaaaaatacaatgggtttcaagccatgaatttgagattaagatcaatgccttagtcgatacaatatgcaataagaaagaggataaaatagccctgtttgttgaaagagaagttttagatgatgaaacagtctattcttttaatgctgataagcctcaacgtgcttttggcaatgctttccctcctatattatctaccattgataaaaaaatcgaaattggtagtgagggaatattaaataatatcatcactcgtttccaaagattagacagccgaaaatattataattatccatcagcagaaatcatgcgtagtaaaagaataaacaaagttgttgtactaactgatacaatcggaagcggaaatcaattaaatagatatttagactgtttttggaacactccatctataaaaagctggctctcctcaggacatatcaatatttatgttgtctgctttgcagctacagagttcggtctgagtcgtgtggaacataacaaaacgaaaccttcagttttctactcaagaatatgtccaaccatagacaatagcttcacctatcaagagaggaaaagaatatatgaaatttgcaacaaatataaccctctaaagaaacatacaaaaacaaccagttttttaggatatggtgatgtatcttctttaatatgctattctcatgggttacccaataatgctccgcttatcttatataaaagatcagctacgtggaagccattttttcgtgggcgagccacaaatgatgtcattgcagaacttcctggtagtatgtccaatataaatgaaaaagaatatttgagggtgatgggagaaaagagactttcagcttcccaaaaattagcaacacttgatggggaagcaaaaaaaaccattttattactagctgctttgaacaagtcaccacgaagtaatggtgctatagctagccggagtggtctatcttctaatgaggtttgcacgatgcttacgaaattaatgtatttagaatgggtcgattcgaaacgtagaatcacagatgaagggcgttttttattatcttatctaagaaaagagaataaaaaactgtttagtgaaaaaacacttccatcttcagacaatatatattactatcctaagatgttgagaggaccatcataa

SEQ ID NO: 242638 - DNA, 324 bp, Klebsiella pneumoniae
gtgtttcagaacgttgacgcctacgcgggcgatcctatcctgtcgctgatggaagcctttcaacaggatccccgggcagacaaagttaacctcagcatcgggctgtactataacgagcaggccattattccccagctggaggcggtccgtcaggccgctgaccggctgcagagtcagcagcaaaaggccagcctttatctgccgatggaggggctggcgccctatcgccgcgcggtccagaccctgctgtttggcgacaatcatccggcgttgcgtgccggacgcatcgccaccatccagacactggggggcccggcgcgctaa

SEQ ID NO: 242639 - DNA, 189 bp, Klebsiella pneumoniae
atgaatgccgtatgcactctggatgattctgagtttttggctgaactggaaaaagaccttgctgagtcgatagcccaatttgacaagcattttgcagagattgaagtagagaatgagaggtttcttgcatcgcttgccgctgaaccgctactggagatcgaacctctggatattgattttgattggtga

SEQ ID NO: 242640 - DNA, 543 bp, Klebsiella pneumoniae
atgtttggatttttgaagaaaaaagtaaaagaggaaacccctgatacttttgttgttggagggcttctttttctcctgccacgtaagccggatgacatgaatcctataattaatgggcttgttacccaggttgaaaaacgactcgtaagcgagattggaatttatcaattttttatggaagaaattgatgctgcaagacaaggtaatgacacagccagaatgctggagaaatactctggtttttatccgattgaatatcaatatgccttatcacaatcctctgaaatggatactgatgatagtgctcagagctatttgaacaatgatgtaagtcctgtcctcattagacattttggaatggacattgcgacacaatgccgatgtgacatcgttgcaatcattttgaacaagcatcgggtattgattgatcaaatcagggagaaagttgcacttgctaatcataatcattttgtaacgctgggggacttttctgccgccgagaaatggattccggtactggattcattgcagggaacatcataa

SEQ ID NO: 242641 - DNA, 201 bp, Klebsiella pneumoniae
atgaagctgattacggtggatgaatccgtggtgaacgcgatagtggaatactacgcacagggcagtgaggaggcgcatgcagagggaaacaggatgttcctgcgttatctgcacgagttaacgggaacacagcgtgtggcggttgaggcggccagaaagcagtctctggccgcgataaataaggggcgcgcttccctgtga

SEQ ID NO: 242642 - DNA, 1176 bp, Klebsiella pneumoniae
atggctggccagtatgaaaaagcaataacgataaaacaagcgatagattcgattaatttacgccactatcttctgcctgcaattcagcgaaagtttgtctggagcagcaggcaaatatgtctgctatttgattccatcatgcgagactacccgataaactctttcatgatgtgggatatccgtagtatcagtattaaaaacgattacaaattttatgagttcctgaaagaatactgtcagcgatttaatgaagaaaacccatgtgtaccaacaaatgcgggatttcatgattttaaggcggtgattgatggtcagcagcgtctcacatctttatatattggactgtgtggaacgtatgcgtataaacagccccgggtgtggtggccttcggcacaggatgatcgcatcctgccgcccagaaagctttacgtcgatttaacagcgccacttgactcagacgatgagcccatgatgaagtacaacttcaggttcctcaccgacaagcaatacactgattcacttaccgataacaaacatcactggttctgccttcacgaaatattcaaatacgagcaaattgattctccggatgatatcttatttaaagttgtcgtaccagaactcgaaaaaagaggactcatttccagtgaattctccagaaaaaccctgcttaaactttataccaagataagaactgagaatcttatccactacttcaatgagagcagccaggacattgatcatgtgttggatgttttcatccgcacgaatagcggggggacaaaacttgagttctccgacttactgatgtcaatagctgtagcacactggcagggtgatttcagaagagaactggatgaactaacaaaaaacattcatcagaataatgaaatggggttttatattgaaagagactggttcttaaaaaccagcctgatgcttattgactctgacgtccggttcaaagtaaaaaacttcacttcagaggaggtcggtaagatacaacaacaatggtctgaaataaaatcctgtatcaaggagacctttattcttatcaggcgattcggcatcaatccacagtctttgatatctaaaaatgcagtcattcctgtggtctactggctttacaaaaagcaaaccaatggacacccattatatacaacgattaatcggtaa

SEQ ID NO: 242643 - DNA, 309 bp, Klebsiella pneumoniae
gtgtttgatcagcggttcatgtccgatattgcaggcttcagcgagcagtacggcacacaggctgatgttaagatcctgagcacgggcttcagactcactcacatgagtgaattcgcgggtaaaaccagtccgggcgtcaatttcaagcagcagctctgtcagatcaacaggggggaccagctgcctgacgcggctgttcagaagaatcagcggctgcggttcttccagtttttccagactgctgatggtcagggacggatatttaccctgatgacagatgctcacggcagcattcagctcaaagcgtga

SEQ ID NO: 242644 - DNA, 1005 bp, Klebsiella pneumoniae; identical to SEQ ID NO: 31749

SEQ ID NO: 242645 - DNA, 816 bp, Klebsiella pneumoniae; identical to SEQ ID NO: 220143

SEQ ID NO: 242646 - DNA, 1782 bp, Klebsiella pneumoniae
atgaattttgacgcgaccccattgaacattaagaatatattatccgttaaacaaaggtatgtcattcctcgaaatcaacgagagtttagttgggaaaaattgcaattagaggaactatggcaagatatcgtaaggaatataaagttaaatgaaaatggacagagtcttgattgctctgaatattttatcgggacaatagttctttctggcgcagacagtgacgatgttttggaggttgttgatggtcagcaaaggttttctgttataacaattcttctttcattaatatcaaggaagttacgtgcgctcgggcaagaatccttggcagatgatatatttaaaacttatattgtgacggttagcccgacgtttaatagagggcaattagcatccaatggcgaaacctttattgagaagttggcgaaaaatagtgataggactttttataagttaaaatatcaagaccgagatgaacatcaaactaatatctcatgtgaagaagacagaaagattagttatgcaggtatattccttacgaggaagttggggaggaaatcattgtgctcttctatcctacgagatggggcagcctcttacaataaagatgactatgtattttgcttaaatgcagtatatcgaatgattaccaattatttaaagttggtgaaaatatcagttggaaaggaagatgatgcatatgatatatttgaggtgctaaatgctagaggtataaatctaagctcaattgatttgattaaaaataaggtttttcaaacctgcattcaaacttatcctgtagatgttgctaaaacaaagtgggattatattgtatccaaaatagaggagcgagatagtaatagcacaatcgctgattatattaggagttggtggctctccaaatataattatatcggtgaggatcagctttaccgatctttcaaaagagagttgcaggagggcacaactcagctaacttcatcatcattccttgacgagctttatgatgatgttgagaattattgtaaaatcattgggccaaatttagatgattggcctcaggcagaccaacgtgagatttttaattcactcaaggcctttgaaatttttaatgtcactattccacggccatttgttctttccttgttgaggaagagaaaggaaaaacccaggtccttatctcagtctaaattaatcgactgtcttaaagcattggagtcattccattttaagtttaatgctgtctgtcgtttaagaccttcggggattgatgcgaaatactctgtgctggcagtgaagatgaataaagcttctaataaaacagagattacaaatgttattgatgaagcggttggctattttactggaaaaaaaccgactgaaaaggtatttaaagaggcatttgtaaagaatatagtttacactaataagaagagtgggcaaagaaagttggtgatatatatatttgatagattggaaaggttgctccgtaaaacaaaagagttaagaatggatatagtttctttggaacatattggttcgcaaagtaacacaggggaaactgttgttggatgtatggggaacttgctgccactctgtttttctttaaatgaagattgtaaaaactatgagctgaaaagaaaaataccttcctatgagaagtcggacttaaaattggttttagagtttgttgatgcatcaaagaggcgagatcatgaatggacggatgaattaattaagcaaaggactgaagcacttgctcagcaagcatttaatcagttttaa

SEQ ID NO: 242647 - DNA, 2178 bp, Klebsiella pneumoniae
atgaatattagtgaaaaaccacaatgggaaaatagtataagtatggttgcccgccaacaaagggttgaaggcgggagagatggtgcagctaatattcaggctcagcaactggcaaaccgtacccggtttttgaaacaatccgtcgaggcatacagcaccctgattaaatcgggtgagcttccttattcaaatgaagatgaagcaaaagccgctattgcagcggggaaaattcctgaaaatagtttgttttccgttcgttctgaaagcgcaggcgtatgggttgaagagtttaaaaatattaacggggtgcctgtttcaaccggcaaacggctgcctgacagcctgggtgtttcggtggtggttttcaccagtgatgatgatccgacaggtgagaaggctggattgtcattaacggtgccgggtcagattttccgggttgcataccccgatgacaccagcaccgagacggtttaccggaatgacggagaacgtgcggttaagctgttagaggtcgcggataaacgtgcaatgaacaggatgttgccagatgccgggattatgggggaggttgatccagattatgctgttgagtttgttgatgcattgttccgtcgcgccgtgggcattgatttacgtggtgtgctggaagcgaacgcgggaatgcgcattatgggagttcccgtcaccaacttaccggatgactccgattactgttttgcatttggtgatgagctagggcgcattgtctttggtatcgggaaaaccggcttcatcgaattgatggggatgcggatttttgtcacagagggtgagaactttcttgagattattgatgaaaatcagcgtgtgtcagccgggattggtagcaaaggcgagattttcaataattcagcggtggagccgcaacccgtagagcctgagcgattctggcttgattttgccgaagtgctgcatgtcattatctacgggcaatcactttcaatcgggcaatacggtacgccggtattggacacgccgatacgcaacgccctgatgttcaatacaggggtgcggagttacagctccagcccatcatcactggtgccgctgcgtgaaactgtcagtggtagcaacggggagacagtggcatcctctctggcgtatggctttactgatcacgtgagtgatatggccggtcgcgatctgctgtttaatgcgggcggtgtcggggggattacggttgaggggctttcaaagggaacagagccatatcgccggttgattgcgcacctggtctggacagcgacgcagatggctttacagggtcgtgattatgccgtggatttcatcctgtggattcagggcgaggcgaacatggcaaacgggaccagcgctgacagttacaccgggagggtgtcaaccttacgggcggatgtggccgcagatacggcggggatgcgtgatgcaggccgcgatctggtcatgttgatgtatcagacctcatcccacggctattacgtgggtacagcagaaaacccaccggagcttatcgctcaggcgcagcttgatatggcgctgaataatcctcttattgatatgtgggggccatcatatatggggcttccggcaaaccataccattggacagggaaacgtccatcacaatgcccacggttaccggctgatgggcctatatgcgcaaaaggcattgcgacatcgcctgcgaacacgcaccgcagataagccgaatggtgaaaaatatttacctgtgcatgctacccgtgcccgaaaaataaacagcagaaccgtgattactgatgtatttacgtatcacccaccgttagttattgatgactcgtatatcactgagctggcagatggtaatcatggtgtcgaattacatgatgaaaccgggcggcttgatattgtatccgtggagattgtggcgggaacgaaaattaagatcgtgtcgaaaacagatatcggaaacggggcgtttgtggcatttgcctggacgccggagaaccgaggggaaatcacaaacaaccgatatcaacaatggtttttcgggcgagaaacaggggtacgaacaaccattcatgattctgaccctgaaaagacagatttaacagatgaaaacggcaagccttatccgctttataactatttgccgattcagaagattgccatttccgaataa

SEQ ID NO: 242648 - DNA, 1422 bp, Klebsiella pneumoniae
atgggacaatcaccctcaagttcagatgttaatgaacaaggagagggtattgtctttttccaagggaaggctgagtttggaaaattgtatccaacccccagaaaatattgcacaaaaccaacaaaaattgcgtcagctggagatattttgctatcaataagggcgccggttggaccaacgaacattgccactgaaacaacggcgattggtcgagggctggcagccatcagtgctcacagtggtttaacagaccctaaatatcttctttactattttagatgtatagagccgtggttaagtacacaaggcacggggtctactttcaaagctatttcaggtcagtttattaaggaattaaaagccccattaccgtcttttgccgaacaaaaaatcattgccgaaaaactcgatacgctgctggcgcaggtagacagcaccaaagcacgtcttgagcaaatcccacaaatcctgaaacgttttcgtcaggcggtgcttgaagaagctgtcagtggtagattaacggaaaactggagagatgcgagcattagtgaaaaatcagcggaagaacttctcgttaccataagtaaaacaagaaaaaaaaatcttaccagtggcgcagactctctagctacagagtctaagcgatatcttgcaaagattgacgcccatcattttaatattcctgatgttattcttccagttggatggaaatggactactttcttacaatcgatggaaaaagtggttgactgtcataacaaaacagcaccatatacagagaaaggtatttatcttatcaggacacctgatattcgtaacggtattatttcattaaaaaatactaaatatgtcaatgaggacacctataatttttggtcaaaacgatgccccccaagaagtggtgatataattttcacacgagaagctcctatgggagaggctggaattgtacctgagaatacacgtctctgcatgggacaaagaatgatgctacttcgccccatgcagagctatctcagcaataaatatgttttgctgaatattctatcaattagttttcaggcgagaatgttgtctcaggcaataggtactggagttaagcaccttcgggtagctgatgtcgaatcattaatgtatcctttaccaccactcccagaacaacacgaaatcgtccgccgcgtcgagcaactcttcgcctacgccgacaccattgaaaaacaggtcaacagcgccctgacccgcgtcaacaatctcacccagtctatcctggcaaaagccttccgcggcgagctgaccgcccagtggcgtgctgaaaaccctgatctcatcagcggtgaaaacagcgccgccgccctgctggaaaaaattaaggccgaacgcgccgccagcggcggtaaaaaaaactcgcgtaaaaaagcgtaa

SEQ ID NO: 242649 - DNA, 1476 bp, Klebsiella pneumoniae
atgaatgtagccggcacgctggaggctaccgggcggaaaatgccgtctcaggccgctgttgaggccgtcagtgaatcgctgacgctccagataggcgatattggtgacaggcagattgaaattcagcggaagattgatggtttctccagttcagtctttgattcttctgcaaatgatttactgattgcactgacggatgctctcggacggcgtacatggctggaggctgaccttcgcgggagaccctctccctacagcgtgaggttattgcgcgaagtgctgccggacctgcttaccggaattttgtttgattcggagcgctacggcctctccgccgccattacggatagtgctggtcgccgcacatggctggaagccgatatggagggaaagccctcagcaaggtctgcagagctgattggcggagtcatagccgattatctgccgcagtccctgattgacgccctcgttgacctgctggctccgctgatatcaggtgagccgcgcccgattgcaacggctctttcaaccgcccgtcaggacgcgaagcgtgaatatccgacactgacaaagccgctcactgcccctgtcttttcaaagtcagaccaggcggccatcagcatttactggccctggttgttcgatgcgactgttattggcgtgaacaaaatttacctttactactccactgaccatgctgctaaccacgcggattccggcatttatctggcttcggctgacgatatcagcggcccctggacacagcacgggcgcgtataccgggatgatgtttccggcgaacagtcagagacgccctcggttgtgtgggatgaaaaaaataaccgcatggtgatgtattaccagcaggctggcgtcggcactggccagcagtccaccctgtgggcgacatcaactgacggatttaactgggtgcgtcagggaatagccacgcagatgatgagtaccggccagcccggtgacgggcataccggttatttcaaaccgtttcgttttgccggttcgatgtacgggtattccctttatggtggaactgacagggggcgctacgccatatggcggggaagtgatttcggcacctggacacccgacccgagacttatcggcaagatgccggataaatgcatgaatctgccgcagtacgagaatggctggttcccgaaaatctttgtcggggatgtcattaactggaacggctctccgtggtggataggtctcgtcggcccgtctaccgcaggcgggggcagcaacgcgcacaggatttgtgccgcgccgctgcgtgaagacctgcgtaatctttccgctaacgtggtggatatcacccccgcagagcagacatgggaaaacggggtgattgattattttggcaactttctgacgtggaaagggaaaatgtatggcgtgtaccgggcgaataccggacagggcgggtttggcctggtggaggtgacactgtga

SEQ ID NO: 242650 - DNA, 618 bp, Klebsiella pneumoniae
gtgatttattcaggttttgacggaaagctgtggccggcgggcggcacccgcaaggtatacgaggataatcttgataacggcctgccttactggatgtccctgaatgccggggcatctttcacccagaatgccataggctcggtgggagggatgacgctttccccggacagcagcggcgtgattgaccttaacgggccggaaattgaccttaataccgtgcgcggtatcagcctggagtttatctgcaccggcgcggcaggcggcaatgtggaagttcaggccggttttttttcggcatccgatggggtgctggcccgccagcgcagcagtgacaattacatgctgatgtccggcctggtgtccggggtgctgaacagccagaacgggtactacgagctgaacagtgcaaccaaacggtttaatccctgcgtcagattcgacacacggcagctcacgctgtcgattggcgacggagaccagatttctgccgtccgggcgctttcggcatctgaattcacgaaagccgccgctgtccgtccgcgcctgaagttcatcaacgcagccgggggattcacgcgccgggttcattacgtaaaactgactattgactggatttga

SEQ ID NO: 242651 - DNA, 903 bp, Klebsiella pneumoniae
atgggattaatgattcgctccgacgcagaaactacggacaccaccgcaccggtcattaaggtttacgacaggatactgaccgatggttcactggtgctctttgacacggcaaacccgatggaggactggacagcaggcgtcccggctgacggcagttacatcaataacctggcccgggattttatcggcgcactgattacggccagcaatgaagacgcttaccgggggccggtctccaaatcagccaatcttttcaccaccaaagcgcggtttgagagaacggcccgcggcggtctgcacggcattgtcagccagacacagaccatcaattcaggcgagggatacgctatttccctgcccaatgccgcaaagcagtacgtggtgaataatccggggcatacatactttatttccgtctggaagcgtcagacgcgcagtataaaggggctggaccctgttgcagaccgcaaccctgcatttctctcactggcggcgtacccgtcaccggatgtgaataatctggcagtgttcagcaaaaatggtatcaacatgtccaaccggacggggtatcggggaacgggggcggaaagtgaccaggtggaggactggcagggtatctacaatgccgccgggtcagggtggaatggcactgcgcccacgtcaatatcttcgttctacggatatgtcacagagtttgcgcgtccggcaaacggcaacagcacggtttcaggacacccctccttcatcttctatcgcttctatatggaagacctgaccgtatccggccgcagctacgcgacggttgatgcgcttgaccaggcgctttttgatgaagcgtttaactcttcaaccgggcgttacagaaatgaccatttttcagcgccgaatgttgtccttctctga

SEQ ID NO: 242652 - DNA, 201 bp, Klebsiella pneumoniae
atgttcaacccctctgcagcactttttaccaacaccatgcttatgtttagattgatgttttttcataataaaaaacccgccgaagcgggctttatcatgtacatgaccggtgcagcgcagagcctgggggacgtaaacaatatccgccaggccatgaaaagcgccaagataccgggcaacttccgtaacctgtttatgtaa

SEQ ID NO: 242653 - DNA, 207 bp, Klebsiella pneumoniae
atgagcaactcactgcaaattctctgcattaaagataccgaaggattctggactgtaaatgagagatatccggcccgccagttctgtcgggctcttgctcatctcatgaaaatgcatgaaaaccactacacaaagcgggctggcgtgacggagatacgagcgcgcgccggagtgattatgtctgagttttggctattgatgtcatag

SEQ ID NO: 242654 - DNA, 735 bp, Klebsiella pneumoniae
atgagcggcgttaaggcagtacaaacacaggctaactacctgtcagcgctggcttgcatcctcgatcttgcatctgcacgctaccacgacgcgccacctattcaggccaaccctttcaggctgcacaagctccacacagcgaagagccgccagagttacgaggcattcactgacaacgaagtgatcgcccttctgagaggcttacaggaagccggagaggtggaattattcgacgttgcaagcattgccgcttacagtggaatgaggatcggggaaatctgcaacctgaggccagagaacatcattgtgattgatggcatcacctgctttcaggtgctggaaggaaagacggctaacgcttccaggctaatcccatgccatagtgcgattaaaacaatggtgctggaacgctgtcagaagccctacaacggctttttgttctatcgtgccagcattaccaaacgtgaggacggcaagcgctcaagctggcatgtaaaccgctttggacggctcaaacgtgacattctgccggatagtgaaaacaaggtgttccatagtttcagacatgcagtgatcagtaagctgaacgccgccggagtgcccgaatctcgtgtttctttgctcgcaggtcactcatttggagaaacggagagtttcaccacttattctaaatccgttcctgagcggatcgtgaaggaattgcagggctatgttgagctaatcagctacaaatga

SEQ ID NO: 242655 - DNA, 225 bp, Klebsiella pneumoniae
atgcaccaagaagtaatgaaaacaaaacattttaatagaatcctcaactggtgccaggggcaggtaagggaaatcgagttcctcttagaggatgcctatctgagcgaagaagaaaaaatagcagcgcttgaagaacttctggataaatgcctcactctgcaatcccctctcattctattgggcaataaaatcagaacagcaattaaacaattaaaggatcaataa

SEQ ID NO: 242656 - DNA, 207 bp, Klebsiella pneumoniae
atggtgatcaacatgaaacacttatttgtgctgacgctggcgctgctgccagccctcgcccacgcagggcgcatcacgttaacactgaccgatgaacaggagacaggtaacacgaagatttgcatttatagcaacgccaattacacggagactgtgacgatcagaccgtcgcagcaatgccgctacacaatgacatttgaggaataa

SEQ ID NO: 242657 - DNA, 159 bp, Klebsiella pneumoniae
atgtcaaaaaccaggaatacagccgccaccaaacgtaacaatcgtaaaattcacgcccgtaagtttcttgcaacaccagaaggtaaagcctggcttgcgaaaaagcaggaagaagaggcagagatcaaattagcgcgagcggctaatgcaatgttttaa

SEQ ID NO: 242658 - DNA, 351 bp, Klebsiella pneumoniae; identical to SEQ ID NO: 10325

SEQ ID NO: 242659 - DNA, 1452 bp, Klebsiella pneumoniae
gtgaacgaaagccaaatgaaacaagagcgcgcctcgaatgccaatcttgaaaaggaacgactgaactacctgtcctcgctgttcaacggaaccagcaatacgaagcgccagcgcctttaccaggagttcggatatcccgtcgatctctgctttgaggatttctaccgggcatgtcgccgcaatgctgttgctggtgcggccgtcagtcgcatggttgatggatgctgggaggatttcccggatatttatgaaggcgataaaaccaaagatgccaccaaacaaactcagtgggacaagcgggttaacaagctgctcaagcgctgctggaagcagattaagggcgctgaccgacgcaacctggtaggtcgatattctgctttgttgattcaggttaaagacagcaaacagtggcgtgatccggtagataccgtggtcgtaggtcagctggaagaaaaggcgctggtaaaactcatccctgcatgggaagcgcagattgagcccattgaatgggatagtgacccagaaagtgaaactttcggcgatgtgacgatgtactcgttcattgagctgtcggtgggcaacaacaaagacgcccggcccggccgcataatcaacgttcacccagatcgcgtcattatcctggctgaaggctccgatgatggctcaatgacttccgggcgctcgatgctggaagagggttttaacaagctcctggatctcgaaaaggtttccggcggcggggcggaggggtttcttaagaatgccagtcgccagctaaatttcaatttcagctccaagacgaacttcgctcaactggcacgcgccctcggcgtaacagaggccgagctatcgaatgcgatggatgatcaggtgcgtcgactgaatgacagcaccgacagcgcagtcatgatgcaggaaggcgatgccagcgtgctctcagtggccgttgcagacccggaacccacctggcgaacggcgcttaatgagttctgcgccaccgtaccgatccccgttaaagttctgatcggcatgcagaccggggagagggccagtacggaagacgctaaggactgggccaaaacccgcatgagtcgccgtaatggcttccttaccgacgtgatcacggatgtggtttcgcgcttctggacccttggaattattccgccagctcagaatgaagaaattaccgtaggctggtctgatcttctggcgccgagtcaggcagagaagattgccaacatggacaagctcgcggacgtggctgtgaaatccacgaatgcctttggccgttctgctatcactgagaacgaaattcgcgctgcgggcgaactgcaaccgctgcctgagcttgatgatgaggatctgccagatgtcaacaaaccaaaacctgatcctctggccgaccctcagtcagaagccgaaaagcccggtgataccacggtcgaaagttga

SEQ ID NO: 242660 - DNA, 867 bp, Klebsiella pneumoniae
atggaaaacactagcattcaagatgttaatttttcacttagatatgatggtcttgacgcggagaagcatgagatagagctttcttctcttggggagtcacttaaaggcttctctaaaattttagccactgccggtacctttgctttaacccaaaaatatagccgaaccgcatctgcccaagaggtaaaagtttacgcaaaagaagccagggctaactgttttaccttagatactgttatgaattttatcagccagtctcaattgttctcaggatcagcgggggctatacttggggcgctgataccttacatcttcgcaaaaaacgcgcagaagaaagaggaaatgaaataccttaaagacgcacttgagaaggcaattgaggccctcggaaacaaagataaagataccatcaaaggcttaatctccgtgattgataagatggcaggagagttgcgtccgtcagtaaggcaggctgtatcaccaataggtaatacctgcaataagatcagcgtaacatctgggcaaggatttaaacctgccatcattgatgaggatgacaaggctatcattgaccaattagatgatgacgaagtgataggactccgtgagtacaggatttttcttacggaatttgacgcgcacagaatgacagctaaggtcattcttgaaggggatgattcagataaaaggatttcagcccagataagcgatccatcggcatctaagtcagaaaacccctatcttatatcccttagtcgctttctttcctcggggttaagccaggattcagcggtaaaggtcactgcgaaagcttcagtgagaaagggggccatcagtaaactattcatagtagatatcgagatttaa

SEQ ID NO: 242661 - DNA, 285 bp, Klebsiella pneumoniae
atgaacgcataccgcgcatatgacgtaatcgaagagcgtaagtgggctgaacaaacgctgtccgaagagaaggaaaagtggattgaagatcgggcaaaagaggtctttgccagccttccagaggatccctacgcggcactacgccagtctctatcgtccaaggcgtttccatatgaaggcctccgtagcgataaagctggcgaggtatacaacgatttgcgcacagcaatagcttacgcccaggcggaatacgactgggatcaccgcaccggctgcccgttttaa

SEQ ID NO: 242662 - DNA, 489 bp, Klebsiella pneumoniae
atgactgatatcaccgaactggcgcagagagagaaattcgaagcgtggtttgtaaatgatgttgtgggggccgatgtaaccttcccagcctttgaagatggcgcatacgccgaaggagaaatttacgatgagcaattgtacttcatgcttcaggccatgtggatggtatggaaagcggctggcgctgagctggtagaggcgctggagaaggcgcaggcaggcgagaagcaatggcacgaacttgtcgatgcgttctgcgctgacgacgccgactggcacaagctgactaactcaaacaatgagctgattgctcttttgtctcaggtcttgtgcaagcaagcagaccgcatcgccgaactggagtcccgcaccgtgaagttgccggagccgttcaagttggctaaatcatcgagcggattaacgtactactacgctgacgaggtcgatgctgcgcttaccgccgctggcatcaaggtggaggctgagtga

SEQ ID NO: 242663 - DNA, 267 bp, Klebsiella pneumoniae
gtgagtgacgttaaaaccaaaatcatgcaggtgatgactgaagctgcagcgcagcaggatgcgacactggggagcggataccctttccgcatggccacctggaatatccgatgcgcgatggagcgcaaattccccgtggtggaatggaaaagcgcagacctgcgcaaagcgctcatcgagctggcgaaggatggtctggtgtccaaatgtccccatgagagccgcattggtcaggccgtctggcgtctggaggtgaaaggtgagtaa

SEQ ID NO: 242664 - DNA, 678 bp, Klebsiella pneumoniae
gtgcgtatgcatagctattcactggcacacaaatcatcaggcgcgtttttcagggattatgccggggaaaggtgccggaaacggcccgcacgcgtcagaatggcgctgagggcgtctcagggggtgcgcccaagagatgttatggtaaataatcatgacagggaggatgtgtttatgcggaaaattattgttgtgccatacgatgataaatggcctgagatgtttgaagctgaaagttcactgataaaaacattgcttgatggagtggctaaagatgtccatcacattggcagcacgtcagttcctggtctctcagcaaagcccgtaatcgacatgctgcttgaagtttccgacatcaatgaactggatacgtacaattcttcaatggctcgcgccgggtatgttgctcgtggtgagaacgggattccggggcgtagatatttcattaaggggggtgatcagcgtagtcatcaagtgcatgcgtttgcagtcggagatacgcaggtatcaaagcatcttgctttccgtgattatcttcgacgaaacaaggacattgcagggaggtatgctgagataaaacacttagcagcattgcttagcaggaacgatgttcatcgctatagcaccctaaaagcggacttcatagagcatcacctgcaactggcactggctgtctga

SEQ ID NO: 242665 - DNA, 417 bp, Klebsiella pneumoniae
atgtcagatcaaaaaaataattttgacgttcaaaaacagacacttgaagcaaagtggggaagggaagcattaggtatgggttggtcagccattcctacatcgctcttcttcttgcaaggggcgctcaacatgacaccaacaacgttcaatgtcctgcttcatctaattattcactggtggaaaccttacgactggccacatccatctcaagaaagtattgcggttagaatgggagtctcatcaagaacagtgcaacgttctctccaggagctagagaactacggattgcttatcaaaatccgtacaagcaaggacaaccctaagtacaaagggcgaaacatctacgatctctcccacctggttaaatcattaaacgttctcacccctgatctgaatgcaaagctgaacgaaaaataa

SEQ ID NO: 242666 - DNA, 960 bp, Klebsiella pneumoniae
atggctaaaaaaaaatatcaaaaatatttacccttgatgccaatggcaattgagcaacttgatgtatctaagcatgatatcgttctttcaagtagccatgcagtatctaaaggggtaatcacagggccagatcagctgcatatatgttatgttcattctcccattcgttacgcatgggatcttcagcatcagtatttaagagaagcacgattaaataaaggaatcaaggggctgatcgctaaatggctgttacataagatacggctttgggattataggacagcaaatggcgtcgatcattttatagcaaattcacactacattgcgcgaagaatcaataaagtttatggacgaaagtctgatgtgatttatcctccggtcgatgttgatagattttcactatgtgaaaaaaaagaagattactattttacagcatcgcgaatggtaccttacaaaaaaatggatttaattgtagaagcttttagctgcatgcctgacaaaaaattaattgtcattggcgatggttcagaaatgtttaaaataaaagcaaaagcaacacaaaacattgagattctcggatatcagcctaattcagttatggagcaacatatgaaaaaagcaaaagcttttgtctttgcagcggaagaagattttggcattactcctgtcgaagcccaagcctgtgggacaccagttattgcattcggaaagggaggagcattagaaacaatacgtccatatggcgtagataaacctactggcttatttttcgataaacaagaagttacatctttgattaatgctgtgtccgaatttgattcaaaaagcgataaatttatcccagcaaactgtagggaaaatgctttacgtttctcggttgaaagatttcaattagaagtggataattatgttaatatgaaatgggatttgcttcaagaacgtaagcaaatagtatattaa

SEQ ID NO: 242667 - DNA, 552 bp, Klebsiella pneumoniae
atgaaagcgaggatttcccggcccagactgcaaccacaacggcgccgacatcggtggcgatcgaaagtaatcagctcaaggctgttgtgctgtctaacgatgacaactttgcctattttgctgcgctggcggtaccgcacccggttacgttcgtcatcaatgccacatggaacgacggcggcacaagcgtcacacgaaacgtcactggtgccgggaatatcatctcatcagagagcttcatcggcgaagacacgctttcgtacacgacgttttatatcggcgaactgtcgggtgaaattacgtcgctgccgggcaacgcggttatcaacgcgactctgttcacgcttaatgaccagacgccgctggttatcggtccgtcagtgtcgccaattgtctcgactcaagtgtgggtgcatgtgctggtccagctcggcgcgacggccggcacaacgcaatacaggattaaattttggaaggttgatgacgataataaccaagtgccagggacatcagagcagtacgattatttcttcgacaacgacttccaggtga

SEQ ID NO: 242668 - DNA, 234 bp, Klebsiella pneumoniae
atgccgatcgacctgggtgatacgcagggagttcagcagcagacgttgcatttcgtcgatatgccggtgcagaccagcaaaaacggcagcgtcgttacctggaccgcaacggttatcagcaacggtatcgaggacattaccgaggactatgacgactggattgttgaggcccagcctggctatggatactggctggattacctgatcaccgaagtgatgccgagggccgactga

SEQ ID NO: 242669 - DNA, 684 bp, Klebsiella pneumoniae; identical to SEQ ID NO: 28791

SEQ ID NO: 242670 - DNA, 213 bp, Klebsiella pneumoniae; identical to SEQ ID NO: 144242

SEQ ID NO: 242671 - DNA, 2520 bp, Klebsiella pneumoniae
atgtcggtaccgaaccagacaccctataacatctataccgccaacgggctgacgactgtctttgcctatgagttttacctgatcagcgccagcgatattcaggtcacaatcaacggcaacgaagtaacgtccggctatacagtgtctggtgtgggtaatactggcggtggcgaagttacttttctgaccgcgccggccaatggcgctacagtcatttttgaacgtgtaacgccgacttacaggctcactgattaccaggacaacggcgacctgctggccgatacagttaacaaagattttgaccgtctctggatggctattcagcgcgcgtttatttatctcggagtggccctaagtcgcccgctgttcggcggtggacctttcaacgctaacggctaccggatagcaaatctggccgatccagttaacgatcaggatgcagctactaaaaaatttgtaattgaaaatggaaaaattaatctagctcgtactctacgcgttccggagtctagcatcacaccgttaccttccattgcagaacgaaaaaataaaatcgttgcaatggataataatggcaatccattgatggtattgccttcgagtggaagtgcagcagatgtaatgattgagtatgccaaaccgacaggtagcgggcatataggggttcttactggaggcaccgttgaagatgcaataaaatacgtaacccctgaaatgataaggattaatggtgaaagatatattcacggcatcactgctgatgcaactaaatttctacaggcagctatagattacggaaaagctaataaccttccggtatatttaactaaaatgtatccgtgcatatcttcaccgatagagtttaatttgccattcgacgatgggactgtatacccagggtggatagggaacggtgattcaaatattgctcctgaaataccagttaaggcaaaagcagcactgcgtgtttatgatgattcaatgattgttggtgaaaaccaacacaattgtgggattattggtaatttttcaaaaactgcgggaccatgggatcatacatcttccatgggtctatacatcgcaggtgacagcggaccagatcaatacataaagtatcacctttctgatttcaggattagcggattctttattgggcaatgggtagacgggactgtaaaccgctgtgtagaaaataatatgatgtactcagggtgtgccattcctgcttgttatcaaggatctgattctctggcgcaaactgggctgacattatattggtataatattacaggccctgtttttggcgggcgctggctaacgagaaatcatgcatacgcgtctcagtaccttccgccgtacccggcatcagatattcatcgggcgggatggaatgattcgtaccatgtagacaagtttcattattatggtgataccggcatggactggacacatccagcatatgccgctcttgacacttggtttgatacgtatgttttcaagtctgcaaactgcttgcctacggccagcggtggtcggttgtcaaataatcagcagaatggggtttacccagttgatacctatagaggtatagctgggcgcgcaagaactattatttcacttctgggaagggagatattgcattgcaatattggtgaggctaaagtgctgtggtctccaagaacgccattctaccactctgctcaattcgttgacggatttaaatcatatgttggtaacagtaaaataaggactcttatactggaaagggtaggaatcatcaagtatggccttggtgatgttgctggaaatagatttaatgttaataatgttgatccctacgaaccatctctttcaacatttccagcgatggcaacaagaggaaatattttcgcccttgatattgtaaaaggtggcgcggttcaggctgccccagttaatgaatttaacggcacaagaatcggtgccggtgagaatatagttgctcaaagaaagcttggagataattcaaactatcgtcttttcggtcttcaggagttaaacggaacaaatttatccgataagtatgtttttaatcgaaatgatgcctatatgccgccaatagcttttcccggtggtaatgctgctcagtttaagtatctttatggcacattcgcaccaactattacaattggcggcgcaagcgtaataccatcatccattattggaatttaccgtcggtttggtgatgttgttcgttgcgatataagggtcagatcaacctctttactggttagcactgcgggcgccatagtaattagtggtcttccttttacagccgcttctatacaggagggtgggtctaaaggaagcataattcttagtacggctacaggggttttagttatgccgcttgttcctgctgggacaaatcaaatgacgattattaaatcgtcagcccaagaaatatattctcaagcagctggtacttttgatttcactctccagtgtacttttgattatgttgttccttttaattcatga

SEQ ID NO: 242672 - DNA, 417 bp, Klebsiella pneumoniae
atgagcgacaaagatatcgagcagcaaattcaggctaaaggcttaaccgcgccgcgcgttacgcctgatcatatcgagagcgttatcaaagagtgccattatctcaacgtcggcgaagcggttcaggcgggctggcctgataagtcggcaatggacgattgcagcccagcgctgaacctgctgacgatttgtgttctggtgctgcacaacggcttcaccgtcacgggcgaaagcgcctgcgccagcccgcaaaacttcgacccggagatcggtcgcaagattgcccgcgagaatgcggttaacaagatttggatgctggaaggttacctgctgaaacaaaagctcagtgagcagtgtaccgatgagcgcatgtgtgaaaactgctactccggccagggcgcctgtaataacaagtaa

SEQ ID NO: 242673 - DNA, 180 bp, Klebsiella pneumoniae
gtgtccgccggttctgtggtgtggcgggcaaagcgggagagtttctttgtggtcggcgcgctgggctatgccctgaccggttcggatgtgatggatttcgggggcggagtacacgccgaagtgtactttgcagacaatacaacctatctcaacgagatcttggaaatattgcttatctga

SEQ ID NO: 242674 - DNA, 198 bp, Klebsiella pneumoniae
atgaagaccgaaactgttatcagattttttggaactaaaaccgctgttgcgcgtgcattaggtatctctcaagtcgctgtaacccgctgggggactgttgttcctgaaaagcgagctgcgcgacttgagcatgtaaccgcgggcgccttgaagtacgaccctactttttacgaagagcaaaacacgtctaaagcataa

SEQ ID NO: 242675 - DNA, 273 bp, Klebsiella pneumoniae
atggtaaacgacagcaaggcagaagcacttgaagctaaagggctgtatcgccgggccgctacccgctggatggaggtgatgaatcattgtgccgaagatgaggcccgggattgggtgcggcggcgcatggatgaatgtctccagaaggtgcgccgccctccagcccgcgcggaagatttcggcggccttcacaaagccgcgaaggagacccagcaccgcatgggaatagctcagcccaatgggcaagcgttcaggttaaaaacaagccgatga

SEQ ID NO: 242676 - DNA, 969 bp, Klebsiella pneumoniae
atgaacacatccgagaaaaaaactaaatatctccctcttgaattctgccatgttgataaagcggcttctatgttgggttgcggtatcgatgacattttccattgggctgaggtcggcgcgattcgacttagcatacggcttgaatacttccctagcttcctttcattcaaatcattaactgaaatttcaagcgagaatttattcgattctttgctgaccagtgagaatgaggtgaggctcagtggatctcgtagggttacttacttttaccccgaccgcttggaaactgaaatatatagggatgatagcaagttgtatgttaaggggtgggcatgtggtttgtgggctattcccaaaaaggatgtaagcaaattatatatgaagggagagatcgaaattgactccctgctttaccctgatgaacatagggaattatatttaaataatggaattctggcctttcttagaccatatgaggtttttaaagaaaaaacactccccatggttgttaaggcaaaagaattgactccagaagagatcgtgaatgctcttaataaaaaattaacatatcactcaattactgttgccgatgtttatgtttccaggtattggttagggaaactacacaaccatattgagaacggggctgaactaataaactccaacgatcttggcaatatcttggatgacgcagatgaggccgatagcatgaaaggcgctgaagaaattaagccccacggcaatatagaagtgtcggcaaagaagagggaggaagtctataaagccgccatctactggctgcttaaagaccctgaatcatgcaaaggtaaaagaggggatgtcactcaagtggcatgggctaaacggatagtggaaggtaggaatgagaaaccagtatccttaggggaggacaagattgttaaatgccttcgagatgctatgaacggaacaaactctgaagagagttag

SEQ ID NO: 242677 - DNA, 849 bp, Klebsiella pneumoniae; identical to SEQ ID NO: 139577

SEQ ID NO: 242678 - DNA, 984 bp, Klebsiella pneumoniae; identical to SEQ ID NO: 52737

SEQ ID NO: 242679 - DNA, 1233 bp, Klebsiella pneumoniae
atggccgaggaagccgatgcccgtttcctcgacctacgccatgaaccggcagcgccgaggcggcagttcgagcgcacgctgcgcctgcgccgtcttaccaagctggagaagatgggactggcgaccgagcacgcgcccggcgtttgggaattgagcaaggacatggaaccggccctgcgcgagcttggagagcggggcgacattatccgcaccatgcagaaggcgctcggcccgcagggcggcgaacgcgatcccatgagcttccaaatccatgacggagcgcccgagacgcccatcgtcggccgcgtcgtggacaagcacctgtccgacgaactgggggagaacctgaccgttgtggtggacggcatcgacggccgcacgcaccacatcgccggcatcgcgctcgagcggctcgaggacgcccgcatcggcagcgtcgtccagctcggccccgccgaggcggcagcccggccgtccgaccgcaccattaccgccattgcaaaggacggcatctatcggccgagccgccatctggagcaggccaagttcgagggccgcgttccaggcggcgactatgagggctatgtcgatgcccatgtgcgccggctggaggcgctacgccgggccggtatcgtcgagcggatcgacgccgaccaatggcgcatccccgatgatctggtcagccgtgccgccgcccatgacgccggccgagacagtcaggccagcgttcgcgtcctttccccggtcgatctgaacaaacagatcggatcggacggcgcgacctggctggaccggcggctgatccacggcgagacggccgaccttgcgccaaccggcttcgggcaacaagtccgcgaagccatggaccagcgccgcgagcaccatatcgaacagggcgacgccacccgcagccgggacagccgcgtcttctaccggcgcaaccttctcgccatcctgcgggagcgcgaggtagccggcgtcggatcggatatggctttgagtaagggcctgccgttccgcgccgccacggacggcgagagcgtcagcggcaagtttaccggaaccgtgcatctatcgagcggcaagttcgccgtggtcgagaaatcccatgagttcacccttgtcccgtggcggccgatcatcgaccgccaactcggccgcgaggttatgggcatcgtgcagggcgggtcggtgttgtggcagttagggcggcagagggggctggaacgctga

SEQ ID NO: 242680 - DNA, 123 bp, Klebsiella pneumoniae
atggacgatagtaaattacgctattttgccagcgcatggttaatctccatcacgttaccggcagacagtgcggaacgctataatgcccagtttgtgaactggtatcgacccgctggcttttaa

SEQ ID NO: 242681 - DNA, 165 bp, Klebsiella pneumoniae
atgatgatctcatatcaggaacttgttcgcaccttccctaatagcgggctccagtacgaagcgataggaggtatttttcgcgttttcttcaaccatttaaaaaataccaaaaataagaaagggttaaagcatgtcatatatttcccgccaacaaaaatagtttaa

SEQ ID NO: 242682 - DNA, 246 bp, Klebsiella pneumoniae
ttgcgtttgacctatcagaacaccgagcccgaggttagcgccttgggctttttttatgcccaaatttcaccgcgcaccgcagcgcatccaaccacgtcgaacccaaccctttggaatgagcctttgaggagtcagttagtgctggcgagcctcgacgggctgatctcctatgcggcaaaggttcatttcaaagcaaggaaaacgcatgagcgcaaaaacaattcccttaccaatcgcaaaggctag

SEQ ID NO: 242683 - DNA, 582 bp, Klebsiella pneumoniae
atggactattcattatcagagctatctgaggtttttacgtgcgaccctgataagggtgagctttattggctacctcgcagcagagaaagtttcaataacgatttcacctatcggatgtggaacttgcagttctccggcaaagtggccgggggaatcaatggatctggatacgtagtggttagctctggggaaatgaaaatcctagcgcaccgggcaatctggattttcgatgaaggccccattccagatggaatgtttattgaccatatcaatcacatccgacacgacaataggaaagtaaatctgcgcttagtgactcacgcccagaaccagaaaaaccaatccatgcactctacgaacatgagcggtatcaatggagtaagaagggatgagaggagcgggaagtgggccgccttcataaaaacaaaaggccgaagcattaggcttggtttatttaatacattagaagacgccactcaggcgagaaagagcgctgatcgcaacttctgttttcatgagaatcacggtaaagacaagtatcttgataccccttacgttgacccttggttaagggttaactga

SEQ ID NO: 242684 - DNA, 285 bp, Klebsiella pneumoniae
atgtaccttcatatcaccttgaattcaggccggacgatgcgcggtggcatgactcagtcaactattgaggttgtagaggcttcctacggggtaaggtctggtcgccatgagggcgagcaaccagctatatcatggcggacaacaaactggaagccatcgcatcatggcgagatagaaggattcctcttccttgatgaatcggacattgcaatccttaaatcgaatgacggtaaagtgcttcatgagtggcacggtgccaaacgccagaagcagaaaagagagtaa

SEQ ID NO: 242685 - DNA, 768 bp, Klebsiella pneumoniae
atgagtaaaaacagcaatgaaagtgaagtatcgcccgctcaagacagaataaaaaaccacgtttcagggtttaaggttgcagctatggagagattcagcaatcctatattttatagtttcctcatatcttggtcaatatttaattgggatagaattgctgtcttgctactatccaagcaaaatataatagatcgtatttcaacaattaaagacatgcctagcaactccacgcttctatttaatttaccttatgccaacacgattatctttccattgatatcaactattttcttagtagtactaagccctttcattaataatgtaatatattccatacattcaggccaaataaaaaagaaaatagcaaatcaagaggctttaaacatacagcgttatagtgtactaattagcactatagatgcacgagtgcaatatgaaagcgccgaggagtctaaaaaactggaaatcaaagaaacacaaatgcttataaaagcaagaaccactgaggcagaatcccaaattgctaaccttaaaaagcaacagtcagaattaaatgaagatattttaaataataatatcattagaaaccaattaatcgaagacaacaaaaaactaactgatttgatcgccatttcaaattccaatcatacagaaatattagagtccatcaacaccaagacaaagcaacttaatgagttaaccgcggaaataggtactataaaagattgcagtgaacgcataaaaccgctaaatagctgcgcggaatag

SEQ ID NO: 242686 - DNA, 321 bp, Klebsiella pneumoniae; identical to SEQ ID NO: 104979

SEQ ID NO: 242687 - DNA, 558 bp, Klebsiella pneumoniae; identical to SEQ ID NO: 25161

SEQ ID NO: 242688 - DNA, 1005 bp, Klebsiella pneumoniae; identical to SEQ ID NO: 236913

SEQ ID NO: 242689 - DNA, 177 bp, Klebsiella pneumoniae; identical to SEQ ID NO: 230771

SEQ ID NO: 242690 - DNA, 858 bp, Klebsiella pneumoniae
atggagcaagaacaacaaagcatagattcactatttgattttctttatatagatcgtgtacgagttagctctctcacagcccaacttcacaacgctggggtggtgacaagcattaagcaaaccacttctgatacagataaatctaacaaatcagttgaacttaacgtaaagattatcaaaggaaaaattggagtagacgagtcaatagctcactcgcaagagaaaacatttgatgcttcatggtccctgccaattaactttctcgacaaactatctgaagttggaatgattaaaactgggcttaatggtgaaaatcttggttcagtcgttcattctgttggtaaaatgcgaatcttcgatgtatcaaccattcagaagatcatgcccatttttggtgaaatggctcatgcccaatctaacacaaaccttcctccaaaggccaaggcaaaactgaaagggaaaccagatttcgatgagatcgaaatatctccaggacttacacttggagtggtaaaaaaactcatcaatatcgttcctaacatcctacaggttgattttattgatgagaatggtcaacttatgtggatgtctattgataaagaatacctaacgatcaatcctgatgacttagccctaaaatatggcggaaccataccaggaacatggcatgttattggtttaattgatgctttacctgattacatacaaggtgctggcgtcgatggtacacctgctttcccggaacatgatcttaaatcaggcttacaaaactttctagacatgatcaaagaacaagcaggtaggggcagtgattcatatggaatgacccccttacttatctttagaagagtaggataa

SEQ ID NO: 242691 - DNA, 180 bp, Klebsiella pneumoniae
atgctcaaacaattattgaaacaaatcaaacccaacgagcctaatgaggccatggataagattgttgaaatcgttgatgaaatagatgaaaagcaacagaatattgctaaaaacaaggaaaaatttaaagaggattggaacaatggagcaagaacaacaaagcatagattcactatttga

SEQ ID NO: 242692 - DNA, 192 bp, Klebsiella pneumoniae
atgaaaatttctttagctgaatacgttgacgaagttggacaggcaagagctgctgatgccatcggcgttcaccagaccgcaattagtaaagctatccgggtgggaaggaagattttcgttaacacgctgcctgatggaaaaattaaggctgaagagatcaagcctttcccacacaacagaaatcctgattaa

SEQ ID NO: 242693 - DNA, 159 bp, Klebsiella pneumoniae
atgaaaactaaccacgacggaataaccgttggaagtatcactcttccctattccatcaatcgccggggatggatcgccccaagcggcgacgttatcaaaaacccattaaaggctcagcggctggctgagctgatgaacagtaagaaggtggtggcatga

SEQ ID NO: 242694 - DNA, 780 bp, Klebsiella pneumoniae; identical to SEQ ID NO: 16904

SEQ ID NO: 242695 - DNA, 1428 bp, Klebsiella pneumoniae
atgacgcttatcgtcaggaatatcatagtcagtctttcattggcaatatcagattttttagcattcgttgcatctctttatattgcaattgggttgctttgcattacatctgatgattatgttcaaattgtctcgactggacaagttgagggatggacaatattacattggctgttgggtttttgctgtgttggttggtattcaatgagattgaggcattacttctatcgtaaaaccttttggtttgagttgaaggaaatgcttcgaacattaattatttttgctgttattgaaattgcggtcatggcttttgctacatggtcgttttatcgtacattatggtttttgacatggtttttaatcctcatttttgttccattggccagaatgggagcaaaacgtattttagatatattaggaatttggcaaagagacacttggattattggaagttctgaaaatgctcaagaagcatataaagcaataacaagtgaacggaatttaggtttagttgttgttggctttgtagagactcccggcggtgtgtgcgcaggggagaaaatagacggaataccagtagttaataataatatagaatggttaaggacaataaatacaaaaacacaatttattgtagcagtagagtcccatcagagtgagatacgtaacacttggttacgcaatttcatgattaaaggttatagatttgtttctgtaattcctacattaagagggatgccattagacagtacagatatgtcatttatttttagtcatgaagtaatgatatttcgtgtgcaacaaaatttagcaaaactctcatcaagaattattaaaagacttttcgatattctaggctctatttttattatttcaatattatccccattgttgctatatattagtgttaaagtaaaaaaagatggtggaccatctatctatggccatgaaaggattgggaaaggtggaaaatcatttaagtgtctcaaatttcgatccatggtaataaactcaaaagaagttcttgaagagttgttagcttcagatcctgaagccaaacgtgaatgggatgcgacatttaagttgaaaaatgatcctcgtgtaaccaagatcggtgggttcttaagaagaacaagtcttgatgaattacctcaattatttaatgtattaaagggagagatgagtttagttggcccacggccaattattacagctgaattggaacgttataatgaagaggtagattactatctattaagtaagccagggatgacgggattgtggcaagttagtggtcgtagcgatgttgactatgaaacgagagtttaccttgatgcttggtatgtcaaaaactggtccatgtggaatgatattgctattttgttcaaaacagttggcgttgtattaaaaaaagatggtgcatattaa

SEQ ID NO: 242696 - DNA, 600 bp, Klebsiella pneumoniae
ttgcctaacccggccccggaatcgttaccgcccgtaccgggaacgccgatcccggaggaacaggaaccaaatattgaaacattgcccatcgaagaccgggatttcgatgactttattattgttgacccgatgggggttgtcccggcaatctatgtgtattttaagaaagcccctgtggaagagtatgaggttgactattatgaaaattttgaaggccgttcaaggcagggaaaatatcaagtcgatcatattccatctagagatgcggttcgtgtatatttagaggatttatatcctgatgagggaagtaaatatatagataagatggttgataaggttgcttcagttgctattccaatagctgttcatcaaaaatgtagtgaaacctatggcgggcgtaataatcgtaaggtagagacagaaagcggcgagatgataactaaaaaagagctagatgctcgtgacttagaagctgccgtcaatgccaactgggatgcgaatgctgaatgccttaagaatgaatatggtatgagtaacgagaaaatcgaagagatcagagcaaaactacataagttaaaccgaaatgtggggttatattaa

SEQ ID NO: 242697 - DNA, 846 bp, Klebsiella pneumoniae; identical to SEQ ID NO: 63227

SEQ ID NO: 242698 - DNA, 237 bp, Klebsiella pneumoniae
atggaacgaagtagcaatgaagtcagtaatccagttgctggcaattttgtattcccatcgaacgccacgtttggtatgggagatcgcgtgcgcaagaaatccggcgccgcctggcaaggtcagattgtcgggtggtactgcacaaatttgacccccgaaggctacgccgtcgagtctgaggctcacccaggctcagtacagatttatcctgttgcggcgcttgaacgcatcaactga

SEQ ID NO: 242699 - DNA, 351 bp, Klebsiella pneumoniae; identical to SEQ ID NO: 146911

SEQ ID NO: 242700 - DNA, 204 bp, Klebsiella pneumoniae; identical to SEQ ID NO: 133770

SEQ ID NO: 242701 - DNA, 1332 bp, Klebsiella pneumoniae
atgagcaagccggcctacatttgccagggctgggggccccagcgccaggccaacggcgaactcaccgcccgggcgatcgccatgctgccgatcttaaccggcaacgtcggcatcaacggcggcaatagcggcgcccgcgaatcaacctacaccatcaccattgagcgcctgccggtgctggaaaacccggtgaagaccgccatctcctgctttacctggaccgacgccatcgcgcgcggtccagagatgaccgccagccgcgatggcgtacgcggaaaagagaagctggatgtgccgatcaagttcctgtggaactacgcgggcaacaccatcatcaaccagcactccgacatcaataagacccacgaaattctgcaggatgaaagcaagtgcgaaaccattgtggttatcgacaactttatgacctcgtcggcgaaatacgccgacctgctgctgcccgacctgatgaccgttgagcaggaggatatcattcctaacgattacgccggcaatatgggctatctgatttttattcagcccgccacctcagcgaagttcgaacgcaaaccgatttactggatcctaagcgaagtggcgaaacgactcggcgacgacgtgcatcaacgttttaccgagggacgtacccaggaacagtggctgcagtatctgtacgccaaaatggtggcgaaagatccggcgctgccggcctacgaggatctgaagcgaatgggcatctacaagcgcaaagacccgaacggccacttcgtcgcctatcgcgacttccggcgcgatcctgaagcgcatccgctcaaaactccgtccggcaaaattgaaatctactccagccgactcgcagagattgccgcccgctggcagctggagaaagacgaagttatcagcccgctgccggtctacgcctccacatttgaaggctgggacgatccgctgcgcagccagtatccgctgcagctgtttggtttccactataaagcgcgcacccattccagctacggcaacgttgatgtattacaagcggcctgtcgccaggaagtatggatcaatccgcttgacgcggaaaaacgcgggattaaaaacggcgatatggtgcgcgtttttaatcagcgcggcgaagtccgtcttccggcgaaagtgacgccacgcatcatgccgggggtctcggcgatgggccagggcgcctggcacgacgccaatatgaccggagatcggatcgaccatggcgcctgcatgaataccctgaccacccaccgcccgtcgccgctggcgaaggggaatccacagcataccaacctggtcgatatcgagaaggtttaa

SEQ ID NO: 242702 - DNA, 267 bp, Klebsiella pneumoniae
atggcggaaggttttgacatttaccggcatggcggccacaaaaaacccgccgaagcgggtttaatgattatttgcttttttgatgtgaaagacaataaaacccataagtacattgttttatatgtaaatttaaagcttgataattattttgtgcacacccatgtgtacatgattttagaaggtgctcccctctttcacgcaaactttagcatcgtcgcaatcttgccgttaccattcttattgtatgatacatctatcccacaataa

SEQ ID NO: 242703 - DNA, 477 bp, Klebsiella pneumoniae
atgcaacataaatggcaagcattgcgttttatgaaacataaaggtacaaaaaaacccgccgaagcgggtttgcctagagattacttgcaggggttagtcgtatttgcactattcgtgcttgttggaagatcatctactgtcttcccttcaactacgtacacaacaccggaagagaaaaaaccctttgatttcatcgttagcgcgatgacaaaaggcgagtaccctgaatatgccccaaagctgttctttgagttcacctcaccacagacaagcattgcgatagatccatcgtccttttcaccaactttttttgacacaacatctctaaattgggtagatgatggatctttcatgtcgtgcgatatctcgcttttagccaactctatggctttctcttctgtaggcttacatgccgtgagaaataaaagtgatgaaattaataccataataattttcattgatgccacccttgcttga

SEQ ID NO: 242704 - DNA, 483 bp, Klebsiella pneumoniae
atggtatataattttgaaggtagtgataaaatatgtcgcgttgttttctcaccagaggatgttagttcgagtggtgagtttgagaaatcatctgtaaaaagatcggatttgcaagaaaagggatttagcgtcgacttgaaaaaattgcttgatatacaggagttgatgggaagggtatcaaaacagcaggctaacgtccctgataagaggaaagatatttttattggagtattcttgtttgaaaagcttatgggaatagttgacgacgataatgaagatgttatgtttgaaattatctatgatccagtaaaagatgatgaaaccggggagattataaatccagcgcattgtttgatcttatgttgtaagaaagctgaaaataggcctcattataacgaggcccgattaaaattaaatgaattaatgtcaagcctacagcatatgagccagtttgttgcaaagtgttttcctggggcaatttaa

SEQ ID NO: 242705 - DNA, 219 bp, Klebsiella pneumoniae
atgcaagagcaagaaacacttagcgtaacaattccatccagtggttacattcgacgcttccgcttggctcagcacctcggcattcacgtggccacgttggatcgctgggttcgcgataagcacattccatccccggttaagttgggggaaaaaatcactgcttttaatgcggtagagattaacaaatggctggcagagcgccgcgggaaggtggtgtga

SEQ ID NO: 242706 - DNA, 1608 bp, Klebsiella pneumoniae
atgccaaaccaactttttgaattcaaaagctaccctatcgtattcattggttcaggtatatccaaaagatatctaaaaaattaccctacttgggaagatttactaaatgagtattggcaaaaaataaatcctgaaatagatttctataattatcttctgacaataaaagagaaatttcgagccagcattggcgatgattctgatttagatcataaaatatacaccgaagcagcaactaaaatagagaatgactttaacaagctttttactggcaacgcaattaaacttgaagggctagacgcaaaacgtgtgtttagtgaaaacatttcacctttcaaatactcaatatgtcaacggttctcttctcctacgcttaaggatgatgtagacctagatgaattaaactctttcaaagcactattaaaaaaagcaaaaatgatcattactactaattatgatgcctttatagagcatctgcttaatgatcaaggcgtcacccctaaactatatattggaaataatggtttcttcgaagacaccatcggatggtgtgagttatacaagatacatggagatatcaaggaaccgaaatcaattgtaattagcgctgaggactatgagaaatatgatgatagtgcaattctcataagtgcaaaaatactatcgaatatgattaaaaatccaattctctttatagggtattcgttaacagatagaaatgtgaaaaaactattgtcagacttctcatcacaattaccaaaagaagatggaaggaaatcagctgaaagaataattcttattcaacacaaaccaaatgaagagcaagtaatcataaagcaaatcactgatcagcaacttcaggttacttacacctctgttgaaacagacaattacaaacagatttatgatgagataagcactgttgatgaaggattgtctccttatgatgttttacgatatcagagagcaattaagacacttattgttaatgaaggcgaaaaaggcaatctcgacactttactagtatctccatcagacttagataaacttgaagaaagcgttaaagagggaaaaaacctggttgtagctttaggtgataaaaaatacgttttcactcaaataaaagaacttaattatctagaggactatttgtttgagaaaaatgaaatatccaacaagttagcaattgagtttatcattgatgcaaaaaatacaataagattaccgttttcaaagattatatccagttgcaacttccgtgatttaaatttgcagcaaaaagcattaactcgacttaatcaaagaatcgagcgtcatggtaacttggataatataattaactctataacattagataaagcaaatgcagaacgaatctttaccacaattacagagataaaaaacgcaggatttagcaagcgaaaagaaccagttgtcgttataaaaaatattagacacatagatgtgcgtgaattatctgtctatgtaaaagaagatatatttttacagtttatatcatgtgataatgaaaacttaaagactgtttataggaaattgttcttagcctacgatttgcttataaatggtgatattaagaaacctctctga

SEQ ID NO: 242707 - DNA, 1284 bp, Klebsiella pneumoniae; identical to SEQ ID NO: 210670

SEQ ID NO: 242708 - DNA, 504 bp, Klebsiella pneumoniae
atggagattattttttaccatccgacctttgatacccaatactggatctgtgagctggaaaagcagttacccggcgcgcgggtgcgcgagtggaaagcgggcgataaccggccggcggactatgccctggtctggcatccgccggtagagatgctgcagggccgggcgctgaaggccgtgttcgccctcggggcaggggtggactctattctcagcaagttgcgcgaccatccggatatgctgccgctgtcgattccgctgtttcgtctcgaagataccggtatgggacggcagatgcaggagtatgccgtgagccaggtgctccactggttccgccgctttgatgactatcaggcgctgaagctggtttcccgctggcagccgctgccagagtaccgcgccgacgaattcaccgtcgggattatgggcgccggcgtgcttgggggcgaaggttgcggaaagtctgcaaccctgggggttcccgcttcgcgtctggagccgtag

SEQ ID NO: 242709 - DNA, 369 bp, Klebsiella pneumoniae
atgcgtgatatgtatgaaattttagaccgctggggtgcatgggctgttgctgatagtagcggtgttggctggcaacccattgcagctgggtttaaaggtttgctacctcatggaaagaaaacacgccagcaatgcgatgatgatgaaggtatcatgatcgacggatgtgtagcgagattgcggaaatataagccggaagagtatgagttgattatcgctcattttgttatcggtatatcattgcgtagtatagctaagaaacgcaaatgctctgatgggaccatcaggaaggaactgcaaacagcgatgggttttattgatggtcttatgtatatgctagaagacagtagacactttgatatcacataa

SEQ ID NO: 242710 - DNA, 480 bp, Klebsiella pneumoniae
atgaaaaaggagaatctaaaaatactggctaattatgcatatattttagcctccgctgcgttttgtatcgtcgttttgccgttttcggtaaggttgacttttgctcagattcagcctatagcatcagcaatttctacatttgctgggattttattcggtttcgtgttgggttcaataaccttaatggcatccgctaaagataacacactcataaaaaatatcggtaaaacaggatatcttcgaagatttactgaggaaatgcattcaacgatgggatggttgctttcagtttgcatcatcttcattgtattgttatttttccctgacacattaaaatttaagataccctacataacaaaaaacgcggagtacacatatgcccaacttttactgcaattgggcatttttgtcttgctcatcacctttaagaaattttacatcacatggttacgtcttaaagaaatcacaagacttatgtga

SEQ ID NO: 242711 - DNA, 915 bp, Klebsiella pneumoniae
atggcaagtaaacgttttttctttgatttttatcaatgcaacaccatcagcactgatgctaatgcagcaatccaatctccagaggatgtattcaatagtttattcgttgagtacagcgagaatcccactagaacagttagaaaagttggcagcaaactgattgagatccgttttttggaaagaactcgctatggctacagaggggttattgggaagcatcgtgcaaatgatcttccacatgtggcagtcgctggcgggcaagaaagagaaatcttactagaagaaaatgagaacttactagaaaaagcttactttcatttttatagtcaagactctgtgctgattattcaacgtaaccgtttctgctatagctggcttttgttgagcaaatatctttctagcagctctcaaaataccactgttaatccgataattcaggcaaatagtttagagtggctactacgcaacgaagtccacatcaaaacgctagagatagggattgcgcgcccaagaaacgcacaaatctttgaaaatgtagaacatgattttaacaacgcattgattgcaaccttaaatggaacgaattcagctaaagttaacctcactctgagaggtgatggtcgagccgatgaccctgaaaataggtacctaggttctcgactgaaaagagccttaacggaaacattagagacttttgaagttgaaaaattgaagctcgaaacgcaagacatcgaaactggcatacaacatccgattgatcttgtcgcagacaagttagtttactacacagatgtagagctaggagggcgctatcccctagcagctagcatttgggatgctttaactcaagcaaaagatagtaaaaatgatgaattagcagcatacttcggagtaggtgggcaaagggttgagtaa

SEQ ID NO: 242712 - DNA, 1359 bp, Klebsiella pneumoniae
atgactacctctaccctgcaacacaatgataataaagccgttgaagtagaaaaccgggtgatcaaaaagctgttccgccgcctgattactttcctgtttgttctctttgttttctcatttttggatcgaattaatatcggctttgccggtctgacgatgggtaaagatctcggcctgacctccaccatgttcggcctggcggcgacgctgttctacgtcacctacgtgctgtgcgggatccccagcaatatcatgctggcgaaagttggcgcgcgccgctggatcgccgggatcatggtggtctgggggatcgcctcgacctgcaccatgttcgccaccagcccgcatacgctgtacatcctgcgcatgctggtcggcatcgccgaggctggttttctgccggggatcctcgtctatctgacctggtggttcccggcctaccatcgcgcccgcgccaacgccctgtttatgatcgccatgccggtgaccatgatgctcggctcgatactttccggctatattctggcgctcgacggcctgtggaacctgaaaggctggcaatggctatttctgctggaaggcctgccgtcggtggtgctcggcgtcgtcacctggttcttcctcaacgacacgccggataaagccaactggctggataacgaagagaaacaggcgctgatggcgatgatcgatcgcgaacgggaacatgcggcgatcgtcccggcttcgccgcgttccacgctgcgcgaagtactgacgccagcggtgctgatgtataccctcgcctacttctgcctgaccaataccctcagcgccattaatatctggacgccgcagatcctgcagagcttcaacaccggtagcagcaacatcatgattggcctgctggcggcgatcccgcagttctgcactattttcggcatgatctggtggagccgccgatccgaccgccgcaaagagcgcaagatgcataccatcctgccctacctgttcgccgcggcgggttggctgctggcttcggcaacgcaccacagcctgatccaactgatcggcattattatggcttcggtgggatcctttaccgcgatggccattttctggaccaccccggatcgggtgatcagcctgcaatcgcgcgcggtggcgctcgcggtgatcaacgccatcggcaacgtcggctctgccgtcagcccgctgttgatcggcattttgcgcgataccaccggcagctttagctccgggctgtggtttgtcgccgggctgctgatcgtcggcgcgctggtgctcacccgcattccgatgagccagcgcgaggacgccgccgccgcgccgggcttagcggcgcaaaaaggccactaa

SEQ ID NO: 242713 - DNA, 246 bp, Klebsiella pneumoniae; identical to SEQ ID NO: 237128

SEQ ID NO: 242714 - DNA, 405 bp, Klebsiella pneumoniae
atggacctttcatacaccggtaccccaggcgtggattttgtttcgaatctgacgaacagcgtgaagatactcaatgcgtcagcggtgggtaataactacacgctcaccgccactgacggcgctgcgttttcatccatggccaatgctggcgcgatcccggtttcggcaacggcactggcggtactgaaaaagtacggcctttatccgctggtagccaatgccgccacgctgggcggcgacaaaattgtgatttccgccaccactgcaacggctgcgaccgagcgcatgttgcgccgccagggttcctatacggatggcgcactcgccggtgtctggatggctggttttaacggtgttcgtgctgcgagcggagtatcggcgtttcgtgtggcgtattacgcataa

SEQ ID NO: 242715 - DNA, 210 bp, Klebsiella pneumoniae
atgcaggttttcttttgtgcggggaattcagcaaaaaaccgccgctcacttgccaaaggttttttctggttggcaatcaagatgctgagaggtgggagtgtgagtattgaagtcaaagaccacgaaggctccagggaaagtattttgcagggcggaggtggcgtcgttgtcctggttgataatggggaaacggtgtccgtaagggaatag

SEQ ID NO: 242716 - DNA, 393 bp, Klebsiella pneumoniae; identical to SEQ ID NO: 189392

SEQ ID NO: 242717 - DNA, 702 bp, Klebsiella pneumoniae; identical to SEQ ID NO: 208998

SEQ ID NO: 242718 - DNA, 735 bp, Klebsiella pneumoniae
atgaaaataattaacccgttatttatctccggttgcctgtttttttcgctacctgcgatatcggccaccctcagcggtacgctggcaccgactgttgtacccctggccaacggcggacaggcaaacatcgctgtcagcaacacagacccaaacctcttcacggtaccaggagaccggatcaccgccattaacagtctggatggcgggctgacgaaccaggagcagaccgacagtggcggggcgatccttgctacggtcagcaagaaaccattcacgtttattgtggaaacagagcgcggcctcaacttttctgtccgtgcggtgccgcgtgccggagtgggccggactatccagctggtatccgagctcactggcacgcccgggccggctaaatcatgggaggaatccaacccgtatgaaagcgttcttgtttcgctgaaccgcgctgttcgccagggccagatccctgatgaataccagtccatccctgtcacatcagaagtgttatccgtgcctgccggccttcgcgccacggcggcccgggtctggaccggtcaccatctaaaagttgttctgtacaacgttgaaaatgtaacgctgtcggcgcgaaacatccgggaaagcgatttctggcaggcgggaacgcgcgccatcatgctcagtggctccgcgagtcagctggttggcggtggtcgcatgcaggtctgggtcaccacggcagaggagtcacgttga

SEQ ID NO: 242719 - DNA, 336 bp, Klebsiella pneumoniae; identical to SEQ ID NO: 206609

SEQ ID NO: 242720 - DNA, 243 bp, Klebsiella pneumoniae; identical to SEQ ID NO: 206610

SEQ ID NO: 242721 - DNA, 405 bp, Klebsiella pneumoniae; identical to SEQ ID NO: 206611

SEQ ID NO: 242722 - DNA, 348 bp, Klebsiella pneumoniae; identical to SEQ ID NO: 206612

SEQ ID NO: 242723 - DNA, 399 bp, Klebsiella pneumoniae; identical to SEQ ID NO: 206613

SEQ ID NO: 242724 - DNA, 390 bp, Klebsiella pneumoniae
atggacaacaactctgagcagcaaagaacgacattcttcactttacgacggagtctgaccgttatcgccctcgtgggcaccattctggcgaccaatgtctttatcacgcgtctggtgctggcacataccgcgccacgggtggtggccttcgatatgaagaagacgctggacagttttatggacagcgtcagtcagaagccgctgtcagaggcgcagtcaaaagcgctctcagaccgctttaacgcagcgctggagcagagcctggccgactatcagaaaacgaatcatgtcctgatcctggtttcaccggccgtggttcagggcgcacccgatgtcacccgtaaaatccagaccgacattgccacccgaatgaaggggacgcgggaatga

SEQ ID NO: 242725 - DNA, 648 bp, Klebsiella pneumoniae
atgaataaaataataaccgggctggcctgggggctgagtatgctctgtagtgctgcttcagcagcagacactattaatacgccggaaaaccgccagtggctgaaacagcaggaagacttcagcgagcaactgcgccagcatccggatagggcgctgcagcaggagcttgaagctcaaatcagccgtaaccctctggccagccaggatcagcagtttatcgataacctggccagtcagcagcgtgaatccacccgggataaaccggcggaaggtgccgtgtatttcatctccttctcaataccggacgaggggttaaaacggatgctgcatgaaacccaccgctacggtattcccgccacgctccgggggctcgtcaataacgatatgaaagccacgaccgatgcagtgatggggctggttaaagcggggatcacagaaggcgtgcaaatcgacccgacgctctattctcagtacaacatccgcagtgttcccgcgctggttgtgcgctgcaaagccggttttgacgtcatacagggcaatattcgcctgaagcaggccctggaaaaggtggttgagaaaggggattgtgcagacacggcccgtaaaatgctgggagccgcttcggatacgcaaaggagtccgtcgtga

SEQ ID NO: 242726 - DNA, 228 bp, Klebsiella pneumoniae
gtgatagttagctttgctaaacatcctgttgtcgatttttctctgagactggtgctgacgataattattatctcccctgtgctgtatttttcatgggatgccgtcaaagggacatcgggcagtgattatattgagagtgtggtttttatccttatagtcggctttttctggttgatgagtcacctgtttatttctgctttagtagggattttgcaaaaaagaaaataa

SEQ ID NO: 242727 - DNA, 327 bp, Klebsiella pneumoniae
atgaaagagaacaaatcatacgggctggtgatcgtgtttgtcggcgtgtttgtcgtttttctgatcagcatcatgtcttacagcctgtggcgggataaacaaattaatgcgtttctggccaccaaccgggcctggggtattcagtgtgacaggagctcgcaggctgcgtgggttatcaggaacggtgaacgtacggcattagaaatgaataatctgacactgtactgcaacggtttccggtttgagggacgcactgaccctgaaacgaaaacggtcagtctcgataaatacaccgtctatcaacatatttcacgccagccgaattaa

SEQ ID NO: 242728 - DNA, 441 bp, Klebsiella pneumoniae; identical to SEQ ID NO: 112533

SEQ ID NO: 242729 - DNA, 360 bp, Klebsiella pneumoniae; identical to SEQ ID NO: 112532

SEQ ID NO: 242730 - DNA, 237 bp, Klebsiella pneumoniae
atgcgaaagattcgttttcccgatttagacattaccgggatgtgggtgctggcggtgggcgtgtttttccacctgattgccaggctcgtcagaaaacagcctgagctggccgttcaggccggggaaattctggggttgggtatggtgatatttggtggataccgaattctcaatgccctgattgctgaagctgaaaagcaggagaaggcccgtgaaaagcaacctgaagacaattag

SEQ ID NO: 242731 - DNA, 429 bp, Klebsiella pneumoniae
atggatagtctcaacaaaatatattcttcgttacccgtactggaaagaaataaacgcctgaagctatcacggcaaaagagattcgatgtttattattgtctcgcttttatgtttggttctgccggattatttctgtggtggggaagtcatgcgtatttcagtgtgttcactgagctgttaaccccgtcggagaagctggggtctgcagagaacgtcatgaatctgtggaatgtcctgatgtatttcgttccctttattcttttctcactttccattggttgtctggcaacggctttgctgggagtactgatggccgaactggctttctggtttgaatatgcccttgaaaaaagcttccagcgatatttaaaccgcaacctccgacggaaaaataaaatgaaagaaggagagcctgatgttcatccgtaa

SEQ ID NO: 242732 - DNA, 2880 bp, Klebsiella pneumoniae
atgctggaaatctacacgatagccggcggcgactggtttcggggcaacctgaatgccattgccgctttcatgagtaccggtacctggtcctccattgagaaaatgtgtatcgccttttccgtactgattgtcgccagcagctgggtgaaaaagcacaacgtcatggatctggtcggctgggtgtttgccctgacgctggtctcgatgctggtcgtcattcgcaaaccggtgcagattatcgactacagtaatgtctctcaggtctatcaggtcgacaatgtcccgataggcctggcgattcctgcctcactgacaacacgcgtcgggaatgcgctggtacagagctatgagatgattttctccctgcccgacagcgtgacgtacagcaagacagggatgctgtttggcagtaatttaatcgctaaaagcaccgactttttatcgcagaacccggagatcaccacgttgttctctgactatgtgcagaactgcgtcatgggcgatatttttctcaaccataagtattcctttgaggagctgatggaatctgctgacccgtactcgctgatattttctcagccgagtccacttcgtcaggttcctaataacagctataagtttctggagaaagactatattggcaccacgtttatcagctgtcaggtggcggcaacggagctgaagcaacggctggctctggatacccagacgggcgggaaaacctggaactactatgtgcgccagctctttggcggcaaacccaacccggacctgctgttcagccagatgatcggtgacagctataacttcttctacagctcggggcagagcgcgggacagataatccgccagaatgtcaccatgaatgcactgcgcagcggtattcagagctacgcggcccgcagtggtgatacggccagcctggtgaacatcgccaacacctcttcgctggagaaacaacgcctggcacaggcgacaatgggccaccaggcattacgctccctgccgttgatgcagacggtggtgatggggatcatgattggcctgtttccgatcatggtgatggccgccatgttcaacatgatgacaatgcaggtcatcaagggttacttttatgcgctgatgtggctgcagtcctggcctctgctgtacgccattctgaacagcgcgatggcgtattatgcgaagcaaaatggagtaccggtggtcctgtctgaactctctcaggttcagctcaagaactccgatattgcgacaactgcgggctacatctcgatgatgatcccccccttaacctgggccatgattaaaagtatgggggcagggttttccagcgcgtacagtcattttgcctcgtcgggcctcagctcgacgtcgcaggcctcttccagcgtcgtggacgggaattactcgttttcgaatatgcaaacggacaatgtcagcggaaacagctggaacaccaacagttcaacggcatttggacagatgtcccggcaactggggaacggaggcatgggtacacagacccgggatggttcgatggtctgggacagcagcggtgcgatgtcaaaactgccggtggatattaatgttggccgtcagatagccagtgcacagcagcagatggcacgtgaatctgacgtccaggcagagagctctctgcagggctataacagcagcgtgaccagtgcctggaacagcctgaagcaatttggcacaaatatggggaccagcgcgtcaaccaccacgggggcagataataccgagtcgtcgcaggattcaatggcgaaaagcaaaatgtggaacgcggtcgtttcaaatgcaaaagccaacaacataagtaacgaacagtcgttccagaacttgatggatgaatcgacaaggggctcaatcacgggtgaagcttacggtggggtgaaatggagctcgggagatcagcttgccggtaaactgggtaaattggctacaggagccagtatcgatggaggtctgaaagttgcagcaagtggtactgcgggcacgggttcaactgatactgtagggcaatccggccgccactcagtagataccagacatgataccagtagccaggcggcgaaagattttaaagagggggctgactacatcaccagccataaaaccagtacatcaggtaacacgacagataataatgcaagctcccgcgtggaccagttctctgcgtcactttccagtgcgaaaaacagctacgaccaatatacaaacagccgtactcgcagccatgaatttagcgaaatggcttctcgaacagagagtatgagcggccagatgagtgagaatctgacgcagcagtttgcaaactttgtccaacaacggtctccacagaatgcagaagctatcctgacaaataccagttcgccggaagtggcagcacaacgagaatcgctggcccgtgaatttgttaaggcacaggtagagcctaaggttgatggcgcctatcaggatgcgagaggcacaatcggtcagggaatgcctactgtgtcaggaggtggaggggctggtaccgtagaagccgattataaccagcacagtggcagtattgatggaatgacgcataatgctggaatcaagggtaatgtgggtcagacagtgggatcgatggtgtctcaaaacaaacaggcacacgaggaaagccgtcagggaattcagcagcagggggatgatgtgaaaacacagcagaccggtctggaaaaccaccacaaaaaagaaggaaataattttagtgagcaatataataaagagataagttctcaacgagacacgttgataagtgatacaacggaaaaactcagggagaatgccttaaagagatcaaaagatcttgaagataagctcccttag

SEQ ID NO: 242733 - DNA, 669 bp, Klebsiella pneumoniae; identical to SEQ ID NO: 112529

SEQ ID NO: 242734 - DNA, 693 bp, Klebsiella pneumoniae; identical to SEQ ID NO: 112528

SEQ ID NO: 242735 - DNA, 720 bp, Klebsiella pneumoniae
atgtacgaaacccgcctcaatgccgtcgatcgctggctgcaggggctgctgacctggacgcctggacagacggatatcatcaaaacggtggcgctggtgctgatgattgtcgatcacaccggtttgctgctggccgggaataatgaactcatgcgtcttctggggagaggctgctttcccctgtttggtctggtctggggaatgaacctggcgcgccacggggccatccgccagacacagctgaacagcctgtggtgctgggcgctgatcgcccagggctcctttattctcatcgggtacccgtggtacatggggaatatcctgtttagctttgcggtcaccggccaggcgctgcgctggttcagtctgcagacccgcaatgatattctgctggcgatcgccattgtagtggcttggctccccttatctgccgacagctacggtctggccggggtcttcatgctgatcaacagctggcggctttgtcgggcgaaagagcctgtagaacggatcgggtatgccgtgctgtgggctgtcatggtactactgatgaatgcccatgatattacccaggccattgccagcctgatggtcgctttgctggccctggcggtctgttctgacctcggtcgttctgttccgcgcttctggccgcggcacttttttgtgatgttttatgccgtgcatctggcggtgctggggatagtggcgacgatgtaa

SEQ ID NO: 242736 - DNA, 591 bp, Klebsiella pneumoniae; identical to SEQ ID NO: 112526

SEQ ID NO: 242737 - DNA, 792 bp, Klebsiella pneumoniae
atgaaattcaaattcggattgtattttctgctcccgtttatttcggctgtcgcttttaataccagttttgctcagaataatgaaccagataaaacgttttccgccgcccaggaaaaaagaatcggggaaatcgcagcggattatctgcgtgctcatcctgaaatactgattcagatgagtgagaaacttcagcaggagcaggaggcgaaacagacccgcggtcttaaatccactgcactggaacagcaggctaacattctgggtaataaaaatatcccctcctggggtcccggggacggaaaggtgatggtggttgaattctttgactaccagtgcatctggtgcagccggttcgcacccgaactggagaaggtcatcgggggcaacacggacgtgcgttacttctttatggagtggccggtgtttggtagccggtggcctgcatcattgctggcggcgaaaaccggcctgcaggtctggaaagaaaagggctcggaggcttacaggagctatcacaatgcggtttatggtacaggactgaatgaagggaaactgacgcaggagattatcgaaaaggtttctggtcatattaaatttaagcagaatacgattgatgagataaataccacactgaaaaatattaatgatatcgccacggcgacgggattaaccggaacgccaggtattattgtgatgccggtgaagggcgcgacggaagaaaacgtcacggtcttttccggaatgactgaagcacagaatgttcaggcggctataaataaatcccgacaataa

SEQ ID NO: 242738 - DNA, 597 bp, Klebsiella pneumoniae; identical to SEQ ID NO: 189540

SEQ ID NO: 242739 - DNA, 645 bp, Klebsiella pneumoniae; identical to SEQ ID NO: 189539

SEQ ID NO: 242740 - DNA, 627 bp, Klebsiella pneumoniae; identical to SEQ ID NO: 189538

SEQ ID NO: 242741 - DNA, 567 bp, Klebsiella pneumoniae; identical to SEQ ID NO: 189537

SEQ ID NO: 242742 - DNA, 267 bp, Klebsiella pneumoniae; identical to SEQ ID NO: 112525

SEQ ID NO: 242743 - DNA, 498 bp, Klebsiella pneumoniae
atggatatgaaagaaccgacagagaaagaattgcgagattttcttctaaaacaattttatgaagaaaaactcaagtccaaaatcgaccttcttaacggtgatgaacaagaagtaacagataagtatcgtagtcgtcttagaactatagatgcagagatgttatttaagtatctttcagaaaaaagaatttctgggcattgtctggcttgcggttcagataaattatctgttccacagactggttacataaaaaccgatagttttcccgaaaactttgaatctcttggagaagctgagcgaggcatgattgaagatgctcaatcagtacaatatgtccaatatgttgcatttggtaacctgaatacgatcgccggacttagaaaaagctattacatggtgaattgcctcaattgcggtcatctgagcttatatcgtgccagtgctgtccttaagtggtttgaagatcaaaaccctaaaggagcacaaaacgatgagtag

SEQ ID NO: 242744 - DNA, 441 bp, Klebsiella pneumoniae
atgagtagtgtttctgagtttcgccgctccaatagcacaaatgatgtaccatggaagaaagacggggatggaggcgatggcatgtctgacaatcttgaaaaacgtgtagaaaaactcgaagacggtatgtccacagtcaagctcgaccttgtaaggctgacagagcgttcagagcagtttgtcacaaaggcagatttgtcagagcttaaaggtgaactgaaggcagaaatgttgggcctgaaatccgaaatttctaatacgaagagcgaacttaaattagatattgttaatgttaaaaacgagtttatcgaagcgctggataaacgctttgacaagcttgaggataaggctcgctggaaatggggtagtgttgtggtgcctgttgctgtcggcattctttcagcactcatcacctttttagtggcaaaatttggctcctga

SEQ ID NO: 242745 - DNA, 228 bp, Klebsiella pneumoniae
gtgaaatctttgtcttcaagtcgccgggaggtacttgtagattgttttcacgtctacacctgtcacatcggctacctgctgccgggtagcgccgttctccagcatccggcgcgcccgttcgacaacctccggcgtcatcacccggcggcgaccaccaatacgcccctgctcttttgcaaggactgtccctgtcctggcgctatcatgggcggctgttattcaccttag

SEQ ID NO: 242746 - DNA, 348 bp, Klebsiella pneumoniae; identical to SEQ ID NO: 193558

SEQ ID NO: 242747 - DNA, 1347 bp, Klebsiella pneumoniae
atgagttatattttctttatttccgccgggcaacttaaaacaaagaaaggggcaaatatttctaatcagcgaaatatgtaccttaactacggccttctttccttagccactgtagtaaataatgcgggttataagccccgtgtttttcatggtaactttatgtcgccaatcaatttttttgaaaaattaatagacaatgacctattaaatacgcgacatccaatttatatatctataccaagttactacgctttgtcctggacaaaggaattcacatcccttattaaacataagataaacaacaaaataatcatcggaggacgatgggtaatcaatgacgacgaagattttttaaaggccgaacttccatacattgatgagataattagtggtttaggtgagaataaaatactcaagacccttactggtaaaaccgacaataatgattatagctatttaccacttaattattcattactaaatgatcgcaaatattaccaaccaagtattgaagtatcgagaggttgtggtaaaggttgcttgttttgccaggaaaaagatgagctactaacgaaactaaaaccaccaaaacttatcatggaagaatacaatgaattactgcttcatgataattatcgaacaatgactccctattttgaagcatctctttttactcctactgaaaaatggttgaaagagcttattgatgtacgtaaaaaaaatcaaaatttcttcttatggcgtgctgaatgccgagttgacgccctgtcaaacaaaatcattcccctgatgaccgaagcaggcatgcgcgtgatagatcttggtcttgagagtgccagtttagagcaattgcaaaagatgcataaaacaccaaagccagaaaattacttaaaccgagcatctaggctattagagctttgcttcaaaaacaaaataaaaacaaaagtaaatatcatgttttatgcaggagagactgacactacaataagtgaaactcgtaaatggttaaacgctcacagagaatatatttacggtatttcatgtggtgttgtatctgcgttcggctgggatcataacaaacaaagctttattgataaccttatgcaacatggtgcaacgatatgtcatgaagagagttttctcggtgttacaaactttcaccttagtagtaagttaaattattataaagctttagatgaagcaaaaaagctctccagagaatttatgtctatggagcatttttttaatttaaaagcattctcatactatccacgcgattatagtttcgagcagttccaaaaagaaatcgccctcgagaatgctaattatagcttcaaatgtgattaa

SEQ ID NO: 242748 - DNA, 2232 bp, Klebsiella pneumoniae
atgccacatgatgagataaatcctactgaaggtgagtttgtaggaaaggaaaccgcgcaagagccagcggtgaatgtcacacatatcacgaacaatgtagtcatccagcagatggacgtttacacggagaagcttgcccagccgagcggaactactgttgatgaggcttctatgctcagcattgacgatgagttatctcagcatgccagcatggatcttgatgcccgtctgaatcgttactttaagggtaaagttgtccgtaaggatttgaccaaacagctaaaagaaggggctaatgtccctgtctatgtactggaatatctgctcggtatgtactgtgcttcagacgatgatgaagtggtacgcgaaggtctggaaaacgtcaaaaaaatcctcgctgagaactatgttcgcccggatgaggctgagaaagtaaaatctctgattcgtgagcgtggtagctttaaagtgatcgataagatcggagtaaaactcaaccagaagaaagatgtctacgaggctcagctttcgaacctcggtatcaaagatgccgtgatccccgccaacattgttaaagctaacgagaagctgctcaccggggggatctggtgtattgttactcttaactatttttatgaagaagggcaaagaatttcgcccttctcaattttcaaccttaaacctatccagatgccctctatggatatggaagagctttttgccgcccgggctaatttctcaacagagcaatggctggataccctgatccgctctatcggcatggagccaaccaatctgaagcaacgggtgaaatggcacctgttgacgcggatgatccccttcgttgagaacaactataacgtctgcgaactcggcccacgtggtaccggtaaaagccacgtctataaagagtgctcgcctaattcattactagtctcaggtggccagacgacagtcgccaatctgttttacaacatgagttcccggcaggttgggctggtaggcatgtgggatgtggtagcttttgacgaagtggctggtattaccttcaaggataaagatggtgtccagatcatgaaggattacatggcatcgggctctttttcccgtggccgtgattctatcgaagccaaagcatccatggtatttgtcggcaacataaaccaaagcgtagaaacgttagtcaaaaccagtcacctgctggcacctttcccggaagcgatgatcgatacagccttctttgaccgtttccatgcctatatcccaggctgggatatccctaagatgcggcctgaattttttaccaataactacggtctgatcaccgactatctggccgaatatatgcgagaaatgcgcaagcgtagcttctctgatgctatcgaccgcttctttaaactcgggaacaacctcaaccaacgtgatgtaatcgcagtacgccgcacagtctcaggtttgctcaaattattgtatcctcatggtgtgtttggtaaagaggaggtacgtccttgtctcacctacgcattagagttacgtcgtagaatcaaagagcagttgaaaaaactaggcggcatggagtttttcgatgtgcatttcagctatctcgacaacgaaactcttgaagagtttttcatcaatgtacctgagcaaggcgggagccagttgatcccagaaggtctgagtaaaccgggagttgtgcacatggttaccaagggtgtcacaggccaactgggcctgtatcgcttcgagactcaaatgacccccggtaatggtaaacacacgacatctggcctaggctccaatacaccagcaaaagaagcaatccgtataggttttgattatttcaaaggcaacctaaatcgcatcagtgctaccgccaaattttccgagcatgaataccatctacatgccgttgagttacataactcaggccctagtaccaaaaccagccttgccgccttggtagccttctgttccattttgatgggcaagccagtgcaagaacagatggtcgtgctcggagatatgacacttggtggtgtggtgaatccggtcgaagatctggctggtagtttgcaactggcaatggatagtgggggcaaacgtgtgctgctgccgatggcatcagcttctgatatcccaactgtgcctgctgaaattttctccaaattccaaatcagtttctatgcagatccggtggatgctgtgtataaagcattaggtgttcaataa

SEQ ID NO: 242749 - DNA, 2604 bp, Klebsiella pneumoniae
atggatatcactcagcttcaaaccgggcttaacaacaaattcaccgcagatcggattgttttctggcacgacccagaacagagctttactgcacagctaacagaactcgccatactgtggaacgggttgccagtaatagtgctcaatatggcagagcagtcacagcttcagacgcgcaaacgcattgaaatcgatgaacccacgcaggggttccttctctactggcccagttcagaaccatcaccagctaaagactggttgctcgatatacgtcgttatagcaccacgttttatgctgatgcagcctcaattctgcttaatgacctcggcctcgccaatatggcgctgcgcgaccacatcgcgtcacgtaaaagctttttcgccaacaaagagcgtattgcagcctttaaacgtcgcctggacggtcgtggcggcatagaagatccgctatcacttgatatgaagatgataagtgtcgtgctggcctgtcatgctcagattgccgaaataatgaaaagcattggcgatcggttacttgagaatgctgaaaccgctcttgctccgctagaacagcatggattgctgcctggattttggcatttaatgaaccgtgaatatggataccatatacctgaagggacagaaccgtcactacgcgaactgattcgtaagttactggtgagtgaatgctacgaacagcttgataccaaagagcgccctgtctggctacagtcacaactattagccactcccaccggacgtgcgaatgctatggctctgctatctggatggcgtgattctaaccagtacagcagcaattttgccgacatctctgcacaggtagcggatcagctcgaacttgcttcacgccttacagcgcaagatatctggctctggggagaagtcgaaggctttgaagcggtcgaacaaggtttgatccgtgagctgatatctggattaaacaacggtgacttgaaactgaatcgagtagagtttgcccaactaatctctcgtcgtcgacatggattctgggccagaactgtacctaaatatgcatatatttaccaggcgctgcaacaagctgaattgttgctagaactacgccgttcgaaaccggatggttttcattacacttcagcacaagaaatgtatcttgcctatgaagctgaattgttccagtttgatgcagcctatcgcctgtttaatgaagcactattgcacctgcaaggacagtcggtagaagtgctggctgtactggccagtaaaatcgaagatctgtatgtgaactggtatctgtaccaactgggactgacatgggatggcttgctagttaaagagcagttgcttgataactggcaacttggcctcccctctcagcatcgcttctatgatacggtcatcaaaaaacgcttcgcccaaagcggcgtcaagcgccagtttgttattatcagtgatgccttgcgctatgaagttgctcatgagctccagggacagataaatgaagccaagcgcttcactgcgcagctcaagagccagctcggggtactacctagctacacgcaacttggcatggccgccttactcccacatcagcaactggactatgccgctaccaactcaacagtattagtagatggacagagcagcgcgggtttagaaaatcgcagcactattctaagtaaggtaggtggtatagcgatttcggccaaaagtctgctgagctggacccgggcagaagctaacgaggcggttggtgacgcaaaggtaatctacgtctatcacgatgtgatcgatgctcagagtgaatctcagaaaagtgagcttaagacattcattcatgcccgccaggctatagacgaactgaatggactcatcaacaaaattatcaatgggtttggcgttactcgcgtagtgatcacagccgatcatggattcttattccaacaggcctcagttgaaaacggggtaaaatcgcctctgaaacacgaaccatctggaactctggaagcttcaaaacgctatctccttggtcgcaatttaccaacaaacgaagatgtctggcatgggcaattgcgtaatgttgttggtggtaactctgatgtggaattctggcttccgaaaggagtgagccgtttccattttgttggtggagcccgcttcgtccatggtggtgcaatgttgcaagaggtctgtgttccaatacttgaagtacaagagctgcgtggcaagaaacaaactctgtatgaaaaaaccaaagtcggcatagttccggcataccaacccattaagctggtaaatgtgatcgataaaatccgctttctgcagaccgatgccgtcgatgaacgtcataaatcaagaatggttcgtttctcggtggtagatagttcagaacaaaccgtgtcagctattgagaagctactctttgaagcgacctcaagtaatctggatcaacgccagcaagacgtgcgtttaaaactgaccggtgctcaatttgaccgcaaggcgcagtatcaattgctgctcgttgatgatgaggatggtattgaaatggcacgctatccagtcactattgatttggcaatccaggatgaattcggtttttaa

SEQ ID NO: 242750 - DNA, 1785 bp, Klebsiella pneumoniae
atggtccagcaagaaaataacaacatggacaaacacttttatcgagcttcagccacggattttgaaaaaattccgggaagcccaattgcatattgggttaacgacatggttatttccagcttcaaatttgaaaagctacgtgaagttgctgatgcaaaacaaggcatggccacctctgataatggccgcttcttacgtttctggcatgaagtaagcgcggataaatcatgttttgactgcaaaagtgccgaagaatctgaaagcagacctgagaaatggtacgcctacaataaaggtggagagtttcgtcgttggtttggaaataacgaatatttggttaactgggaaaaaaatggagtagaacttaaagagtttgttgaagaaattaacaagcttagacctggaggacgcctaaaaaatcaagaatactattttcgtgagaacataacttattcatcgttaagctctggcttattctctgcaagatataatcctacaggctttcttttcgataccaagggatcttgtatatttcctatatctgtagataaacatgggctacttggtctgttgaatagcaaggttgctcaaacttttctgaatattctttgtccgacacttgactacagttcaatagggataaatgcgataccggttaaattaccagaaaaaaaattcttgaccgagaccctcattgaactgtcaaaaagtgattgggactctaatgagctttcttgggcattcaatagattacctctactcccaccagttttcagtgagttattgttggataactgctaccaaaaactgcgtacatctatgcacaataaatctcagaaaatgcaacgcctcgaagaggagaataacagtctttttatcgacacctatggcttgcaaaatgagctgacgcctgacgtaccactaagtgaaataaccctcacctgtaacccgcattatcgctatggcggtaatctgaccgacaaagagcgagaagacagactgcaatcggataccgtcgtagaactgatttcctattcgctcggctgtatgatgggacgctattcactagatcgtgagggactggtttatgcccatgccggtaacaaaggttttaaaacactagttgaaggaggtgcttatatcagtttcccggctgatagcgatggtattctacctctggcctcagagacttggtttgaggatgatattgctgttcgttttgtagagtttatccgcactgtatgggggaatattcatctggaagagaacttgcaatttattgccgatagcctgtgcttagctgcgatcaagccagtgaaaaaaggaggagaaacctcacgcgagacgattcgccgctatctctcgacccaattctttaaagatcacttgaagacctacaaaaaacgcccgatctactggctattcagttcaggtaaagagaaagcctttgaatgcttggtctatttacatcgctacaatgaaacaactctcccgcgcatgcgcactgagtatgtcacgcccctgctcggccaaatggatagccgtattgagcgcctgcgcctgcagcagaatgaagcagaaacagccgaagccaaactcatcggtaaagagatcgatagcctgaccaaacagcttaccgagctgcgttcttttggcgaccaactcaaacactatgctgatatgaagatccagctcgatctcgacgatggtgttaagatcaattacggcaagttcggtactttattagctgaagtgaaagctattactggtgataaagccgagtaa

SEQ ID NO: 242751 - DNA, 3003 bp, Klebsiella pneumoniae
atgggttttacattagaagatttagggctcgcttatcgtaaggctaaagtagacctctattactcgacaactccgtcgctatttgccattgctgactacgaggataagctgcaggttaacctcactgatttgcaagaacgaatcaatggagaagatcaagattggatacacaacccagattttctagggggttggtctctggtcccaaaagccattaaaacggagaaaacagatgacagcacaggactaattttcgcgtcacctgatgatgaatggcagaagataatagaagctggaaaagaaatcacagcagaatttcgtttgatggcctgctgcagtttggacttccatgtcctttcagctctttggatgctcaaggtgggttcgctttttgataaaaaactcagtagcaatgtttatggcagccgattacgccgtaatcgccatggtcaaattaacgaactagcactgggatcatttactccttacctcaaaccttttcgcgactggcgtgatggcggcattaacgctatgcgttcagcactgcaagataaaaaagaggtcttagctcttacagctgatgtgagcagttttttccatgaactaaatcccggttttatgcaagatccggcctttataaaactgatcggcgtcgaattggatcagagtcagacgagagtgcaccaattgtttattactgcactggaagcctgggcaaaactaacaccactcggaaaaggcttacccgttggtttgccagcctctgctgttgttgccaatgcagcactctttaagctcgatcagtttatcgaacagcaggttgttccactctactatggtcgctatgtggatgacatcctgttagtgatggaaaataccagtaagataaaaaatacgtatcagttctgggattggatcttcaatcgggatgggggcaaagagttatttaagtgggaacatatggataacccaaaagaacaggctatccttttcaagcctgattaccttgaaacatgttccagccgtatcgtgtttacaaacaacaaaaataaattattcgttctgtctggcgcggctggtattgctttggtcaatgctatctctgagcagattaatcaacgtgcaagcgaatggcgctctttaccaaaccttcctgattcagccgaatcagtggcaaccgatctgcttaaagcaaccagtcatattggtgaacaagccgataatctgcgtaaaactgatgctttaaccctgcatcgagctagcttcgctctcaatctgcgtgactatgaagcttacgagcgcgaccttccgcctgatgcctggaaagaacaccgccatgctttttttgatgcggtaacaggtcatttgcttacgccgataaaattcttcgaactggctcaatacctgccacgtatcattcgaatggcagtcgcttgtgaagattttagctatcttgataaaatgattaaggctcttaataagctaacggaaaaggtcaaagatcattgcactatatcgattaaggctctgcagtcttccttgcaatatcaacaacatgattggtggaacacactttacgatgctgttgctgaaagcattatttcgtcttttccacacaagctatgtggtgaaggaaaggttgcctgggaggaattccgtaataccttacagtttaaaaagcacttagagtctagtctgtttaaacttctcggcagcaatgtcttacagggagctcatgctcggctattcagttacgatctagcgcatattccacttcgcttcatcggcctgcccaaagagatggtgagccagcgaggcatcattgcacgtaataaattaatcacctcagatgcacatgagttacttccttgcaatataacggagggtatccgtattctcgtggattggctcaaatttaaaagagggatcccggcaggtctaaatttcgctactcgcccttttagcctcaatgagttgtatttgatagcaccagatccgtttaattcgcttcactgcgctaagctgagccaggtgatgcaggctttacgtggttttgagctgaccaagcacaaaatgccgcattggaataacggtaagaaaatacttcagatccctgatggcgaacctaagtccaagcatacaatcgcggtatctagctgggaaactagtgggtcgagttttgtcgcagcggtgatgaacaaacccgatcctgatagtcgtcgccgttatcagcgactcagtcgtctaatcaatgaactgatctccagacctgataatagtggatatctcattttaccggagctggctttaccaccgcagtggtttattcgcatagcccacaaacttaaggggcgtggtatttcatttatcagtggtgtggaatatctgcatgctccgaaaaagcgcgtacgtaatcaggtatgggcctcgctgagtcatgatggtctgggcttcccatctctgatgctctaccgacaagataagcagcgacctgcattacatgaagaacaggaactcttccgccttgcaggtcttgaattaagccctgccacacaatggacacaacccccgattgtgcaacatggagattttcgttttgcattgatgatctgcagcgaattgaccaatattcgttatcgggcagatctgcgcggtaaaatcgatgcgttatttgtaccagaatggaaccctgataccgacacgtttaatgcattggtagaatccgctgcacttgatatccatgcctacatcatccagtgtaataatcgcctttatggcgatagccgtattcgtgcaccttacaaagaacgctaccaacgcgacttaatgcgcgtgaaaggtgggaatcacgattactgcatcaccggtgaaattgatgtaacgaccttacgccaattccagtccaaccaccgttcaccaggaaaaccctttaagcccgttccggatggatttgctcaggatatggcacataacagaaaagaattgccaaaaggagactcataa

SEQ ID NO: 242752 - DNA, 540 bp, Klebsiella pneumoniae
atggaaactctgaagcagaaaaagcagccatgtttaaagcagctattgcttaaagaaatagggcttaagcagataatgtcaaactctaacctccacaaattgactcgcgccgagttagccgacatctatgaaaaattggtgctctattacgagcagcaccaggggctaacatctgaactgttatcaacccaggttaaaggatatcgcaagttaaagagtggacttagtctacaaatccagcctttctcgactgaaaaagagctggcgacatcaaccctacctactgcagataacaagcaaaatctgatctggttccataacgcgaagagtaacattttaaagagtattttttaccatctgcgaaatgcagctgctcatgccgatattgaacgagttgcaggaaatccaatctggtatcacattgaacatcgttataaaggccagctaaaactcttctgtcaaatgaaaaagactgacttctggtgctttgttgatacagctaaaaatctgaaaaaaaaagcagtagcaaaacgaaaatag

SEQ ID NO: 242753 - DNA, 1935 bp, Klebsiella pneumoniae
atgaacactgccaatttaaaaaaaatagcccctcgggctcgtacagcatttatcacagcgatcaaagcacgcgctgctgaatttggaatcactgccaagggccatattgagccggtaattagcggtgaagttttgcaagttgctggatttacccatccagccagttgtgcctctgcccttaagcgcctgcaacaacagcttgcaaacgatagctatgagactttaatagagcatgtcgcatacacttggtttaaccgcttctgtgccatccgctttatggagctgaaaagcgaagagggatatttagaacacggtgtacgtctgctatcacacccttctcagccacagggttttgaagtgttggatcgcgcccctgaggtgatcgattccctgataacagaaggtgtggctttggataagcccgctctgttggacttgttactggcaggtaatgagcaggagactctcttccgtgagctacttctcggccaatgtcaccgactgcatcaggcaatgccatttttgtttgaagccattgatgatgaaacagaactcctgttgcctacaggccttacccgcactgatgccttctggcgcgaactggtagatgagatcccagaacttgactggcagcaagtagaggttatcggctggctttaccaattttacattagtgagaaaaaagagcaggtcattggtaaggtggtcaaatccgcagatattcctaccgctactcagctgttcacgcctaactggatagtacaatatctggtgcaaaactcggtgggacgttactggctgcaaacctatcctgagtccacactcaaaagcacgatgccctactatatcgaccaaggcgagcaggcttccgaggtagtggcacaactggctgaacttacaaccgccagcatcgaacctgaatcaatacgcgtactcgatccagcctgtgggtccggccatattctggtggaagcctataatgtgctctatcgaatttatgaagaacgcggttatcggagccgcgagatcccagtgctaatacttaagaataacctctttggactcgatatcgacgaccgcgctgcacagctggcgggttttgctttgctaatgcgtgcccgtcaggatgatcgtcgtctgttttctcgtaacaatggttgtgatatagacctgaatatttacgccctacaggaaagtcgacacctcaacattcagaaactttggcaagcacttaatctcaatgctgatgcgcagcatggccagactcaagatctacttacagtagcccaagctacagatgacccccgtctgacgcttctaaaagacctgcatcagcgttttcttaatgccaaaacactgggttccttaattagtatatctactgaacaagcctcagctattgaggagctctattccacgattcaggaactcagcaaaaatggcgataatatgcaacgacctgaatctaaaaaactattaccgctgctagcacaagctcgcctactagctaaacgctatgatgcggtgattgcaaatccaccgtacatgggcagtaaggggatgaatgcggatctgaaagagttcgctaagaagcagttccctaatagcaagtcagacctgtttgccatttttatcgaacgaaatctggatttaaccaaagagtcaggtgtggtagcgatgatcaccatgcaaagctggatgttcctttcttcatacgagtcattgcgtacccgaattttgaatcaacacactatcctgagtatgacccatcttggggcaagaggatttgatagtattggtggagaagtcgtctcaactactgcattcgtattaggaaattttcacctttcaagctatcagggcacttatctccgtttagtggatggaaactctgaagcagaaaaagcagccatgtttaaagcagctattgcttaa

SEQ ID NO: 242754 - DNA, 1755 bp, Klebsiella pneumoniae
atgtaccaaaccggtggcaccatcgaaacgctgctgaacaaagttgaacagcatgaatatattttgcctgcaatccagagagaatttgtctggcggccagatcaaatctgccagctgtttgactctctactacaaggctacccgtttggtaccttcctgttttggaaaattaaaactgagaatctgcgtcagtatcaattttatgattttatgcgtgactaccaccagcgtgatcaagtccactgtaaaaaactagatatcatcggtgaaaatgatcgcatcgcggttctagatggccagcagcgaatgacggcactaaacatcgggttacgcggttcctatagttggaaaactcagggtaaatggtggtccagtgcagacgcctttatcgaacgtcgcctctatctcaatctttttgaatgcacagaccctgacagcggaactcgttatgagttcgagttcttgagtgaggatgaggcaagccacaacgatgaccaacaccattggtttttagtctcccgtattctcggtatgaatgcctatgacgtaatgatgtcagtcatggaaatgaaaatgccagatgaacgcaaaccagcagcaggtaaagtgatttcccgttttcatgacatcattcacaataaacctttgatcagttactacctggaagaaggtcaggagctatccaaggttctcaatatctttatccgtatgaatagtggcggaacaacactctcctattcagatctactgctctccatcgccgtaacgcaatggagcacgctggatgcgcgtgatgagattcacaagctagtagatgaaatgaaccaaataggtaatggtttttcctttagcaaggacctggtgctcaaagctggtctgatgctgagtgatatcggcagcgttgggtttaaagtcgagaactttagcaaagagaacatgtgcaagctggaagataattgggaacgcatccgtaaagctttacttcttgcagtcaatttactcagcagtttcggcttcaacagttacaatctgggagcagacagtgccctactccccatagcctattacctctaccatcgagatctggataaccgctacctatcccgtagcgagtatgctgctgataggcaggggatcagaggttggctaattcgctctatccttaaacaatccggtatttggggaagtggtcttgatacgcttctggctagcttgcgaagcaagatcaaggaacatggtcagcaagagtttcctttgatagaaatatcgattgcaatgacagaacgtggcaagagcttacgctttgatgaagaagagctacagtcgttggttgaactcgactatggtaaccgtcgaacttttgccttgctatctctgctctttccgggacatgacttctcccatcacttccatgttgatcacatattccctagagcccgctttaccaaaagccaactgaaaaagatagggatgaccgatgaaacacagattgaagagtggatgatcatggctaaccggctacctaacctacagttgttagaagggggccagaacaatgaaaaacgtgagaagttaccgcatgaatggtacgaagtgatgtggccggagccagctgcccgtgccaatcatcttcacttacaggcaatcgactcacttccagagactttggctggatttgaggcgttctatcataagcgtcgtgaaatattattggcgcgtttacgtcacattcttagtgaacctcttacggcataa

SEQ ID NO: 242755 - DNA, 3723 bp, Klebsiella pneumoniae
atgatagagacggaatttttaatgcagataagagagctgtttaccaaacaactggatcgcccaatcaatggtgtggtgaaagccgagcagctggatgagcaaatcatctggactgagcttgacgagtacgtggtgacccgtgaacttgaccgccaccttcgtcacttttttgagacctacctgcctggtgtcagccatccagatgatcctagtgtggcgggtaaaattgggatttgggtatcgggttatttcggttccggtaaatctcactttataaagatcctctcttacctgctcggtaacaagaaagctgttaacaatggccagacaaaagctgccatcgagtttttcaaagagaaaatcagcgatccccttctttacagtgatatccacgctgcagttaaccgcaatactgaagtaattctctttaatatcgacagccgcgcagatactgaagacaaagaagatgccattctcaaagttttcttgcgcgtcttcaatgagcgcctgggatattgcgctgaccatcctcatatcgcacacctggaacgtgagttagattcccgtggccaatacgagccattcaaagcaaaatttgctgaactcacgggctcaagctgggaagaacagcgtgatgcctatggtttctgtcgtgatgaaatggcaaaagcctgggcctatgctaccggccagtcagatgcctcatcggtgcagagtatggaaaatctcgaatccatgtttactctcgacattgccaacttctgtaaatgggtgcgggagtatctcgatcgtagcgatccatctggcgacagtaaacgcatggtctttctggtagatgaggtcggacagtttatcggcaacaacacccagatgatgctcaaactgcagacgataacagaaaatatcggtaccgcttgtggaggcagagcttgggtaatcgtcacttcacaagaagatatcgatgccgtactaggagatcttagcgctaaaaaaggccaggacttctccaagatccaagggcgttttcacacaaggatttccctctcctcgtccaataccaatgaggtaatacagaaacgtctgctcgaaaaaagtgaagacgctaaaaactgcctggcagaattgttcagtcaaaaaggcgacattcttcgcaaccagttgacctttgataccagcactacagctgagcttgctaactacagtgataatgttgagtttgttgatcactaccctttcattccctatcagtatctgctggtacaaaaggtcttcgaagcaatccgcaaagtgggggctaccggtaaacatctctcccgtggtgaacgttctctgctggatgcattccagaatgccgcacgccagcagatgaacaaagatatcggtgtattggtgcctttccatgccttttatccggcaatcgaatctttcctcgataccaacgttaaacgcatcttcgaacaagcggctgagaaagcaagcctcgatccttacgacattaatattcttaaatcgctgtttttaatccgctatgtcgatctggtcaaatccaccattgataatctggtcacactttctattgaagaaatagataccgataaagtggcactgaaaagccgaatcgaagccagtctacagcgtcttgaaaaccagctattgattgtcagaaatggcgatgaatacgtattcctgactaacgaagaaaaagaagtcgagcaggagatcaaacacactcaggttgaagcaactgaagagaaccggcaactggcccggttggtgtttgaagaggtaatgggcaatcgccgtcagtatcgctatccggtaaacaagcaggattaccctctgactcgcttttgtaacggccactctatagacggcagccaacaaacagatctggtgctcaaagtcatttccccactggatgccaattttgacagttataacgaacaatcctacaaggcactgagccaagaagggaatggttgtattctggtacgcctgtcgagtgagaagcggatctgggctgaatttgatacttggttgaaaaccgagaaattcctggcagggatacgaggtaaacgacctgagcaagagaaattgctggcagaaaaagcactcgaaaacacccagcgtcgcagccgtctgaaattactattcgatgatctggtgaaacaagcacagatattcgcactcggtaatgagctgcaaagtaaatcggctagtgtcagcaatatgcttgatgaagcttgtgcctacgtaatcgaaaactcattccaaaagctctctttactacaaagctgtggtaacaacccggtgcaagagctgaagtcggtgatcatggccgatgacatggcacagctaaatgtaaatctcggtgaacaagaccccaatgctgctgcaaaaaaggagattgaactctttttaaatgtcgcagatgaaaaaaatcagccggtctaccttaaagaattgttagagcgattcagtgctcgtcccttcggctggaaccgtgacgaagtaatgctacaggtgactcatctggtcttgcttggtaaggctgcgctatctacaccgaatggtgatttgcccctcaaacgcagctacgaacattttacctcggtacgtagccacagcacactgcgtattcgtcgagtacgtcagcatacagaacagcaagtagctaaagcggctaaactggcgaaagatatttttaataaacccttcgagagcagcgaaaaagagctggcgaataagcttcttgacgtactaggcgagtggcagcggttaattaaagaatttgattttaaagctaaagatgggaattgccctggcaaaagcaccctgcttaccggcagtcgattgatcgccagcctgcttgagctgggcaacaacagttatgccctaatcgatggactctgccagcagagcaacgaatggcaggattttgccgaagattttgaagaagtcgaggagtttttcactcgtcagtttgatatctggcaacagttgcgtcgagccctcaacgatcaattcaaatccaatcgccatgcactggagcaaaacccagaagcggctaaagcattatctgcactgcaggctatctacgatgataaatccccgtatagcaaactgcgccaggtgggatcgttaattgatcaactcatcgccattaacctgcaactggtagaacaaaaacgtaccgcagctttggaggcgatcaatgcaacccagcaaggtgttgcaccgctggttactgacttaccagctgagttacaaaaccaggcaatgcgtccctttaatctgttaaaagaacgggtcagtaacagcttatccttacatgagattgttagcctgcaacaagaggctgatgatgaagaagataaggtcttagaactgatcaaccgctacagcgccgaacttcaagctcgtctggaagcggagcaagccgcagcacggaaaaaagcggctgaaccgcctaatagcgatgctggtactttgcgagaaccggatccatcagactcgccaactactattgcgaataactctgctgcgacagtggttagccacaaaccaatacctaaacctatcgaactggtttcacccgcagaattactcggtgccagccatatctttatagaaacggagcatgatatcgacacctatctcgcgacacttcgcagccgtttacaacaggcaataggtcagggtaaacgagtgcggatcaaatag

SEQ ID NO: 242756 - DNA, 615 bp, Klebsiella pneumoniae
atgagagcgaaactggacagtaagccgcaattgtcagctcgtctggaacaaatcgaagaccggcttaaaagtgaaggcttcctgaagaaccaagagctcggtggtgagatcggtttttatatctttgattacccacctcaatttgaacttaccgtacgggaatatctgagattgactctgcctcgcctagctcggcaggggctgaatttcgctcatctcaatctgttcgaagaggtactggcaattttgcaagagcgtaaattgttagataaagcttttgatctggaacgcaaaaaaggtaccgatgagctagccaaagcacttaaaggacctcttgaacaaggtcgaattgctaagcatctgatagataaagtgcttccggcctcgcctcaatttgtattgttatcaggtcttggccaatgctggccattgctacgtggtcatagtttgcttaatgcattacatgcccatatgggggcgataccattggtattgttttatccgggcagttacaacggcctcgaactttatccttttgatctggacagcgcagaagtggcaacagccaactactaccgagctttccaactggtgcctcacgcatctaagtactga

SEQ ID NO: 242757 - DNA, 600 bp, Klebsiella pneumoniae
atgaccgccaaagaatatctgggtgacatcattggtggcagcctgatgttgcgtgagagcagagtcatcgcggagctgctgatatcctcaccaaatgatgatcaatggcataatgctattgtaaatgacaatgtgctgcagaagacctcagtgcacagtgttaaacgcatggcttcaaccctgcgtaaaagaattcaaccgatgggtgaggcattctggactgagctactaaaggcccctgatgatgcagccagacaaatgttgctaatggcgacaatgtgccaatccccagtgctgaccgatttcatggcaacgacactgtctgatgcccgacagatgtttcgtgaatcattgcgcagcgaagactggcaggaatttattctatcccgccagcgtgccattgtcggcttggatcaatattccgaaagctcaatccagaaaatgggcaacaatgtatttaaaatcctcgcagatagcgggtatctggaatcaggccgcagtaaaaagctgaaaaatgtcttcctactaccccagataagagagtgggcaaacagtctcgactgccaaaaagtctacgatgtgatggagtcagtcagatga

SEQ ID NO: 242758 - DNA, 864 bp, Klebsiella pneumoniae
atgaaaaaatctgaaggttttcagtcgttgcagcaatcgctttctggcctgccgcagtgggcttcagagcgtattctacagcagatacaacaacttactcactacgaaccggtgatcggcattatgggcaaaactggctcgggcaagagcagcctatgcaatgccctgtttgccggtgaagtttcgccggtcagtgatgtagcggcctgcacacgcgaacccttgcgctttcgcctgcagctgggaaagcgctatatgaccatcgtggatctgcccggtgtgggcgaaagtagcgttcgcgataacgagtatgccgcgctgtattgtcaacagcttccccggctcgacctggtgttgtggttgatcaaggccgatgaccgggcactggcggtggatgagcatttttatcatcaggtgattggcggggcataccggcaaaaggtgctgtttgttattagccaggcagataaggtcgaaccaggcagcggtggtgaaaagctgtccacagagcagaaacaaaacatcagccgcaaaatctgtctgctgcatgagctgttccaacctgtaaaccctgtctgtgcggtatcggtacgtttgcagtgggggctgcgggtgatggctgaacggatgattcgttgcctgccacgagaggccagtagtccggtggctgtacaacttagtgctccacttcgtaccgatgccgttaataaaaaagcccgtgacgattttggtgaaacggtcggctcggtactggatacagtaagttccctgcccctgataccggcctcagttcggacagtcatccagtctgtacgcgacatcgtggtatcagtcgctcgtgcagtctggagttttttcttctga

SEQ ID NO: 242759 - DNA, 459 bp, Klebsiella pneumoniae
atgacgacacaaactcaatgcgaattgatatccgctaatgaacctcaatttgcccttactgcaacaccagtacctgacgaacagcgtctcgatttctggccgcagcactttggctacgtcccgcagtggataacgctggaaccccgtattttcgcctggatggaccgcttctgtgatgagtacagcggcggtatctggtccttttacacactcagtaatggcggcgcgtttatggcacctgatgctgacagtgacgataaatggcatctgttcaacggcatgagcggcaatagtgcgcaaatgagcgcggaagccgccggtatcgcggtctgcctgattgaatacagccatcacgcctgccgtacagagtgtgacgcaatgaccgcgcactattaccgcctgcgggactatgccctgcagcatcctgaagctcaggccattctgcgcatcatcgactga

SEQ ID NO: 242760 - DNA, 513 bp, Klebsiella pneumoniae
atgcgggatattcagtatttcgccatcaatatcgatagtggcggtggtgtaatattcgcccgcgcctttagaggtcggaatgccggatggcgacgtgacaaagagtttaataatattgcctggcttcgggaacgtgtactgctcgctgtacgtttcgcgggcctcaacagaaatcgcatcaggatcgaaaccgtccagcggcaccagtgccccggccagcatggacaggttataaagattattaagcaggcgttgcgaagtgtcagaatcgccatcgtcactgctgcctggttcgaacccttccagcggtgtcaacgcgctgcccagcgtggaaactgccatcaacgcattcagttgcagcccctgcaccgcctccggcaatccccccagctcattcacggcgcacgaaagcacctgctgcgagacatgcagattcaggaccgcgtcgcggacagactgactgtcaccatccagcccgcccaatgcttccgcgataatgtggcaggacagtaa

SEQ ID NO: 242761 - DNA, 675 bp, Klebsiella pneumoniae
atgaataacacgcttcttcctccctctgccagcgcgtggatgcgttgcgccgaagctgccacggcgaagctgtccggaatcacggtagccattcgcacgctgtggacgccgacggcatgcccggttgatttattgccgtatctggcgtgggcgctgtcggttgatcggtgggataagaactggccggcagagaaaaaaatagcgtcaatccagcaatcctactggcttcatcgccggaagggtacgcgcgcagccgtgcggcgagtgatcgaagatatgggtttttccgccacgtttgcggaatggttcgatgtcggagatgagccgggcacgttccggcttgagattgatgtaaatgaagttggccttacaccaaaaacactggatgaactgaatcgcctggtaggagatgccaagccggttagtcggcatatgtcaacgatgacaattgcaacccataccagggggaatgcatgggtaggcgcagcgaattttgatggtgaggtgataacagtatatccggcgggatatataccggatgacagtctttattacgacggttccgcactttatgacggaaatcattatttcaaccagccagaaaataaaccggccgaaaccattcattacgacggccgggcgcattatgacggcagccattattacggggagtaa

SEQ ID NO: 242762 - DNA, 300 bp, Klebsiella pneumoniae
gtgaaaatatcaaaactgaactggccggcgatccctgtgctgctgctcttgtgcctgacgctgtcgctgaccgcctgtaccagcgcgcagccgaagttggcgccggtgatcattcaggagcctttgccagaaagcctgacggcaaaaactgaaacgccagcgccaccgcccagaccgatgcgctacgggagccttgtgctctggtctgatgcgctgcttgatgcgctggatacctgcaacgccgataaggcgggcattcaggagctggaactgcggcgaatagcccgggggatgaaatga

SEQ ID NO: 242763 - DNA, 780 bp, Klebsiella pneumoniae
atgggaagtatgaaagaactgctgtttgaaatgcaggaggaacggcgtgacgaatggattgcggaaaattatccggatgctgaggaaggaactcctgaatgggatgcggcagcgcaggaatacagctggtttcaggactggatggaagaggcggctgagcagcaatattttgaggcttcgcttgccagtattcctgaccgcctgcaggatgcaaaggctgaactggatgagttagagagcctgatgcagttcaaccaacccaggatcgtagagcggatggcttatgttcattgcgtgagtgtactggacagctttctgatgtacagcgccagagcacttcttagtcatcccccgcatttacagaagttcctgcacgaggctgattcgttggttcctaataaggaagacagaagaaaattacttgcttccaaatgggtcgagcaggagccggataaagacactcctgagaaggtttatacctggcgagctcagtctcttgtagcgaagaagacatttcagagccacaaagtgataggtcggtatttttcaaggatgctgacaacgccacatgagtggccattggaggagattaagggggtaatcaagacccgaaacgcactggtacaccgtaatggagttaccgaatctcttgaacccgtgtatatcagttcggggagtgtgcagaatgctatctgcacggtacgagcatttattaccgtggcggctgaaacccttctgcaggaagatgcactatacaggacggatgatggcatattctga

SEQ ID NO: 242764 - DNA, 465 bp, Klebsiella pneumoniae; identical to SEQ ID NO: 104947

SEQ ID NO: 242765 - DNA, 2262 bp, Klebsiella pneumoniae; identical to SEQ ID NO: 127370

SEQ ID NO: 242766 - DNA, 585 bp, Klebsiella pneumoniae
atgatgccgctgctcgataccctccgcgtaagtcacggagtcggaccggtatgccatgagctggatatcgccccgtcgacatactaccggtaccagaaccaacgtcagcatccggaaaaacgcagtcagcgtgaccggcgtgatgaccagctgaagctggaggtacagcgcgtgtacgacgaaaactacagtgtctatggagttcgtaaggtctggcaccagctgcaacgggaaagcttcagcgtggtcagatgcaccatcgcgcgactgatgaaaagcatggggcttaccggcgtgcggcgggaaaaaagtacgaaccatggtcagcaggaaagaagctgcggcaggcggccgggtaaaccgtcagttcgtggcagagcgtcccaatcagctgtgggtagcagacttcacgtacgtgagtacttggcaggggttcgcgtatgtagcgttcatcatcgatgtgtttgccggcggcatcgtgggttggcgagtgtcgtcatcgatggaaaccacgttcgtgctggatgcgctggagcaggcgctgtgggcccgtcgcccttccggcaccatccatcactcggataa

SEQ ID NO: 242767 - DNA, 261 bp, Klebsiella pneumoniae; identical to SEQ ID NO: 101356

SEQ ID NO: 242768 - DNA, 270 bp, Klebsiella pneumoniae; identical to SEQ ID NO: 151686

SEQ ID NO: 242769 - DNA, 348 bp, Klebsiella pneumoniae; identical to SEQ ID NO: 121386

SEQ ID NO: 242770 - DNA, 312 bp, Klebsiella pneumoniae
atgaagagggaagagattacagcgattatagaaaagaattcaacccaaaacctacaagagatccagagtttgttagagaaaaactcacagagcttaaaagaacatttgcagaaagaattgaaaaacgagaaatcagaaatagatcaaagtttaaaaaaccatcgttcaaaaatatatcagaaaatagacaaagtattcaaagagaagatcaagatattggatataaatatactaacggcgattttatcaatgttagtaataacgatggtttttcaagtatgtatattcgcactgataatatggagattgtaa

SEQ ID NO: 242771 - DNA, 906 bp, Klebsiella pneumoniae
atgcaggatctcaatgacttcgcctggtttgtccaggtggtagaccatggcggtttcgccgcggctgggcgagcgcttgaccagccgaaatccaaactcagccgtcgcattgcgcaactcgaggagcggttgggcgtgcgtttgattcagcgaaccacccgtcagttcgcggtcaccgaggtcgggcagaccttttatcagcattgcaaagcgatgctgattgaggccgaggcggcgcagcaggcggtcgagacgctgcgcgccgagccgcgcggtagcgtcaggatcacctgtccggtcaccttgctgcatgtccatatcggaccgatgctggcgcgatttatggcgcgctatcctggggtaacgctgcatcttgaggcgaccaaccgccgggtggatgtggtcggggagggcgttgatgtggcgatccgcgtccgtccccggcccatcgaggatagcgacctggtgatgcgcgtgctggcggaccgcgggcaccggctggtagccagcccggatctcatttcccggctcggacgtccgcaggcgccgtccgagctgagcgcctggccgggcctcagcctgggtgcgaacaagcatcagcataaatggcagctcaccgggcccgggggagcgagagcggaagtgtatttcacgccgcgaatggtgaccaccgatatgctggcgctgcgcgaggcggcgatggccggcgtaggcgtggtgcagcttcctttattaatggtgcgcgatcagctggcgtcaggtgaattagaggtggttctggacgagtggcagccgcggcgggaagtgatccatgcggtatttgcctcacggcgcgggctgctgccctccgtcagggcgctggtggactacctcagcgaagagtatcagcggatggaggaggattag

SEQ ID NO: 242772 - DNA, 645 bp, Klebsiella pneumoniae
atgtcattactgaatgacagaaggagtcatgcaagccgtgaaggtgttgaagctatagccaggatcgtgtcccgcctgaccctcgcgccggtctttgacatcataaacctctctaaagaacctatcagattcactatgcagactttacctcagaatagtattttctctgaggatttggactttcttagagatactttcacttattttcaaatcaccccggaatcaattgaaaaacatattaatctccctcaaggagggcgggggaaatacaaagcagatttgagaattgatttatttattatcaaaaaaaactgtcaccttaacctagcgactactttttttgaatatgatggcgcgcatcactttatagaaagcagtgtgcgcaatgataagtatcgtgactcatctttagccagcatgggcgctcccacatttcgcatgcaacatattgaaaaaaaaggaattgaaaaagaaaagtataaacaaaagttcaattctctttgcgaacaccatgcgaaaaacattattgagaatttcaggaagaaaatatacgaccacttcaatcctacctaccttatttacgacgataacggtgtgcctagtcaaataaatttcaaattagatttaagctttctgaacaaataa

SEQ ID NO: 242773 - DNA, 1359 bp, Klebsiella pneumoniae
atgttggtgactatgacagacaaagaactttaccggcttggcatcattcagcgagtatttgaccgggctttgcttcagcgcgacgcagcagacatacttaagctcagtgttcgtcaggtgcagcgtcttgtgcgtctgtaccggacagatggcgcaaccgcatttgcatcttcccgccgtggacgtcctgcaaacaaccggatcgatgaagaaacacgctgtaaagccctggatttgatccggtgccactattcagattttggcccaacgctcgcaaccgaaaaactggctgaacgccatcatatatatctctccgttgaaaccatccgtaactggatgacagccgacggtctctggcgtcctcattcccgccggcgaacccgggtttaccagccgcgctatcgtcgcgactgtttcggcgaactggttcagatcgatggctctcaccatgactggttcgaaggaatagccccaaaatgctgtcttctggtcttcatggatgacgccacaggtcgcctgatgcacctgcgattctgtgattcagaaaacgcgtttgactacatgatggctacccggcaatacattgataaacatggtaaacctgtcgcattttacagcgacaagcatgcggtgttcagggtcagcggacccgagagccgacgtaccggcacaacccagttcggacgggctctccgggaactggcgatcgaattgatttgtgccaacagcagccaggcaaaaggtcgcgtggaacgggtaaataaaacgctccaggatcgcctgattaaagagatgcgcctgcagaacatcagctcggttgctgaagccaatcagtggattgaacatttcatgtctgattttaaccgtcgtttctcccggccggcaaaataccctaaagatctgcaccgtccggtcacacagagtccactggagctgaatgatatcttcgcctggcaggagctgcggaccttatcgaaagcactgacttttcagtatgataaagtcatgtatatcattgaacccaccgaacaaaatacgcgcatagcaggtgaaaaaattaccgtttatgattaccctgacggaagcattactttccggcatcagcaccggccactgggttataagattttcgataaactgacctgcgttgatcagggggcggttgttgataacaaacgactgggtgccgttctgaggctggcacagcagaaacaggacgagctggaggctgaaggaaagcgaatgcgcagtacaaaaatgccccgcaggcgcgctcaggagcgtgcactggaagagctcagggcgatcaacccggtgctggccagtccgcaggattttatccccagcctgaagcgatga

SEQ ID NO: 242774 - DNA, 702 bp, Klebsiella pneumoniae
atgtccagattcattctcgggaactgtattgatgtgatgcgcggattccccgaccgtgccgtggaccttattgtgaccgatccgccttacgtagttggttttaaggaccgtcagggcagacagattgccggggatgtgacggacgaatggctgcaaccggccacgctggagatgtatcgcgtcctcaaaaaagacgcgctgatggtgagtttctacggctggaaccgggtggaccgctttatggctgcgtggaaggcggcaggattctatgccgtgggccagcttgtgttcaccaaaaactatgcctccaaccgtcgtaacgccagggcccgacgcggatttgtggactactgccatgaaggggcttatgtccttgccaaaggccgccccgtgccgccccttaaaccgctgccggatgtgctgcccttcccgtataccggtaatgccctgcatccgacgcagaaaccggtggaggcgctacagccgctgattgagtcattcagcgccccgggcgcgattgttctcgacccgtttgccggaagcggttcgacctgcgtcgctgcataccgcgccggacgccgctatatcggcatcgaaatgctggcgcagtaccaccgggccggaaccgaacgactggccgccatgcaccgggccgtcaatacccccgcgtcgaacgatgaatggctcccggaggccgcgtaa

SEQ ID NO: 242775 - DNA, 222 bp, Klebsiella pneumoniae
atgaattacgacggacacgaagccctgcgccgcgatatggccgggctggcgaacaatctttgcgacctgaaaaccaccctgaaagtgctggaagacacgtaccactaccggtacgacggactggcggaacggcttgccggtatcagtctgcgacgtctcagcgtcctgatggatgaggcgttcaatattgccctgatgctcgatgaaagctttctggactga

SEQ ID NO: 242776 - DNA, 429 bp, Klebsiella pneumoniae
gtgaagggattattctatttcgtgcgtaatccccagagtacatataccgaatggggctgggaaatctggccgcaggggctaactgacggcattatgatgattaaggcgcgctatggcgatattccgatatatatcaccgagaatggcctcggcgcgaaggacccgattattgacggggaagtggtcgacgacccgcggattgattatctcagcagccatattggcgccctcgaaaaagcgctggcgctgggggcagatgtgcgcggctattacccctggtcatttatcgatctgctgagctggctcaacggctatcaaaagcaatatggttttgtctatgtcgatcaccagcaaaatctggcgcggaaacgaaagaagagtttttattggtacaaatctgttattgccagtcacggcgaacagcgttaa

SEQ ID NO: 242777 - DNA, 2490 bp, Klebsiella pneumoniae
gtgttgtgcaatggattcttgatgaacatatggcaaatagaaatggaaagatcaccttattcaaatacgttattgtttaatcgcaacacgaaactctcgctatcaatcggcttgcttttgctcttcccggcgctggttcagggagcggattcactctatgaccagcaaatcttgcaagcgcgccaaggtcagtacgccccctttctcagttaccttcagcagtaccagctgcggcatgccttaaccccttctcaggtggcggactggctgcaggtggccctctgggccggtcaggacgatgaagtggtgaaagtctggcgacgctaccaggtctatatgccgcttcccgcacggggcaccgccgccgcggcgcaggccctgcgcaaccagaagcagtggcaaacctcgctcaccctctggcagcaggcgctcagccaggcccctggcagcgacgactatcgtatcggctatatcaaaacgctcgccgatgcccgcaaggacggcgaggcgctcagcgaagctcgtcgcctggtggcggagcaggcgagcgttgcgcacctgcagacgctctcctatgtctacctgcggctgggcaaaagctgggaccagctgttggtggacacgcagatcctcgatcgtgatccgcaaaacaaaaccgcgctggccagcctgatggcgaccctgacccgcaaccggattgattcccctgctctcggcctggcgaatagcgtcgaactgacgcctgcggaaaagcgtaacttgcagttgaacgccgccgccgaactggtgcgccttgccgataccccttcccgcgaagaaaaggcgcgttacgcgctggcccgcacggcgctcacgcagtatgacgcgatgatcgccgcctggcaccccgacccacaggctacgcccgacatcatccgggcgcgtattgatcgtctgggcgcgctgtacgccagcgccgagtacgcgcaggtcatccgcgaataccaaagcctgatcgcccagcagcagaccgttcccgactgggccatcggctgggtcatctcctcttttatcgcccttaagcaaattgagcctgcgctgacgcttatccaccagcatccttcgtggctgacaagccaacagaatgaggaacacgagcttttctacgctctgctggacaccggtcagtacccggcggcgcaacggtatgtcgcccgcctcaccaggaatgcgccctacatccgtcgtctctacggctcgccaacgccgcagccgaacgacgactggctcaccgcacagtcgcttaacgtgcactatttagcggctaccaacgacctgccgcaggccgaagcccgaatgcagcgcctggcggcgacggcccctggaaaccagggcctgcagatagactatgccgcccttctgcaggagagaggattgccacgggcagccgaacgccagctaaaagcggcggaatctctggaacccgccagcctgcagctggagcgccagcaggcctgggtcgccctcgatctgcaggagtggcggcaaatggatctgctgactgacgacgtcgtcgcccgctcgccacaggatctgaacacccagcgcctggccagagcgcgcgagatccattatctctccgagctgcgcctgagcgttggcaaagggctgcattccgacaacccggtgagcggcacgcacgacctcagttttgagacggcgatctacagcccgccgctagccgacagctggcggttgttcggcgggcaccgcttcgctgaaggcaattttgaagaggggaaaggcagccgtcgccagctgtttgccggtattgaatggcgtccgcgcgactactggggcgagcttgagctctccagcgtcaattttcacggcgagaacaagcccggcgtccgcctttccgccgcccatgacgttagcgatcgctggcagctgggcggcgaactggagcggatttcgcagcagacgccgctgcgcgcgttacgcaacggcgtcagcgccaaccgcggcgaaggctggctgcgctggtctccaaacgaacgccgggagtaccgcgtcagcgcggccgccagccggtttaccgatcgcaaccgccgccatgagtacaccctctccggtaaagaacgcctctggcaaaccccatggttaacgctggatttgcagcccggtctgtcggccagcgccaatagccgcaccgacaccgcctactacagtccggcacgggacctcgccgccaccgcggcgctggccgtcgatcacacgctttaccagcgctatgacaccgtctggagccagcagttactcgccggcggcggcagctactggcaaaaaaatcacgccgccggggcgatcacggtgctgggttacgggcagcgcctgcgctggaacaacgtcgtcgacaccggggtgatgctgaactgggataagcgcccctacgacggcaaacgtgaaaacaacctcgccatcactcttgatgcaaatatacggttttaa

SEQ ID NO: 242778 - DNA, 264 bp, Klebsiella pneumoniae
atggcagatgaagatcaccctacaagccactattttcaaaagagattatcacaattgaaagtttgggagttttgtttaactttcatggctaacggagtgaaaagttttgcgcggttgtcgacggcatattttgtgtatcgtataagcccctatttaccagtgcaaaaaagaaaacccgccgaagcgggttttctcatgctgccttaccatttctctctgtcaactttggcaaaattgaaagtagaaggctatccagttgtatag

SEQ ID NO: 242779 - DNA, 294 bp, Klebsiella pneumoniae
atgatcaccggcgccaacttcggctgcgcgctggtacaggcggtcagcgacagcgtcaggcacaagagcagcagcacagggatcgccggccagttcagttttgatattttcacgacgtttctccccggcttcgttacgcttttgccccagcgctttcacactggcttcaatctcgctgacgtcctggcgaagcgcccgcacttcggccagtacatcgctggtctggttcagtttttgggtagcgtctgccagcgctttttctgcgccctctcgcttgttggtttctatggttaa

SEQ ID NO: 242780 - DNA, 897 bp, Klebsiella pneumoniae
atgaccttatcggattcaatcagtgccatttcttcgccgggatcgggggatggtcgcttgccctgcgtcgcgcaggatggcccgacagtcgccctgcatggacagcatcatgcccctgccaacctttcagcgcggcaggcaaaggccttgggtttgctgacgagcggcacctatggccctccgcacattggcttgtcggccagcgccgccctgtcgtggtctttggcgagcaatctggcagcgctgacgcgaacgactggatcgaccttgtacaagctgacgtggaagccctgggctatgccttcggggcggttgcgtttccgtctgcgagcgtcggcgcgccgcaccagagagaccgtgcttattgggtggccgacgccgattgccagcaatgggaggggcgcggggaatttcaaccgacagggggggggtaaaccttcagacagcggcgttattagcgggttggcccactccgacggcaacggacgggaagggcggttatcagggcggacggatccgcaacgggaggttatcaacggacaggctggatgtggctgcgcaattagcgggctggccgacgccaaccacgagcaacgatcgttcaccatgcccgcaagaagctatgcggacgcatcgcgacaatggaacaaagattcagaagcggctgcaggatgtagctgcattatgcggcccggcccggttaacggcttctggagagatgctgattggctccacggccaggatggatggtggaggccagttagacccggatcattcccgttggctaatggggttcccgccagagtgggaagagtgcgcacctacggaaacgccatcaacattgaagcggcggctgcgttcataaagtcatatatggcggcggtggatcatgtctga

SEQ ID NO: 242781 - DNA, 1764 bp, Klebsiella pneumoniae
atggacgatttaaccctgcgatattttgacgctgaaatgcgctacctgcgcgaggcggcaaaagcgttcgcgcaggctcaccccgatcgggcggcgatgctggatctcgataaagccggtacgccggacccttatgtagagcgcctgtttgaaggctttgccttttccgtaggtcgcttgcgcgaaaaaattgatgatgatctgccggagctgaccgaggggctggtcagcatgctgtggccgcactatttgcgcaccattccgtcgttatcgatcgtggcgctgaccccaacgctgccggcgatgaagatagcggaaacggtgcccgccgggtttgagattagctcacgcccactggggccgaaaaataccgtgtgccggtaccgaaccacccgcgatctgacgcttaacccgctggcgatagaggaggcggtgatgacggcggagccggacggacgttcggccctgcgactacgattcgcctgtagcgagctggcggactggtcgcagaccgatctccgccacctggcgctgtacctgggggaagacgctgttaccggcagcgccctccatctgtggctgacccgacgccaggccgcgctgtacctgcgtctgccgggtcagacagagcgggtaagcctcgatggctatttttccccggggggattcagcgaggaggatcgtttatggccgaagggggagagtgctttcagcggctatcagctgctgctcgagtatttcacctttcgcgaaaaatttatgttcgtgcagctaaatggcctggaaaacatcaccctgccggcggggatatcgcatttcacgcttgaggtggtgttcagcgaggtctggcaaagtgatttacccgtcagcgcaagcagcctgcgcctgcactgtgtgccggtgattaacctgtttacccttgaggccgatccgttgaccatcagcgggctggagagcgaatacctcctgcgtccgaagcgcctgcaggacgggcataccgagatctattctgtcgacagcgttaccggctccgggcgcaccggggaggcacgctatgtgcctttcacccgctttcgtcaccaggggggcatgatgcgtcgccatgcgccggagcgctactaccacacccgcgtaaaacggggcgtaaccggcatgcacgatacctggcttatcctcggcggacagcaatgggaggctgaccgggagctggcgcgggaaacggtctccttgcgcatcaccggcactaacggccagctgccgcgccgggcgctacagagcacgctgctggatcgctgtgagtcgatatcagccacgccgcttaccgtccgcaatctctgtaagcccacgctgccggcctatcccccggcggaagaccgctaccactggcgggtcatgagccatctgggcacccgttttctcaacatgatgagcagcgccgaggtgctgcgcggcacgctgtcgctctacaactggcgggaggatgagcttaataatcgccgtctggacgccattctggcggtcagccatcaccgaattcagcgtttcgagcagggcttcctgctgcgcgggctggatatcgaagtgacgctcgacggtagcggatttaccggtgcgggcgatgtccacctgtttggcgacatgctcaaccgctttttcgcactgtatgccgatatgaatcagttcaaccagctgacgctcattgttcaacctgaagggaaatgtatccggtggaaagagaatcacagtctgcgcctgcccggctga

SEQ ID NO: 242782 - DNA, 246 bp, Klebsiella pneumoniae
atgagcctgattattgtcagcaatgatttatcggaagaagtacacctggtgacggtggcgaatggtgcggccacggcaacggagcgactgagcggggccagcgtatcagctgaggaaatggaaaccctgtttcccggattcgccgacgcaattaccgcggcccaggatactgccgaactactggggatgctgggatcactgaatgagagttttatctgggcgcaggtgtctggctccttacagtaa

SEQ ID NO: 242783 - DNA, 546 bp, Klebsiella pneumoniae
atgctgacaccagatgtccgtctgtgcggtgccaccggtgagctgcatatttttgaaaacaataatgctgctgcgggggcggtcgatttgtcagccacttcgtcagcctggaaagcggtcaacgcagtcaccggcgagttaatggagctgtcatatacgggcacaccacgcgtggattttgtttcgaatctgacgaacagcgtgaggatactcaatgcgtcagcggtgggtactaactacacgctcaccgccactgacggcgctccgttttcatccatggccaatgctggcgcgatcccggtttcagcaacggcactgacggtactgaaaaagtacggtctttatccgctggtagccaatgccgccacgctgggcagcgacaaaattgtgatttccgccacccccgcagcagctgcgaccgaacgcatgttgcgtcgccagggttcctatgtggatggtccggctgccggtgtctggatggctggttttaacggtgttcgtgctgcggtcggagcatcggcgtttcgtgtggcgtattacgcataa

SEQ ID NO: 242784 - DNA, 417 bp, Klebsiella pneumoniae
atgactctgatgactctgacggtactgatgactctgacggctctgatgactctgacggctctgatgactctgacggctctgatgactctgatgactctgatgactctgatgactctgatgactctgatgactctgatgactctgatgactctgatgactctgatgactctgacggctctgacggctctgatgactctgacggctctgatgactctgatggctctgatggttctgatggctctgatggctctgatggctctgatggctctgatggctctgatggctctgatggctctgatggctctgatggctctgatggctctgatggctctgacggttctgatggctctgatgaccctgacggctctgacggttctgatggctctgatgactctgacgtctctgatggttctgtaa

SEQ ID NO: 242785 - DNA, 1539 bp, Klebsiella pneumoniae
atgagcagctcacttcctgacgatatcaatgcactgaaacgtctccttgccgaacaggaggcgctgaaccgtgccctgctggaaaagctgaacgagcgtgaacgcgaaatagaccatctgcaggcacagctggataagctgcgccggatgaacttcggcagccgctccgaaaaagtctcccgtcgtatcgcacagatggaagctgacctgaaggcacttcagaaagaaagtgatacccttaccggtcgggttgacgacccggccgtgcagcgcccgctgcgtcaaacccgcacccgcaaaccgttccccgaatcactcccccgcgatgaaaaacgactgctgccggcagcgtcatgctgcccggaatgtggaggctcgctgagctatctgggtgaggatgccgccgaacagctggagctgatgcgcaacgccttccgggttatccggactgtacgtgaaaagcatgcctgtactcagtgcgatgccatcgtgcaggcccccgcgccttcacggcccatcgagcggggtatcgcaggaccggggctgctggcccgcgtgctgatctcaaagtatgcagagcacaccccgctgtaccgccagtctgaaatatacggccgccagggcgtggagctgagtcgttcactgctgtcgggctgggtggatgcatgctgccggctactgtcaccgctggaagaagcgcttcaggactatgtgctgactgacggtaagctccatgctgatgacacgcctgtcccggtgctgttgccaggcaataagaaaacgaagaccgggcggttatggacctacgttcgtgacgaccgtaacgccgggtcaacgctggcgccggcggtgtggttcgcttacagcccggacagaaaaggcatccatccgcagacccatcttgcggggttcagtggtgtactgcaggcggatgcatacgctgggttcaacgagctgtaccgggatggtcggataacggaagccgcctgttgggctcacgcccgccgtaaaatccacgatgtgcacgttcgcaccccgtcagccctgacggaggaagcgctgaaacggatcggcgaactgtacgccatcgaggcagagataaggggaatgacggcggagcagcgccttgccgaacgtcagttgaaaacgaaaccgctgctgaaatccctggaaagctggctgcgtgaaaagatgaaaaccctgtcgcgacactcagaactggcgaaagcgttcgcatacgccctgaaccagtggccggcgctgacgtactatgcagatgatggctgggctgaggcggacaataacatcgctgaaaatgcgctgcggatggtcagtctgggccgcaaaaactacctgttcttcggttcggatcatggaggagagcggggagcgctgctgtacagcctgatcgggacgtgcaaactgaacggagtggagccagaaagctacctccgctatgtccttgacgtcatagccgactggccgataaaccgggtcggcgaactgctcccctggcgcgtagcactgccgactgaataa

SEQ ID NO: 242786 - DNA, 543 bp, Klebsiella pneumoniae; identical to SEQ ID NO: 189849

SEQ ID NO: 242787 - DNA, 1098 bp, Klebsiella pneumoniae
gtgcatcagcaggaagttctgcccgtccgcttccagacccaccttgttcgacacccgcgccgccatcggcaccgccgacacccccgccgagccgatcagcgggttgattttgtgccggctgaacacgttcatcagcttcgccatcagcaccccggcggcggtccccacgcagaaggcgatcacccccagcaccaggatccccagcgtctgcggctgcaggaacttgtccgccaccagcttggcccccaccgacagcccgaggaagatggtgacgatgttgatcagcgcgttctgcaccgtatcgctcagccgctccaccacgccgctctcgcgcatcaggttgccgaagcagaacatccccagcagcggcgcggcgtccggcagcaggagcgccaccagcagcaacagcaccgccgggaagaggatcttctcccgcttactcaccgtgcgcagctgcaccatacggatcttccgctccttatccgtggtcagcgccttcatgatcggcggctggatcagcggcaccagcgccatataggagtacgccgccaccgcgatggcccccagcagctccggcgccagcttgcccgacaggtaaatcgccgtcgggccgtcggcgccgccgatgatgccgatggccgccgcctgcggcagggtgaagctgatgatgccgaagtagttcagcgtcagcgccccgagcacggtggcgaagatcccgaactgcgccgccgcccccagcagcagggtgcgcgggttagccagcagcgggccgaaatcggtcatcgctccgacgcccataaagatgaccagcggcgcgatgcccgagccaatcgccaccttatagaagatggccagcaccccggcggagtagcccatgtccaccgcgaggctctccatctgcccctgcaccgacggcagggccagggccagcgccgccttaatggcgtggacgtccggcgcgcagtggagcttcgcggcaatcaccgccagctgcgccgggtcgtggtgggccagcaggctctccagggcggtgagcgccagcccggcctccggaatattggagagcaggccgccgaagccaatcggcagcagcagtaa

SEQ ID NO: 242788 - DNA, 330 bp, Klebsiella pneumoniae
ttgcattacaacggcacgcagattagttatgccgctgattcagcaccgaaaaccgacggcggtgcgttctggaaaaaaatactggtcacgtatgctgacgagctggccgcccgttacgccgaactccgcgataaagatattttcagcgtgaattgcctctatgacattgccgccggactgtccgcgaaatatacccacgaactggataaagcggaaatcaataaatggccgacgaaaccgtcgctaaccgtcacgagtcgcgatcagatattcggctggtttaacgaccgtctggcgtatctcgacaataaatttaattacacccgataa

SEQ ID NO: 242789 - DNA, 297 bp, Klebsiella pneumoniae
atggacaggcggatcggtgactggcgcttgctggccgatgagtatgatcatgacaactggctggacgaagacgagaccgacaggctggataaggtcctcgatgccattctgattcgcgatgcgcgattctgcccggttctgctcaccctggttaacgagcgggaggaaactatcaggagcgcaggggttatcactgatcagctgcgttttacggacactccggtccggcgctggtttgatcgccgggttttaagggttgtggtgagagaggcccgcgacatcagaactcaggactga

SEQ ID NO: 242790 - DNA, 345 bp, Klebsiella pneumoniae
gtggaggtggaaggcaaagcctttgtggtcaaagtcagcgacggcggtgacgtcagccagctgacggcggctgctccggctcctgctcctgctcctgcctctgcacccgccgctgccgccccggccggcgccggtaccccggtgaccgccccgctggcgggcactatctggaaggtgctggccagcgaaggccagacggtggccgcaggcgaagtgctgctgattctggaagccatgaagatggaaaccgaaatccgcgccgcgcaggccgggaccgtgcgcggtatcgcggtgaaagccggtgacgcggtggcggtcggcgacaccctgatgactctggcgtaa

SEQ ID NO: 242791 - DNA, 333 bp, Klebsiella pneumoniae
gtggaggtggaaggcaaagcctttgtggtcaaggtcagcgacggcggcgacgtcagccagctcagcgccactgcgccggtagccagcgcgcccgctgccgccccggccccggccggcgccggcaccccggtgaccgccccgctggcgggcaccatctggaaggtgctggccagcgaaggccagacggtggccgcaggcgaggtgctgctgattctggaagccatgaagatggaaaccgaaatccgtgccgcgcaggccgggaccgtgcgcggtatcgcggtgaaagccggcgacgcggtggcggtcggcgacaccctgatgactctggcgtaa

SEQ ID NO: 242792 - DNA, 168 bp, Klebsiella pneumoniae
atgaaaattatcgttatcggtgccagcggcaccatcggtcgcgcggtcagcgaagaactgagtcagagacatgaggttatccgcgtcggccgcacccggggagattatcaggtggatatcacctcgcaggagagcgtcgaggcgctatttgcccaaacggtgaagtag

SEQ ID NO: 242793 - DNA, 1359 bp, Klebsiella pneumoniae
atgactacctctaccctgcaacacaatgataataaagccgttgaagtagaaaaccgagtgatcaaaaagctgttccgccgcctgattaccttcctgtttgttctctttgttttctcatttttggatcgaattaatatcggctttgccggtctgacgatgggtaaagatctcggcctgacctccaccatgttcggcctggcggcgacgctgttctacgtcacctacgtgctgtgcgggatccccagcaatatcatgctggcgaaagttggcgcgcgccgctggatcgccgggatcatggtggtctgggggatcgcctcgacctgcaccatgttcgccaccagcccgcatacgctgtacatcctgcgcatgctggtcggcatcgccgaggctggttttctgccggggatcctcgtctatctgacctggtggttcccggcctaccatcgcgcccgcgccaacgccctgtttatgatcgccatgccggtgaccatgatgctcggctcgatactttccggctatatcctggcgctcgacggcctgtggaacctgaaaggctggcaatggctatttctgctggaaggcctgccgtcggtggtgctcggcgtcgtcacctggttcttcctcaacgacacgccggataaagccaactggctggataacgaagagaaacaggcgctgaaggcgatgatcgatcgcgaacgggaacatgcggcgatcgtcccggcttcgccgcgttccacgctgcgcgaagtactgacgccagcggtgctgatgtataccctcgcctacttctgcctgaccaataccctcagcgccattaatatctggacgccgcagatcctgcagagcttcaacaccggcagcagcaacatcatgattggcctgctggcggcgatcccgcagttctgcactattttcggcatgatctggtggagccgccgatccgatcgccgcaaagagcgcaagatgcataccatcctgccctacctgttcgccgcggcaggttggctgctggcttcggcaacgcaccacagcctgatccaactgatcggcattattatggcttcggtgggatcctttaccgcgatggccattttctggaccaccccggatcgggtgatcagcctgcagtcgcgcgcggtggcgctggcggtgatcaacgctatcggcaacgtcggctctgccgtcagcccgctgttgatcggcattttgcgcgataccaccggcagctttagctccgggctgtggtttgtcgccggattactgatcgtcggcgcgctggtgcttacccgcattccaatgagccagcgtgaggacgccgccgccgcgccgggattagcggcgcaaaaaggccactaa

SEQ ID NO: 242794 - DNA, 663 bp, Klebsiella pneumoniae
atgcttgaccgttttaacgcaactccctatagtagcgccccgttgcccacccaaggtgagcagcaagacaatatggtgaggtgtccgagtggccgcctggaaagtgtgtatacggcaacgtatcgggggttcgaatccccccctcaccgccatattcgagatgagagcctgtacgcaagtacaggcttttttttcgcatgtggcacccgccggggggatgagaacccccgaccggggttcgacaactggcgcagccagttggacagactgcgagcctgcgagcgggctgccccgcaggggcgagcgaagcgagtcaatccccccctcaccgccatattcgagatgagagcctgtacgcaagtacgggcttttttttcgcatgtggcacccgccggggggatgagaacccccgaccggggttcgacaactggcgcagccagttggacagaccgcgcacgcagtaagcgggctgccccgacaaaaacgccgggagcgtttttgaacaacgcctgcgttggccccgcaggggcgaggcccagggatgggccgagtaacggcgagcgaagcgagtcaatccccccccctcaccgccatattcgagatgagagcctgtgcgcaagtacgggcttttttttcgcatgtggcacccgccgggggggatga

SEQ ID NO: 242795 - DNA, 810 bp, Klebsiella pneumoniae
atgacaaagattagtgaaagatggaagcatagtgggattgttgaaggttattgcaatatttgtggtaaatatgatgttctaaccaaagatcatgttccacctaagtgtgctataaccttaggacctattcttcagaaaacagttagtgagttcttcaatactaaagaaccagtcaaaccattaagagctaaaaatggatcttatttcagaacgatatgtggtaactgcaatagtaaggtatttggcgggcttgatacagcaattgaacatgtaacagaggcctttaaagaacagttgggtcaatatatgtctggtgagaaagtatatccattcatcaaaatatcttttgatagtatatcattcactaaggcaatgattggacacatactatcagcaacttcagttgaagattgtagaaaggagccgatagatagtccgtactatacacctttaaagaattatgttttggggaaagtgccaagttttgaagagactcatgatatcttctattggttttatccacacagaatgcacatatctgctcagagtgtagcatttatgaataaagggcatgtggcaattatttgcgcgctacattttttccctattggttttattataaccttgaaaaacaaaggaacctatcctgcccattcgacacaattaaaattgtgtgataaatttctcaccttcaacatgagctctataaattatgagttcacaacatttccatttgttaatcttaaaggaaaccagatgtatgctatgagtaatggccacacttgtgttagttatccaattaaaaagtaa

SEQ ID NO: 242796 - DNA, 891 bp, Klebsiella pneumoniae
atgaaaaaactatctcttccagcgagaacttatatcgaaatgcttaataagtgctcggaaggtatgaagcagataaatgttagaaataacttcattgctcacttccccacttttttgcataaagaacagcaatatagggcattaagctcaacaggtcagttatttacctacgctaggacacaccctcttgcacctacaaccttagtagttggtaacctaacaaaggttaaattagaaaacctttatgaaaataatctccgagataaaaacaaacccgctagagaatattacgatgacatgctggtttcatcaggtgaaaaatgcccattttgtggtgatataggacagacaaaaaatatcgatcattttcttcctgttgcacattatcctgagttttcggtgatgcctattaatctagttccgtcgtgccgcgactgcaatatgggggagaaaggtcaagttttcgcagtggatgaggaacaccaggcgattcatccctatatcgataaggatattttctttcgtgagcaatgggtatatgcaaatttcgtttccggaaccccgggagctatcagtttttatgttgaatgcccggcgacctggcggcaggaagacaaacacagagctattcatcatttcacgcttttaaatattgctaacagatatcgcttggaggcaggaaaacacttgagtgaagtgattactcaaagaaactctttcgtaaaagttataagacaatttagtccaatcgccacctctcagcagctacggtcggcatttattgaagcaaatctgaaacctattatagatttgaatgatttccccaattattggaaaagagttatgtatcagtgcctggcaaactcagcagagtttttcagggggatctag

SEQ ID NO: 242797 - DNA, 1578 bp, Klebsiella pneumoniae
atgttagagtttagggttattgaaagaggtgggtatattcctgcagtggaaaaaaataaggccttcctacgggcagatggctggaatgattattcatttgttacaatgttttatcttactgtctttgatgagcatggtgaaaaatgcgatatcggaaatgttaaaattggttttgtcggtcaaaaagaagaagtaagtacttattcattaatagataaaaaattcagtcaactccctgaaatgtttttttccttaggtgaaagtattgactattatgttaatctcagcaagttaagcaatgattttaaaaataaccttcttaaagctatgcaggatttagtagtacggccaaatcgattagtcgacattgaaaatgaaagtgtccttaacacctcattacttagaggggtcactctttcagaaattcatgggcagttcgcacgcgtgttaaatggtttgccggagttgtcagatttccacttttcatttaacagaaaaggtgcttccggattcagtgatttaactataccttttgaagtggcggtgaattcaatgcccagcacgaacattcatgcttttatcgggcggaatgggtgtggcaaaacaacaattttgaatgggatgattggtgcaatcaccaatccagaaagtaatgagtattttttctctgaaaataatagatttatcgagtcacgaatcccaaaaggatattttcgatcgcttatttcagtttcgtttagcgcatttgatccttttactcctcctaaagaacaaccagaccctgcaaaaggtacgcaatatttttatattggacttaagaatgctgccagtaatagtttaaaatcactagacgatcttcgtctggaattcgtttcagcatttattggttgcatgagagcagatagaaagagacaactctggcttgaagccattaaaaaactaagtagtgatgaaaacttttccaatatggaactcatcagtctcatttctaaatatgaagaattaagacgtaatgaatcacagattcaagtagacaataataaattcacaaaattgctttatgataatattcagaagtatctgctacgaatgagctctgggcatgcaattgttttatttactatcacaagattagtagatgtcgttggtgaaaagtcattagttttattcgatgaaccagaggttcatttgcatccacctttgctctctgcttttttacgaacattaagcgacttactcgatgcacgcaatggtgtagcaataattgcaactcattccccagtagtactgcaagaagttccaaaatcctgcgtgtggaaagttctgcggtcaagagaagcaatgaatattatccgtccggatattgaaactttcggtgagaacttaggtgttttaactcgtgaggtgtttttacttgaagtgacaaattcaggataccaccatttattatcacagtccgttgattcagggctttcttatgaagctattctaaaaaattataatgaacagataggattagaaggacgaactgttttaaaagcgatgataatgaatagggatgaaggtaaagtacaatga

SEQ ID NO: 242798 - DNA, 1206 bp, Klebsiella pneumoniae
atggcgcgcatcacacgccccctcactaacaacgaaatccttaaagccaaaccccggaaaaaagacttcacccttcatgatggtgacggcctgttcttactcgtcaaaacctctggtaaaaaactctggcgcttccgctatcagcgcccggtcagtagcagccgaaccaatttgagtctcggctcataccctgcaattactctcgcagccgctcgtcagatacgcgaccagcacttagccacactcgcacatggtatggatccgcaacagcaacaagagcaggcatcagagcaacgtcagattgagctagatagcattttctcaactgtggccgccaactggttcaaaatgaagagcaaaagcgtcactgacgactacgcgaaagatatttggcgctctctagataaggacgtgttccccgcaataggaacggtaccaattcaggagattaaggccagaacgattgttgaagtattggagccaatcaaagcgcgtggtgcgttagagacggttcgccgcctagtacagcgtattaacgaaatcatgatctatgccgtcaacactggcctgattgatgcgaatccggcatcaggggtcggaatggcatttgagaaacccaaaaagcaaaacatgctgacgcttcggccagaagaattgccgaaactattgcgctcgttaatcatgtcaaacttatctattccaactcgctgtctaattgaatggcaactcctgacccttgcacgtccttcagaagcgtctggtacccgatgggctgagattgatctggatgctaaaatctggaccgttccagccgaacgtatgaaagctaaacgtaagcacattgttcctttgtccccacaggcgatagatgttttaaatgtgatgcgacctatcagtgttcatcgagagtttgttttccctagcaggaatgatccaaagcaaccaatgaatagccagacggctaatgctgctttaaagcgcatcggttatggtggtagattagttgctcatggtttacgttctatagctagtaccgcaatgaacgaagcaggtttcaatagtgacgtaatcgaagccgcactcgctcatagtgataaaaatgaagtgcgaagagcctataatcgggcaacatattttgaacaaaggttagagcttattacctggtggggtgagcttgtaagaaaacatcaagttggagaggtataa

SEQ ID NO: 242799 - DNA, 2118 bp, Klebsiella pneumoniae
atgttagatgtcacaggactacgtgctgcctatcgaagatatggatttgaagaagctcgttcgggaaatgaaaatgtattagttttcactttgaaagctggacactttcacaatgccgatatcgtacctataaatgaacaagggaaatacagtcaagaacatatattctcacaattcaaggaatcaggttacgcttgtaagataagattttataatgatattgaagatgttaaaaactctttatttcagggttttttctctattgaaagcacccataaaagactacttagagaatatagtaaattcaccaaatcgattgtatcggttcactcagacaacgcggaatataaatacatcaactccaattattttattaatgagaaaattggagagaatgatgttatttcagaaattattactcgtatagatgatactgctccaactctgttcttaatagaagctgctgctggatttggtaaaacctgtacggcttttgaattactgagagaaatcactgaaaaccataataataaagtacctcttttcactgaattatcaagaaatagacaggctaaaatttttcgatacgtcttactagatgagatagatcgcagtttcccacttcttagctcatctttagtgagagctgaaattaaaaatggcaatgttccagtgatacttgatggctttgatgaactattacatcaaagtgaagatgctgatgttttcgacaccacagagcctatgcttgaaactataggtgaattacttacgaatagcgctaaagttatcttaacgactcgtagaacatccattctcgatggcgatgatttccacgactggatgatgagacactcatcagagtttaatgttattagaatacgtattgaaaatccgaccatcgagaactggctaacatctgaaagattaacaatactaaggaacaataatttccctattgagaaattatgtaacccagtccttctttcttatcttcgttgcattcctgaagaagaattcacagatgctacaaaatcgcctgattctctagtggacaaatatttcatatcaatgcttgaacgcgaacgtactaggcaagacctgttaatgtcacctacagcccagtacaacttacttaaatatatttcgtcagatatgatggtttatgattataccgctgaaagcaaagattatataacaaccattattcaagactactttaaaaatggcgatctagagggaataagaaaattatatcccgtagatgaacggcctacatcagatgaaataataaataaactgactagccatgcccttttagataggtctgtagatatatctagtaatatcggatttgtaaacgactttgttctagggaacttttgctcggaggtgatactagaaatcgaaagcaaagagtggtgtggtaataagacctttatcgaaccagtgactctgtcatatattcctagatcctcagagaaaaaaaaggtgttatgggagtctcttaaatttgcgattgagtttggaaatgcaagtgataaatttattaactcaattcgtttgaacgaatcaatgttgatgaatatcgactctgaaaacattgacaaccttaaaattaaagatattgatttatttgacaagtcaataataaaaaacagtgtttttacagacagtaattttcacaatgtaactttccattgcgtaaatatggcggaaatatcatttgttaactgcaacttctttgattgtaccttcttgattgatgataataccaatccatccatctttatcttcggatgtactgacaataatgaagttttaaaacaactcgaatctaatacagaaacccacacttcacaagatgaaaatggaaactattcagagtgcgacacatatgtattagagaaattctggccaatcggaaatcaatcaatattcaagcatcgaccggcaaaagctttatatatgaaaaacaataacttcacctatcaagaggctatttcttcagttgaaaaactgaaaaaaagaaaaattctattaaatgctgataagaatggcattttagaattaaatatggattatttccttgaaattaaaaaccttttggggcgctaa

SEQ ID NO: 242800 - DNA, 888 bp, Klebsiella pneumoniae
atgtttaatcctgaagacgccattgcccgccgcattcatgatacgattgaaaatgaactaattcgcgccggccttcttttccgagtttttttccgtgcaaaaaccaaacagtccattgacaaaaaaataagcaaaaaccctgcaaagtattcacctgatggaaagaaaattcaagatttatatgggataagagtagctttatacttttcagatgactccattcttgcacaaaatgctattaaaaacatctttacgtacgatcatgaatcatcatcaatcgatagcagtaatgtagacaaatttgctgcaacgagatgtaatttaatatttaaactcacggatgagttagccgaagatagccaaatattggccacaaacaaacttgtagataaaacattcgaggtccagtttaggacaattctttctgagggttggcatgaagtggatcacgaccttcgttataaatgcaatgaagattgggatgaaaaccaagaccttagccgggctttaaatggtatttacgcctctcttgaaacatctgattggagtatgctgaagttatttgaggatctggcatacaagcactataaagcaagtaaatggaatgcaatgatacgacataaattcagacttagattcactgaacctttgtcagatagcattgaagaattaattaccagtgaaaacctaggaaaatctttatatagggttaatcgtgatgattttttgaaaaaactatattcctataagctcaatatacctattaacatgaataatataatccacctttgtaatttattttattttaataatcctgaaatttcaaaattaactccactacctatagttaggatgtatgaagaagctttagagaagcagaacaattaa

SEQ ID NO: 242801 - DNA, 738 bp, Klebsiella pneumoniae
atgaccgataccaccgccattcccgactacctgaaacccgcgatggaacgccttgaggttgcccggtcagcgcatcttgccagtgccagtcgtatggatgaaaccacggcggccatcagccaggtaaaagcacaaaaaaacgaactggagcaggaaaacggcaatgattccggcgcatggcgcgccgcctttcgtgccggaggtgcagttattaccgacgagctgaaacaacgccatctggcgcgcgtggcatgtcgggaactggtgcaggaatgtgacaatatggctgaggtgctgtcgtttgagctggacaatcttaagggagcctgcgaccggacggccagaacgtatcgtcaggcacatcactacgtcctcagccagtacgcagagcatgagctaaatgctgccctgcgtgacacctgtagtgcgctggtcagggcaatgaaactcaatatactggtccttaataatccgcttgctaatacgaccgggcacgagggatatatcgaaccggaaaaggttgtgatgcagcaggtgaaagcgtggcttgaacaggccgtgaagggctacagtatccgtctgaccaatgagccggtgctgtttaaaacagggctgtcggcctctacgctgcctcatatggagcatgatgttgcggccacgcccgttcagcgtaaggtctggcaggaaaaaatgagggcgcgtgaagccagcctgaaagcaaggggattactgtcatga

SEQ ID NO: 242802 - DNA, 288 bp, Klebsiella pneumoniae
atgactgaacgagccgtctgggttcacaatcatgtagcccgccagcgaacctacgtccccccagttttggtgcgtcagcgcgccgacactgataacgccggggatcacctccttgtggttgtggtaatggccggacagtaccaggcgaaagcctatatctttcagctcctgcgcatcgatgccaacatcaggcattgtggggatagctttgttgatggcggtatgaatcacgacgtcgtgcagatccccgtcaagccgcgcacgaagtgctttcaggtcgctaattaa

SEQ ID NO: 242803 - DNA, 684 bp, Klebsiella pneumoniae
atgaggtttttgtcattagttgtaacaatgtcgcttctgcctatggtctcgatagcagcagaaagactgcagtgcgactattctacggctgacatttcaaattggccgaattctaaaatggtaggtcatgggaagggaatagttgaatctggagataattcctttaaggccatacggccagatggaacctactctgtttcaccaattctgacaagctctaaagatgggatgatattcttagacgataaaaccaagatttttgccgcaagtataaataaagatgattttgccatttctgaccgtatagcaaaaaagactgaacaatgggcgaactgtaaaagcattatacaaccacattcaggtggcgctagctcagcaaattggaagtatcgcaagttaacaaaaaatgagatagcagcgatagaagaagcggtcaaagatcagcttaaagaccctgaaagtgcaagattcaaacactccatgtatgtagctaatgggaaaggcgaatattgtggattagttaactctaaaaactcatatggcgggtatgtgggcgatacaccatttatggttatgttaataaataacggaaggcccaaggctggttttatcggtatcggcggagatgatgcagtaacccaggctactattcgattgtgtcatgaaagcggatattttcagtaa

SEQ ID NO: 242804 - DNA, 558 bp, Klebsiella pneumoniae
atggctatagagccgagcattgaatttctgcgtgaatgtttcagttataacccagaaactggagccattatctggttgccaaggccgaaaatacatttcgcaaccgagagggtgtttaagatatggcattctcgattctgcggaaaactcgcaggcggcgtgaactccaatgggtacattgaaatcggcatgcaagggcgattgatgaaggctcaccggatagcctgggctttgtcctatggtgagtatccatcaggcgatatagaccatattaacggaataagagatgataaccgtctcgttaacctgcgcgatgtcacccggcgaggaaactgcaggaactcggctaggcacaagaataacaactcaggaattagtggtgtccattggcatgcccgggacaacagatgggtcgcagcaataaattatgcggggatgcagcggcaccttggttattatcaatgcttgattgatgcagtggctgccagaaagtcagctgagttaaaatatggctaccatgaaaatcatggtagagctcaacgcagagctcaacaatga

SEQ ID NO: 242805 - DNA, 627 bp, Klebsiella pneumoniae
atgaatcaatcacacttccagaaggcggctggcatcagcgccgggttagctgcgcgctggtttccgcacattacagccgcgatgaaagagttcggcatcactgctccactcgatcaggcaatgttcattgcccaggtagggcatgaaagcatgggatttacccagcttgttgagagcttcaattatagcgtggccgggttgaatagttttgtccgcgccgggcggctgacgcagggtcaggccaattcgctcggccgccggcagggtgaaccatcgttgccactggagaggcaacgagcgatcgccaatctggtgtacagcaaacgcatggggaataacgggccaacagacggctggttttaccgcgggcgcgggctcatccagaccaccggcctgaacaattaccgcgactgcgggaatgctttgaagattgatctggttaaacagcctgaattgctgtcacaggatgagtatgcggcgcgcagtgctgcctggttctatacctcacgcggctgtttgcgttatcccgttgaccttacacgcgtcactcagattatcaacggcggacagaacggcattgatgaccgtaaagcccgctatctcctggcaaaaagtattctagtttga

SEQ ID NO: 242806 - DNA, 555 bp, Klebsiella pneumoniae
atgcgctggtttgttgagtggacgcggtttcgcctggtactggctaccaccatttccagccataaacggtgccagagtaggtacagccagcgcgtagccgtgggttttggtaattgtctgtatcggcgaatacaacgcctgtccacggaaacaatcatatttaccgcgcgtcgtggtgtggttgcatttcacgatgaatggattatcgctatcaaccacaaatctctggataccccgagctatacgcttcaacgtgttaactgcaagaggctttttgcggtcaaatatcgatggtgtaggaatggaccagtcgatgcattcagcagctgtcctccatgccgccagtttacctgtcagcaccgcggtcgatttagggtcaccatgcgaagcctcaggccagacaatgggtttatcgtcgcaacgcatcaacataaagaatcgcttgcggatcgtaggcgcaccataatcactggcacgaagttcgcgatattcgaccttatacccgaggccagcaatcagccgtttagcttgtttgctagccggcgatatgcctag

SEQ ID NO: 242807 - DNA, 546 bp, Klebsiella pneumoniae
gtgattcatgagaatggtatcacgctgtcccaatccctgggtgaaaccattggtttagttaaggctcctggcgcagaaggcattggcgtcaataactacgccggtatctcaacggatagtcggggttacgcggttgttccgtatctgaccccctatcgccgcaatgatattagcctgaatagtaaaaccctgcgggacgataccgatatcacctatatgaccaataaagtcgtccccacccgcggggctatcgttagagcagagtataaaaccgccattggccaccgtgtcctgatgacgttaacgcggcctgggggtaaaccggtcccctttggcgcgatggcgtcgctgcttaaaagtgaagaaaacgcgtcaattgtcggtgacggcggagaagttctgctgagcggtttaccgcaaaaagggacgctgcaggtgaaatgggggaatggccaggggcaggaaaccacctgtcgggcggattatatagcccataaatctgctggcgcgtccggtctctggaacgcgacgagcgtctgtcaataa

SEQ ID NO: 242808 - DNA, 129 bp, Klebsiella pneumoniae; identical to SEQ ID NO: 106395

SEQ ID NO: 242809 - DNA, 1089 bp, Klebsiella pneumoniae
atgaacttcgtgcatttaaaagttgataaaatagctattcatcaaatctttccaagaggtgaagatgggaaggaagtattaccgggcaaaggcacggagttaataaattttgatgaagatgctttgagcgattttaaacaaagaatttataactctcttgggcatgattcttctgctgtggaaatggtgataacaaacgaaaagacagaaagcactccgttttacgtaaatattctacatggttgtaatgatgtagaatttataaataacagttatgaaattgctaaaaatttatcaaaagcacaaacacgtagaggcatgtccggaggtatacttgttgttttcagcgccacctatcaatataacaagcttccttttgtaggcattatcaaagctgacttatacagtggatacgaaaaatggcaagataaaaaaacaggcattatttctttaaaacatgtaaaagagctactacttacgccttcaaccaagctttataagtctgccggattttttaaacgtgaaaacgtaaaaaatgatagcaccttaagtgaacaatgggccgtacatatttctgattatcagattgataaatctgacggtaaagctgctgctcagtatttttatcaaactttcctcggttgtgattacccagcaaccagtgccagaacaacaaaacgttattttgaaatagcatgtgattttataaatcaaatggatattgatgaagaagagcgaacccacttacacaacgtcttatacgcagacctaaaagcaggtaaatcacaaaaagttgatcctatggcatttgctggctcatatatgtcaacagcagatgtagataattttaggaactatttagacgattatgattttccggttggtccattcataaaagatacgcagtacatctctagcaaattaaagaataggcgtttaaaatttagtaaaaacattcgaatcagcgcaccatcagaaatctttgaagagtttgtttctattgaaactgtagagggtgaagcaggtcaagatggttatagaccaacttggacaaaaattcttgttaaagacagaatagtagatcaataa

SEQ ID NO: 242810 - DNA, 990 bp, Klebsiella pneumoniae
atgactgagactgaattcctcaagcaatggcattccgagaaggcgatgtatggcgcttggggtcagtatattgttagttctatatcagaagcgcttatcaaatctcttaaggtagatcttaagaattatcttaaaataccagtaaatcacagagttaaagatgatgggtctttagttgataaagccttatatcgtaataaagcgtacaaaaatccttataatgatattgaagataaggtaggtgttcgctttgtcgtaatgctccaaactgacgttgaaaaagtatgcgaggttattaaacaagttgccgttcaagaaggttgggatgctacgcagtgtagaaactataatgaggagcgtagagaatcgccaatgctcttcacctatcaatctcatcattttatcatccgaaataaaagagcatttacacatggaggtattctcattcatgaaaacaccccttgtgaggttcaggtacggtctctgcttcagcatgcatatgctgaattaacccatgatgccatttacaagaaaaaaacaattatagaacctgatgttgttcgtaccgttgctaaaacaatggcttttatcgaaacggcagatgaattctttcaaaaggttgtggatagaactgagtcggaaaatatactcaaaaatgagtcatttttggatactctctttgaacaaataacaggcgtacaacctataaaacaaaactcatctgttattatatatgatacctttgagcatattattaatgataactttgaagaggagatgattaagtttattgggaagaatccccaacttggcgaaactattaaggaaaaaatggctaccaataaattttatcaacagagcgttgttttatttgtttattggttaattcgaaggagaaaaagcacccttgaatctgaatggccattaccatgggatatagttagtgatatggcaatggatattggcgtcgcgcttagtagggtgacttaa

SEQ ID NO: 242811 - DNA, 1032 bp, Klebsiella pneumoniae
atgtcaaaacgaattgtttttttcaatcataaaggtggtgtgagtaaaaccacgtcagtttacaatcttggatggatgctagctaatcataatagagttttagttgtagatggcgacccacaatgtaatctttcaagtttgattctaggggacggttttgaagagtattatacaaatccattaacccaaaagcagaatttaaaagatggcgtggaagtcgcttttaaagggaagccgcaacctatagctcctattacttgtgtgtcccctgcccggactgcaaatctttttttattaccagggcatgccgatctttctgcttatgaagcatcactaactttcgcccaaacatcaggaaatgctttagcgaccttacaaaacttaccaggtgcattttcggagttaataagattatgtgaagaacgttataatatcgattatacacttattgatttaaaccccggtttaagctcaatcaatcagaaccttttcttaagtgcagacgccttcgtaataccaacaaatcctgatccattttcaatcatggctattgatacattaaaggatgttttgccgcgctggatggaatggaaacagactaatcttgatttctttgaagagagcgcgtacccacttaggagttcgcaaacaaaatttttaggtatgcttatccaaaggtttaatataaggaaaggcagggctgcgaggccgtatagagataatattgcagaaattaagcgcaaagtagtagaagatcttgttcctcgtttgcaaacagttgggatggctttgaattcaaatcagtatcctcaagaattgctcgatgacgatttttgtttgtcagaaatacctgattttcaagggcttttaccaaagtcttatgctgctgaagttccagtttttgccctccgagatgaagacattaatgagacaggaccagttcttgaacagatgtctacaaaaagagatatgtttaaggctcaatttgaagagttatctgaaaaaatacttaggactcttgaaaatgtctag

SEQ ID NO: 242812 - DNA, 234 bp, Klebsiella pneumoniae; identical to SEQ ID NO: 193227

SEQ ID NO: 242813 - DNA, 504 bp, Klebsiella pneumoniae
atggttctatcgtcattgatatttggttcaacaaatgatcgtctaatactattttcgtcaaatgtttttcttgctgcgaatcttctaatgagttcatcatctctatttttgtcatatttcaccttgttttttatagtgttccaactgaattttttaccaagagatgatcccttgaagaaaatatttttttcattatttttgataccaaatgatactccggcgacgttgccattagaagcaacgttaaatgccggctcgatgcctacagcctgcagacgttccaagaacgtagacaaatcaggcttaccgactaaagccgcttgtaatgcgttctgtagcactaaacgggctggtttctcacctgtcctcaaggcttgctcgatctctgctttggttggtgctgatacgtctgatttttggcctttgagactttgtgtaatggttaagctgtgctttacttctaaacgttcacaagctgctattgtattaaatgctgagtgctga

SEQ ID NO: 242814 - DNA, 684 bp, Klebsiella pneumoniae
atggatatgcaggacgataaaaaattaaagaaattagtaaaaggattggctgataccacatgttctgtattgctaattcctgatatcttcacatttaacatccttcaatcacgtactgaagaagttaatggtgtccctgttgtaccgttattcgacactcccctaaacggcataaacagtgttttgaaaagactggaagatattgtcctttctttgataattttgatattaatatcccctgtattgatagtcattgcatgcatagtaaaatattcctccaaaggacctattttattccgacaaacgcggtatgggatggacggaaaatctatacaagtatggaaattcaggactatggttgtacaagagaacggcaatgttgttacgcaggcggtacgtggagatgtgcgtgttactaatgttgggcggagaccccacgcggtggctcataatgagcaatatagaacattaattgaagggtatatgcttaggcataaagttaaaccaggaattacaggcttagcacaaattaaaggatggaggggggaaactgatacacttgaaaaaatgcaaaaacgagtggagtatgatcttgaatacattcgtgagtggagtttatggttggatttaaaaattatatttttgacggtgtttaaagggttcgtcaataaatcagcatattaa

SEQ ID NO: 242815 - DNA, 162 bp, Klebsiella pneumoniae
atgcactccttaactatgcagttccgtatccgccactgcagtgggggacaccatatgatgggcgaacagctaaaacgtatgctgataaagggtatcgggcgactgatgcaaatggagcgctggacgttactgctgcagagattgtcgccgacactgtggtaa

SEQ ID NO: 242816 - DNA, 4104 bp, Klebsiella pneumoniae
atggcctttaacccggagctggggagtacgtctcccgctgtgctgctcgataatgccgagcgcctggataagctggtcaatgggtctgcgctgactgaaccagatcgcgctggcgatgatctggatacctggcgcggaatgatggcgaaaaacaatgaggtcaggcagaacctgatcccgctcagtaagcagtacgcgacgctggcggcggcgcaggcggatatcgcgaatattacggtaggatcgaccacgtattaccgcagcccggatgacagcgctcttgcggttgaggtgatgaacgttagcgggacgctgcagcctaccgggcggaaaatgccatctcaggcagaactggataaaattgcacatgcccttgaagaatctgttgagataacagaaacgctttcacgtttgacactgacagaagctctttcacttacggcatctggaagctggtcgttatctgatgaggctgttgggcagctgcgaactgcgtctcttcctgctgggggggatacctcagcaaaactcgtactcactgcaggtaccaacgagttttttagcagggattttttcccgggagagacgctaagtgacggggatataaccacacattataatcccctgtacctaaaggaaatgacagtatcaaatgtcattgtggaagcgaatgttctccgtgcagccttttttccggtcgttggtgatggcgttgttgcgacatcacagtacaccgcgttcgatccggaacatgactttgcttctatacgggctgatcagggctccacaacagcgttgcgtggcgtggttctgcattcctccggtacctatcttcaggtcactattcctcgcactgaactgagcgctgccggatatccggcaaccccagcaggcgtccaggcttatctgcagtcgatgtggcccgagaaggttttttattatgcttcaaccactacgcaagtcattcatacggcatccctgttttcagttcccccaggtactctgacagttgatgccagtacaggtcttgtttttgctttttctgttatgaattccggggaaatgaaccaggttcccgaagttttacacagcaatgcagtttcagccgcggtagcaaaagatctggcgctgaacggacgctattcacgccttgtgtataacgggccgctcctcggcctgcctggatattcggataaaaaccgccttgtcgttattgataccattcagtcaaccagtgcagatgataatcagtatgccccgcgcatggtggatctcgctttcagcgttaacggcatgcgggttagcaggcgcattgtacctgccaatcagtcactgctgcagaatggtatccttcagggattcagtgaggcacatcgactgaatgagcttaagggggtagagatacggtacactgatggtgtctcggtaacttcaacgtcctggtttcctggtgcggtgatggttatcgcgaaattcatcagaaaggatggcgccgtatggacactgactaacactggcgtacccggttgtgtcgatttggcgggccagttcagctatgtcaccgggaatgaatcagcgctgctacggaccgatattgtcacgtcactgggtgggtataagggaaacggatgcctgcagttttcggttcctgttactctgcttgatgcctccggggtacctctgttcagtccgtcagcgattttcaattatctttacgggctgtctcgcaattcagtattcacctacagaacggcctcatggcagatcacccgtgacctgcaggacattatggctctgagggttcctgctggcgcgcttagtattgaacatctgaattcctctggtgacaggaacggtattatactccgggtctacgaagaggatgcagtgaacggggccgacgtcggcgactatgtccgcgtaaccggcgatgttaaaaatgccactacgcaggactatcttaactaccccgtagaactcaaagtccggttccctgcgggaaaagtaccgtctcaggaatgtctggttctgacggatgaaaacgggctggagtacgattgccagttctcaggcacggagcatccaaacccgcgtcagcgctcacagccgggatttcatcctgatggctctctggcagcaggctctgtctttacgctggcctctgttccggcgggagaaacccggttctttgagctgaaagcttacgccacggccagaaaatcttatgctgaaagccctttgctgactgtgccatcagcgacacagcgtacagtgacgcttgatggctatactctgacgttcaccaattccggtgtagtggctgccggggcatggacacttgactcgatcactgaccccaacgggaccgttcacaacatcacgcttaacgcctatctgagtggctcaacatgggcttccggcgcttaccaggaggcaggttttcagggggcttcatccattcgactgatcaatactggaccagtgtttgtcgagattgaggtggtttcctggaatctgcccattgataacgttccttcccaggctgtacgggcagtgatgcgttaccgtctctttcgtaacgggaaactgcaaatccgcctggtgtcattgatggaagttgctctgccggtatcaaccttgtctggggtcatcgcgcgactgactttcggggacggtgcgtatccgtatgacccacaggccgcatcagttatttttacagacccgaccagcggcgataaatgggcggtgacagcagtcagggcgaacggcgatgtacatcgtgacgggcagacatatggaccgacacgtcctaccatgctggaagttcgtaacccgtcatcttcttccgtgagattgtatgctggctggaaatatcagacccaggaccacaactcctttattacctggccggtcaacaaaggttgggcctggacaagcgagttctggtttgacatgaggtcaccttcagcaacagccagggatgtgttctccagggtgctgaatcgtccggttggtttccttggacagtcatcatatccatctacccaggtccgccgtgcactccgcgaaattgaactgcatctggacgggtcgatggactggtggtattccggtgatgcccggcagtgggaaggcgggccgggagatacgcgtacgtttaaatatgcgccggtaacgtatgagattgtcagatatctgaaagacggcctcgggacgctggagggaatttacacacaacttgaaacggtcgtgaaatcgttcggggtacctgtgctggcaaatattggggcttcttatctaaatggcgggcatcttctgcagttcgcttcccgcatcagtgttccggttctgcactggctctataaggttgcggttctgaaaggaaacacgactgtcagggataaaactgccgtagcgataaaaagctttgccgatgcgatagtgacttactacaacgctaatggcggagtcgggctacagggatcagttgcggggaaaggtaactcgaacagcaatgccacaggactgaggattgttgcgctggggatcatgtccgggcaggacgctgcaggggcttatctggcaacctataatgggattcagtctctgctgatgcaaagttccgggtttatgtatgcccagaacatcctcaaggaaggagcatcagacgtgctgtcggctaactggtgggtgcattatcaggtatttgcctacaacaattacctgctggggtgtacagctgctggcagggaatctgccttcgacatggataactttattctcatgtcgtcgtcagccctgggcggatttgatgagattgactactgcgcatcggaaagccggcggggcagttttaacaccatcacgtttgctgcatacccgatgatgatctccggaaggccctcgatgatgaatgcactgctgacatctctggatctgttcaattctgaatatggaccacaatccggcttacccaagcgctatttcggtttcgatggttatcaggctggaagtactgtagccacaaccgatataccgttctgcgcaacgaccttctctgatgtctggctggatcagtattttcgccaacgacagttaggataa

SEQ ID NO: 242817 - DNA, 816 bp, Klebsiella pneumoniae; identical to SEQ ID NO: 220143

SEQ ID NO: 242818 - DNA, 960 bp, Klebsiella pneumoniae; identical to SEQ ID NO: 144187

SEQ ID NO: 242819 - DNA, 258 bp, Klebsiella pneumoniae
atgcctggcatcaaaattggagacggtgccgtgataggtagtcgctcgttggtgacaaaagatgtagagccttatgccatcatcgggggaaatcccgcaaagcaaattaagaagcgcttctccgatgaggaaatctcattgctcatggagatggagtggtggaactggccactagataaaattaagacagcaatgcctctgctgtgctcgtcaaatatttttggtctgcataagtattggcgcgagtttgccgtctaa

SEQ ID NO: 242820 - DNA, 132 bp, Klebsiella pneumoniae
atgcttaacttttttcttaaaatggttagcatctttttgcctgaacacatacaaacgatttctttcctgatgtatggtttaggtatctcagatgaaaaccacttgcgttcaaggagtaagatttggaactga

SEQ ID NO: 242821 - DNA, 912 bp, Klebsiella pneumoniae
atggatattccgatagaacttaagcacttacaaactcttttagcattgcgtaaaacaggaagtctgacgcgcgcggccgcagctatgcaactgactcaatcggcactatcgcaccagatcaaacaactggaagagcactataacgttactctgtttatgcgaaaaacatcgcccgtaaagtttaccctggcgggtgagcgtttgttacaccttgctgaaaccgtgcttaatgcaatggaggaagccaacagggatctttataagttagcgctcggaaaacagggcgcgctccggataacccttgagtgtcacacctgttatggctggttactaccggtgatggatgagtttcgtaagaaatggtctgaggttgaaattgatatattgcctggttttcagccggatccaataggtcttctgttgcaagacagagctgatgttgccatcgtggatgaaaccgagcagacagatctggtgaggtacagctctttatttaaatatgaaatggttgctattttggcaaatgaacatcctttaacgcgaaagccttggcttgaagcggaagattttcgtggtgaatcgctcataacctatgcagtaccggatgaacgcatcgatctttgtcgaaaagtacttaaacctgccggcattccaattaggagaaaaaccactgaactcaccatggctatcattcaacaggttgcctgccaacggggtattgccgcattgcctatctgggcagtatcagaatatcttaaaaaaaaatacgtcacagcaaagtcaatcacggaaaataaactaatttcagaagtttggcttgccacactaacagaaaacatcgacaagggctatgttaatgactttattggctttaccagacagcgctgcttgcgcttattagatgaaatctaa

SEQ ID NO: 242822 - DNA, 1206 bp, Klebsiella pneumoniae; identical to SEQ ID NO: 224952

SEQ ID NO: 242823 - DNA, 1185 bp, Klebsiella pneumoniae
atgccgcatactaaaatcgcaaataagttacaaaatcttaaatcatctgcaattagagaattattgaaacacagcaaaatggacggtgttatttccttgggcggaggaataccagatccaaacttgtttgatcgggaaggcttacagattgctatggatcacatcttgacccacggttgggaagacgcgtttcagtatggactgagtgagggtaatcctgaactgcgggcagccatctgccagatcatgcttgaccggggaattcactgcggcgtagaggatgttgttgtgacctccggctcccagcaatctctggatattcttgctcgggcactgattaatcctggcgatgtagtggtgttagaacggcctacttacctggcggcgctgcaggtatttcagcttgctgaagcgaacctgttgtcggtaggaactgacgctgagggcatgattgtcgatgagctggaaacgctgcttctatcgacccggataaaagcagtgtatatcgtgcccacgtttggcaatccaggaggcgttagcctcgcggagcaacggcgtaaacagctggtggaactctcactacgctacgattttatcatcatcgaagacgacccttacggcgaaattaattttacggattcgtcattcatcccgctcagagcatggtctgcggaaacgggtaacaatgataacgttgtttacacatcaaccttttcgaagatcctcgcgccaggcgctcgggtagggtggctcgtgctaccggattggctgaaaagagcggtagtcaacatcaagcaaaccacagatttacatataagtgcactctcacagtcgctgacctctcaatatttacacagtggccgcttgccgggacagatcgcactcatccggaaggcttatgagctcaaatgtcgagttctaagccaccatctgctgaacgaactaggtgaccacctcacttttcatcagccgatgggcggcatgtttttatgggcgaagtttaaatatgcgatggataccacgcaatggcttcagaaaacaatacgcaacggcgtggtgttcgtgcctggtgaatttttctactgcgaagaacctgatcattgcactttgcgaatgtcgtatgtcagcaccacggaagagaatctgatagaagcggttaagcgcctgaaaatttcgcttaattaa

SEQ ID NO: 242824 - DNA, 1281 bp, Klebsiella pneumoniae; identical to SEQ ID NO: 230634

SEQ ID NO: 242825 - DNA, 939 bp, Klebsiella pneumoniae; identical to SEQ ID NO: 216445

SEQ ID NO: 242826 - DNA, 144 bp, Klebsiella pneumoniae; identical to SEQ ID NO: 216446

SEQ ID NO: 242827 - DNA, 1005 bp, Klebsiella pneumoniae; identical to SEQ ID NO: 216447

SEQ ID NO: 242828 - DNA, 1419 bp, Klebsiella pneumoniae
atgtttggtttagatgcttttcatctggcacggatccagtttgcattcacagtttcgtttcatattatctttccggcgataactatcggtcttgcaagctatctggtcgtactcgaaggcctctggttgaaaaaacgcagcgcagtttacctggatctctatcatttctggtcgaaagtctttgccgttaactttgggatgggcgttgtttccggactggtaatggcctatcagtttgggaccaactggagcggtttttctcaattcgcaggtagcatcacgggccccttacttacttatgaagtattaacggcctttttccttgaagcaggtttcctgggcgttatgctgtttggtcgcgacaaagtaggacccggcctgcatttctttgctacctgcatggtggctctcggaacattaatatcaaccttttggatcctggcttccaacagctggatgcacacgcctcagggatacagtatcgagaatggtgtagtcgagcctcaggactggataaaaattgttttcaacccatcattcccatggcgtttggtgcatatgacgacagccgctttccttgcaagtgcgttcttcgttggggcatctggcgcatggcatctgcttaagggcagggacacgccagcaatccgcaaaatgttctctatggcgttatggatggcagccattattgcgccgattcaggtatttctgggcgatgggcacgggctaaacacgttagagcatcagcctgcaaaaattgcggcgattgaagggcactgggaaaacaggcctggtgtagccacgccgctcattctgtttggcattccagatatggagcaggaacgaactaaatttgcacttgaagtaccttaccttggcagcctgatcctgactcacagtctgaaccaacagatccccgcgctaaaaagctttccgcctgctgacaggcccaactctaccgtggtgttctggtcatttcgtatcatggttggtctgggactattaatgattacccaaggtattttaagcctatggctacgttacaaaaaaaaactgtacgcctctcgaccgttcctctggttcgtcttgctaatgggaccgtccgggttgattgccatcctggcagggtggtttaccaccgaaataggaagacagccctggactgtttatggccttcaacggacccgtgaggcggtatccgcacacggcgagctgcatatgagtatgagtctcatggcctttattatcgtttacagtgcggtgttcggtgtgggttatatctatatgatgcagctcattaagaaggggccgcaaaccggtgaaggtcagtatctacaggaggggggcccggggaagttgcgcacaccagccaggccactttcagctggcaattgtactgaggacggcaatcatgattga

SEQ ID NO: 242829 - DNA, 522 bp, Klebsiella pneumoniae; identical to SEQ ID NO: 216449

SEQ ID NO: 242830 - DNA, 324 bp, Klebsiella pneumoniae; identical to SEQ ID NO: 216450

SEQ ID NO: 242831 - DNA, 1026 bp, Klebsiella pneumoniae
atgaagcagacttataaagcaatgcaagtttctcgtcctggtcaactggaatgtgtggaaaaagaacttccggttcccggcccaggtgaagtgctgataaaagtggaggcctgtggaatttgcggagcagattctggcgtcgttgaaggtctggaaaagagtgttgagtatccgcgtgtaccgggtcatgaagtggtcggtacgatctgcaaaacatcggggccgctcccggcctggctcaagcctggtcaacgtgtcggcgttgggcgactaggtggtcattgcaacgcctgcgagcaatgccgtcttggacactttaacctctgtcagaatcaaccggttactggcagcacaagagacgggggttatgcagaatacatgctggcgcgtgagacggggctggtcgcaataccggatgatttgtcctccgttgacgccgcacccttactttgcgccggagtagcgacttttaacgccttaaaaaaatctcaagcgcaggctggcgatacggttgttattcaggggatcggggggttaggacatttagctttgcaatatgcacgcaaaatgggttttcgcgttatcgccgttggcaggggtgatgatattgcacgcgaagtcattgcgctcggtgcccattactacatcgataccaacaaagaagaggctgttgaagtcattaaggcgtttggcggcgccaaagttattttgtcgaccatcactgacagccatgccgttgccactctgctacccgcgctgcttccccagggaaggctgatggtcgttggtgtgggtaaagcgccattgagctttaccccgggtctcatggtcggacgggagttacagataaacggagccatgaccgggacggcaattgaattagaaaaaacgcttaatttcagcctgctggtagctgtgcgcgcgcagattgaaacacgttctctggaacaagcacaagaggcgtatgaaaaaatgcgtagcggaaaggcgtctttccgcatggttctcaccatggggcaccgttga

SEQ ID NO: 242832 - DNA, 1074 bp, Klebsiella pneumoniae
atgatgaatattgaggtcatcattgtgggagggggactcagcgggttatacgcggccaggttgctggagaaagcgggtattaactgcctacttctcgaaggccgtgagcgtatgggggggcgtatcttgcaggcgaataccgttgaggctgatttaggcgcgacctggttctggccaacgatacaacctgcattgaagcagttattcagagaactgaacattgagtcattcagtcatcaggagaggggggacatgctttttgagcgttccaaagatgccccttctcgccatcctggatttgtctcttcgcctgccgccgcccgtgtaagtggtgggatgtcacgattgcccgatgcattacttgcgaagttaaagcctgaacgcattcagaccggactgcaggttaaacacatcgaacagcaaaatggcaccctgaatatttgcggatcgtatgccgatggacgtccgtttagccggcaggcgcaacatgtactgctggcattgccccccatgctggctgcagggatcaattttttccccccgctgcccacgacgttattgcaggcatggcgtaacaccggaacctggatggccccccatgcaaagtatgtcgctgtgtatccctataatttttggcacaggaagggattatccggagaggtaagaagcaacattgggcctatggttgaaattcacgatgtttcagaacctgacaggatgtttgcgctgttcggatttattggcgtgccttttcacgagcgtcagaagataggtgacgcggtcctgagagatttatgccgagcccagttgataagactgttaggcgaggaagccgcctatccccatgctgagtttcttaaagactgggcggcggatccctttacctcaacctcgcgcgacctggccctacccgcagggcattctgtaccacccgccagcgcaaataacggctcgtggcgtaactgtcttaccggtatcgctagcgaatggtccaccgtctttcctggctacctggcaggagcgattgatgccgctgcggcaggcgtacaacacataatcgagaacaaaagatga

SEQ ID NO: 242833 - DNA, 582 bp, Klebsiella pneumoniae
atgttggatcgcatcggtggtgagcaggcccgcgccaccagcctggttcgttatttacctcagacatcattcccggaacatcagcatcccggtggagaagagatccttgttctggaggggcaattctcggaaggcaaccgtgattatcccgctggctggtatttgcgtaaccctccgggctcctctcaccagcctcacagcaacaaaggcacgcagctattcgtcaagcttggtcagatgacaaaacgagaaactgttccgctacgtatcgatagccgtgcgcctgaaaactggcgtgaggatggcggaatgtcaatttgtccgttgtttgagagcgcagaagaacgagtttgtctgctgcgtatggattctggttcgctgctggttgccccctctttgaagggaggggctgagttgctcatcgtcgaaggtaacctaattgagggcaacagcatccatgctaaagggagctggatacgcatcccgtccgggcatggaatggcgtttattgccgggatcgacaaaagcctggtgtatctcaaagaaggccatctcgatgttgagcaggtaacgctaccatga

SEQ ID NO: 242834 - DNA, 339 bp, Klebsiella pneumoniae
atggttcactggactgaaatgcggaaagaactccgggcagcgatcgggaaattcgcaggtctgcaacccgatgtgatgcaaggcatcgataagatgcaaaatgcggctgtcgtaacaggccacctggacgccaaaacacatgagctcatcgcgttggcagtggcggtcacgacccgttgtgatggatgtctgtccgtccatgctgaagctgctgcaaaacagggggcgacgcgcgaagaaatcgccgaggctttaggtgtggcaatcacactgaacgctggcgctgtgttggtctattccagccgcgcactggacgccttcgataacctacctaagtaa

SEQ ID NO: 242835 - DNA, 282 bp, Klebsiella pneumoniae; identical to SEQ ID NO: 216455

SEQ ID NO: 242836 - DNA, 963 bp, Klebsiella pneumoniae
atgaagacacccgttcatctcaatgcactacgtgcatttgaagccagcgcgcgccaccagagcttttctcttgcagccgaggagttaaacgtcaccccagcagccgtcggacaactggtgcgttcacttgaagaagtgatcggttttccgctgtttcaccgcagcaataatcgtcgcgccgccctcgttttaacggagcctgcgctccgtgcgctccccgatatacgcatgggttttcaaagcctaaacctggggatgacgctcctgcgggagggcgcgacaaacggtattctgaacgtaaccgtcagccctgcctttgcagctaagtggttgttgccacgcattgaagattttcagcataaatggcctgatatcgatgttcgcctggaaactagcctgaagttaatggacttcactgcacagggtatggatgtgggtattcgctatggtctgggacaatgggaaggattgaaggcagaatgcttgatgtcggaggaggttttcccggtgtgcgccccctccctcatatcggtgaatcctgcgattaactgtctaacgggagtcactgagcaaacgcttattcacgatctgtcgatggagcaacacaaagattttatcacctgggatcgctggttacggcgttttaacgttcagtcgatagcacgtaaacccgccttgcggataaataactccgcagcagtacttcaggcagctattgatggccacggtatcgctctggcacggagcataatggttgatgatgacatcaaaagtgggcgccttattcgcttatgtcccgatgtttcgctgacaagcccgctatcttattatctggtatacaggcccggatgcgatagtctgccgaaaattgccaattttcgagcgtggataattgagcaagctcaggcgtttaatcacgccataaatcccggcaacctctccagcaaaatcgaaccactgtaa

SEQ ID NO: 242837 - DNA, 1593 bp, Klebsiella pneumoniae
gtgagcagcaaatttatcgacgcccatgaggcggcgcggtgggtcgccagcggcgacaccgtctgcaccgtcgggatgacgcttatcggcgcggcggagtctattttaagcgccatcgaagcgcgctttctgaccgcgggcgaaccgcgtgacctgacgctactgcatgccgcggggcaaagcgatcgccagcgcggtatccagcactttgcccatccgggtatggtgacccgccttatcggttcgcactggggcctggcgccgcgctggatggcgatgatcaacaacaacgaagtggaagcctggtgcctgccgcaggggcagatcgttcatctctatagcgcgatggccgccggactgccggggcggctttctcccgtcggtctcggtacctttgtcgatccgcgcatagagggcggaaggatgaacgcccgcacccgcgaacgacccaatctgatcgagcacgtcacgtttcgcggcgacgaatatctgttttatacggcccttcctctggacgtggtcattgtgcgcggcacccatgctgatgaagacggtaacctcacgaccgatgaagaggtgatgaagctggaagtcctgcacgccgttctcgccgccagacgctacggggcgaaggtgctggcgcaggtgaaatatcgcgtagcgaaaggctcgctgcatccgaaaagcatcaccgttcccggcaacctgatcgacgccattgtggtgtgcgaagagccgcagacggatcaccgccagacttcaagctgggccttcgacccagcgctgtgcggcgatatccagctgcccgccgcgcagaatgcgccgctgccgctggatctgcgcaagcttatcgggcggattgcctgccgctatctgacccccggctgcgtcatcaatctcggcaccggtattcccaatgacgtgattggcgccatcattcacgaggaacagctcggggagcaggtcaccatcaccgtcgagtcagggatctacggcgggcagcaggcgggtggcgtggattttggtatcggccgtaatctgagcgcgatgattagccaccaggatcaaatgctctactacaacggcgcaggggtcgacatcacctttatgggcgccggcgagatggacccgcacgggcacgtcaatgccacacggctcggcgcatcctgccccggcgcgggcggttttatcgatatcacccagaatgcccgccatgtcgtgttctgctcctcttttaccgccaaagggctggagatcgcctgtgaacacggggcgctgcatatctgccgcgaaggcgaggtgcgtaaattcgtcgccggggtaaaccagatttcttacaacggcgaactggcccgcaccaaaggacaaaccatgcattacgtcaccgaacgggcggttttcgaactgcgcccggaaggaccggtgctgacggaaatcgcccccggcatcgatcttgagcgcgacatcctggcgcatatggattttcatccggcgatcgccgcggatcttcaggttatggacagccgtttgttcaccccgccgccctgcggtctcgcggaacatctgtcccggaattcatcctctgactcataa

SEQ ID NO: 242838 - DNA, 735 bp, Klebsiella pneumoniae
atgaaacttgccagtaaaaccgccattgtcaccggcgccgcacgcggtatcggctttggcattgcccaggtgcttgtgcgtgaaggcgcgcgagtgattatcgccgatggtgatgcacacggcgaagccgccgccgcttccctgcgcgaatcgggcgcacaggcgctgtttatcagctgcaatatcgctgaaaaaacgcaggtcgaagccctgttttcccaggccgaagaggcgtttggcccggtagacattctggtgaataacgccggaatcaaccgcgacgccatgctgcacaaattaacggaagcggactgggacacggttatcgacgttaacctgaaaggcactttcctctgtatgcagcaggccgctatccgcatgcgcgagcgcggtgcgggccgcattatcaatatcgcttccgccagctggcttggcaacgtcgggcaaaccaactattcggcgtcaaaagccggcgtggtgggaatgaccaaaaccgcctgccgcgaactggcgaaaaaaggtgtcacggtgaatgccatctgcccgggcttcatcgacaccgacatgacgcgcggcgtaccggaaaacgtctggcaaatcatgatcagcaaaattcccgcgggttacgccggtgaggcgaaagacgtcggcgagtgtgtggcgtttctggcgtccgatggcgcgcgctacatcaatggtgaagtgattaacgtcggcggcggcatggtgctgtaa

SEQ ID NO: 242839 - DNA, 1338 bp, Klebsiella pneumoniae
atgtccgcaataaatgaaaaggcggtaaacgggacgcagctgcaacgcacccataaaaaaatctaccgccatttgatgccgctgcttatcgtggcgtacatcatcagctttattgatcgtaccaatattggcatggcgaaagcgaccatgtcggtggatatcggcctttccgcaaccgcattcggcctcggggccgggttgttttttctcacctacgcagtgctggagatccccagtaacctgtttctcacccggattggcgcacggcgctggatagctcgcatcatgattacctggggcatcctctcctgcggtatggcgtttgtcaccgggcctacgtccttttacgtgatgcgccttctgctcggcgccgccgaagcgggactctatccgggcattatttactacctcaccctctggtttggccgcgaagagcgcgcaaaggccaccggcctgttcctgctgggggtctgtctggccaatattatcggcgcgccgctgggcggattgttattaagccttgatggcatgtccggctggcacggctggcagtggatgttctttatcgaagggctgcctgcgatagcgctggcgttcgtcgtctggcgcagactgccggataaaccagccgacgcccgctggctggacagcgacgatgtgcaagccattaacgcggtactggcgaaagaagccgaggaaacgcgccatacgccgagccgtttctccctgaaaaccgcgctgtccacccgagtgtttttgttgctggtgctgatttactttacccaccagttttcggtttacggcctgagttatttcctgccggggatcatcggtagctggggccagcttactccgctgcagattggtctgctgaccgccatcccgtggattgccgccgccgcgggtgggatcctgctgccgcgattcgcccgcacggaacagcgttcccgcagcatgctgatggccggatatctggtcatggcgaccggcatggcgattggcgccattgccggccacggtgtggcgctgcttggcttctcgctggccgctttcatgttcttcgctatgcaatccatcatctttaactggctcccgtccatcatgagcgggcatatgctggcgggcagcttcggcctgctcaactgcctcgggctgtgcgggggctttctcgggccgtttattctcggcgcgtttgaggaccgcaccggtgcggcaacgtccggcttatggttcgctgtcgcgctactgattatcggcgcgctggtgtccctgtttctcaaaagttcctcatccccaggctccgtatcggcgaaacaggcccacggcgaaaaagtgtaa

SEQ ID NO: 242840 - DNA, 879 bp, Klebsiella pneumoniae
atgcgcattgaagtgttactggatttaaaaacccgactcggcgaaagcccggtctgggatgtcgaacagcagcgtctttggtgggtggacagcctcgacgggcgcctgtccgcctgcaacgcgcagggcggcgcgatcaagagctgggacgtgcgacagaaaattggctctttcgccctgcgccagagcggcgaaggcgcggtggtggcgctgcagaatggcgttcatctgctcgacttcgccagcggcgagctgacgctgttgcaccatccggaagcggaccgaccctttaaccggctcaacgacggcaaagtcgatcgtcagggacgctttctgttcgggtcaatggatatgcgcgaagaggaaccgagcggcgcgctatatcgcctggaccccgatctgtccctgcacgtgctgaagaaagacattatcgtctctaacgccccctgctggagcccctccggcgagaccttctattttgccgatacctggacgggcgaaatctgcgcctgggactacaacaccgcgaccggcgatctttccggcgaacgggtcttttgccatgtcgatcgcagcgaaggcggcgcggcggacggcgccaccgtggacagcgaaggctatctgtggaacgcactggtctacgcgggcaagctggtgcgctataccccggagggcaaggtcgatcgcatcattgagatgccggtgaaaaaagtgaccagcgtgatgttcggcggcgaaaaccttgatgtgctgtacgtcacctccatggcgcagccgcccctgccgcgcttcccggaagataatcagctgcgcggcagcctgttcgccatttacgacctgggcgtgaccggcgtagcggaacggcgcttcgccggctaa

SEQ ID NO: 242841 - DNA, 1371 bp, Klebsiella pneumoniae
atgctgtcgcgacgccgcggagtaaacacgactatgacaacaatcaatcacacacctgccggcgaacaacgtggcaaaaagcggctgatacatcgcttctcctgggtttcgctactggtttgctggctaatctgggtgcttaacgcctacgatcgcgagatgatcctgcgccttggcccggtcatttctaaggagttctcgctctcgccggaacagtggggcaatatcgtcgccctgatcatggtagcccttgcggtgctggatattcccggctccatctggagcgatcgctacgggtctggctggaaacgagcgcgctttcaggtaccgctggtgctgggctataccgcgctgtcttttatttccgggattaaagcgatcagccacgggctgacggcctttgtgctgctgcgcgtgggcgtcaaccttggggccggctggggcgaacccgtcggcgtcagcaacaccgcggagtggtggccgaaagagaagcgcggttttgcgctgggggtgcatcataccggctatccgattggcgcgctgctgagcggcgtggtggcaagcctggtgcttgccacgtttggcgaaggcagctggcgctactgcttcctgctggcgctgctcgtcgccatcccgctaatgatcttctgggcaaaatattctaccgccgaccgcatcaacacgctttatcagcatatcgacagccaggggttgacgcgcccggcgacgcaggaaagcagccatgtcgccaaaggcgaagggatgaagacctttttacgcaccctgcgcaaccgcaatatttcgctgacggcgggcaataccctgctgacgcaaatcgtctatatgggcattaacgttgtactgcccccgtatctttatcacgtctccggcctgtcgctggcggcgtccgccgggctgagtattatcttcacgcttaccggtaccctgggtcaggtaatctggccctggctgtctgatagctttggccgtaaacgaaccctgatcgtctgcggtctgtggatgagtatcggcattgcgctgttctatttcgccaccaatatgccgcgccttatcgccattcagctattttttggcctggtggccaacgccgtgtggcctatctactacgccatggcgtcggactccgccgaagaacgcgccacctctaccgctaacggaattatcaccacggcgatgtttatcggcggcggcatttcgccattgcttatgggctggctcattcagtttggcggcggctgggaaaatccagcgggttatatctacgccttctttaccatggcgggatgtgcgctgctggggatgttattacagctcatgaccaccgataaaacgccgcgcaaagcgcattaa

SEQ ID NO: 242842 - DNA, 1176 bp, Klebsiella pneumoniae
atgaagattgttatcgcgctggattcgtttaaaggtagctgtagcgcgcaggccgcttgcgcagcggtagcccagggattgcgccgggttgaccagacgctggagctggtcgaaatgcccgtgtccgacggcggagagggactgctgtcgactctggcggatagtccgttgcttaagggggcggtgtggcaacagcagcgctgtacctcgccttacggtctctccgtgcaggcggatttcctgatcctgcccggcgagcgggccattatcgagatggcgcaaagctgtgggctcgaactcacgccgccagcgcagcgggatgtgcgtcaggccagcagctacgggctgggcgaacaggtaaaggcggcgctggacgccgggtgtcggcacttgattatcggcctgggcggcagcgcgaccaacgatggcggcatcggttttgcccaggcgctcggcgcacgattctggcgtaaggacggcaccctgctgccggctcccgcggcaggtcaggacctggcgcatattcagcgcatcgatttgagcggtctggacccgcgtctacagcaaagcgaaatacaggcctcctgcgatgtcactaaccctctgcttggcgagcatggcgccacctgggtgtatggggcgcagaaaggcgcggacgaggcggcgctctgcgaactggaggcgggaatggcgcattatagccagctgcttacgcaaaccctcggattcgacgtcagcggacggcccggcgccggggccgcgggcggtatgggggctgcgcttatcgcctataccggcgccacgctgcgtccgggcattgacctggtgctggagctgcttaacgccgacgaccatcttcgcgatgccgcgctgacgatcgtgggtgaaggctggctcgatcggcagagcgcctttggtaaggccccggtgggcgtggcaggcaaagccgcacgccatggcgtgccggttgtggccctttgcggcgggcgtgatgagagcagccggcaattatatcaacaccatattgacgcaatgtggtctatttgccagcgccctatggcgctggcagagtcgatgaacacatgcgaaccgctcctcgccgacgccgcggagaatgttctacgaacctttctgagcgggtggcgcggagaggcacataagcggataactgtatga

SEQ ID NO: 242843 - DNA, 1158 bp, Klebsiella pneumoniae
atgattattacaacagcgctggctaatgaaattgtcgcccgggcaatggcgataattcatcataacgtgaatgtgattgaccatcatggacagatcattgcctcaggtgaacggcatcgtatcggcgaacagcatgaagtcgcccgggaggtaatacgcaccgggaaacgcatttgtattaacaacgccgcggaagccgcgcgttttcacaacgtgcatcctggtattaatcatcccattatctatgacgatcgcgtggtgatggtggtaggcatcagcggcgatcccgcggcgataagccgctatgctgaactggcggtgctcaccgccgaactgctggtccgccaggccatagagatgcgggaaaccaactggcggcaacgtctgcgtgacaccttgttttgtcagtatctggaacaaggggctacgcccgccgggcaagaagcgcttcatcgcctgctggaacttggtttcgattttgatacaccgcgggttccgatcgtagtgaccgtgcaggtcgaacagcatcagttaagcgacatactgagtacgctgttgcgggaattctcgcagctctccggcgtaagtgacgttattttgctgggcagccatgaaatattgatcctcaacgcgctaagcgaagcccaggaaaccctgctgcggggcattgagtttgtactgagtaatcagataagccattactatatcggaattggcgtgcaggcggacagcgccccggacattcgcgaggccattcggttcgcccgctcggtgatcgaagtgggtagcaaagtgcagccgcagcggcagatctactactttcgcgaaatggcaatgctctgccttttcagggtgctggaagacagctatatggtcaatttttttatcaataacgtacgccagctgcttgagcatgattccggagaagtgctgctggataccctgagcagctttattgccaataatgccgaaccgggcaaaacgtcgctgctgttggggattcatcgtaatacgctcacctatcggctgcagcaaattaaaaagcatatacagctcgatccgatggtcttcaccgacctgacgcagctggcggtgtcggtacactgttatcgccggctgaatccgcgccagagcgaatggattgatagcttaagctaa

SEQ ID NO: 242844 - DNA, 876 bp, Klebsiella pneumoniae
atgagtacattaccaaaggtcgcggtgctgggactcggcgccatgggacacgcttttgccagtaacctgctgaaaaacggctttaccgttgccggctggaaccgttcgccagcccgcggcgaagatttacaggcgcatgggttatctctgcacgccacgccgcagcaggcggtggccgatgccgaggtgatcatcagtatgctcgccgacggcgaggccaccctcgaggtactggcgcaaatcgcgcccgcctgtcagccgcaggcgatctattgccagatgggcaccattggcctgccggagacccggcaggccatcgcgttgttgcgggaacttcagccagcgatgacctatattgatgccccggtgtcggggaccaaagcccccgcggagaaggcacagatcctggtgctcgccagcggagatcgggaaaagggcgccgctgccgaaccggtgtttgcggctatctcccgcgggacgcagtggtttggcgaggcgggcaacagccagaaaatgaagctggtcctcaatgcctggctgatttcgatgatgcagggcatcgcggaaagcgcccagctggcgaagacgctgggcttcacccccgaccagctgtggagcgccctggaaggcggcccgctggcggcgccctatgtcaaagtgaaactggacgccatcgccagcgagcagtttaccccgcagatgcagctggcgcatgccctgaaagatgcccggctggcgctttccctggccgagccgcacaccatgccggggctggaaaacatcgccgaactgtggcagcaggcggcggacgcgggatatgccggagaggatttgtctgcggtatatcagtggctgtcgccgtcgtcaaaagcgtag

SEQ ID NO: 242845 - DNA, 885 bp, Klebsiella pneumoniae; identical to SEQ ID NO: 236162

SEQ ID NO: 242846 - DNA, 588 bp, Klebsiella pneumoniae
atgttcgatttacacacgatctctttcctgttgatctttattgccgccgggctggtcaaaggggtgaccggcatgggattgcccaccgtggcgatgggcctgcttggcctgctgatgccgccgcaggccgcagcggcgctgctggtgcttccctcgctgctcaccaatctctggcagttactggcaggcccggcgctggcgcagattgtacgccgtctctggcttatgatgaccgggattattattggcacgttggccgggtcctcactgctgatcggcctcaatcctcggtggtcggcgctggcgcttggcgccgcattgatagtctatgccgggtatgcgctctgcagtccggtgtttcaggtttccggccgcgtggagaagtggctgtcgccgctcatgggcgggctgaccggcgttatcaccggggcgaccggggtatttgttattccggccgttccctggctacaggcgctgggctttcgtcgcgacgagctggtgcaggccctggggttgtcgttcaccctttccactctggcgttggcggctggcctcgccctgcacgatggctggcatgatgatgcatga

SEQ ID NO: 242847 - DNA, 699 bp, Klebsiella pneumoniae
gtgatttataaaaagattgccactgaactgaaggcccgcatcaacagcgacgactatgccgtcggcgatatgctgcccagcgaaaaagcgctcgccgcggagctgaaggtctcggtgatgacgctgcgcaaagcgctggcgctactggaggaagaaaagctgatcgcgcggcggcacggcagcggaacctgcattgtgcgtaaaagtaactatcatggcggggaactggagggctttaactaccagatgcaggtggtgggcgtcaccaactaccgtaacaaagttattgaatttacgctgcttgatgccccgccagccattgcccagcagttaaagatccagccgggggagaaagtgtattacgtcagacggctgcggctgatcgatgaggtcccaatcctggtggaaaacagctatatccccttcgccaccttcccctggctcagcgtgggtaacctcgagcagtctaagttcaactatttcaaaaaagagtgccatatcaccattatcgagagccaccgcagctataccccggtgctggcgacccgtgagcaggcggagctgctgcaggtggcgccaaacagcctcctgctgcgggtgcagtcgatcagctacgcccagaaccgggcgatcgtcgatttctcagagatctaccagaacaccagtaagtacaatgtgaagcacattacccgccgctag

SEQ ID NO: 242848 - DNA, 1533 bp, Klebsiella pneumoniae
atgattggagtgaaaaagcttcaggacttttccaaggcgatgatcgggccggtgctgtatctgccagctatcggcctgttgatcgccctgttcagcatgacgaccaaccggctgtgggtggatgaaagcagcgggctctacctggtggggaaatttgtctccagtatgctctgggcgctgatgaaccatcttgggtttctgttctgccttgggctggccagcggtctggcgaaaacccgcaaggccgaagcggccttcgtggcggccatgacctggctgatgtacctggcggcgaataatagctggctaaccctcacccatcgcctggcgaccggagccaccaacgcgcaactgtacggcagcggacaaacctttatcttcggttttcaggttatcgatatgggcgtattccttgggattatccttggctgcgctgtcgcctttgtccataatcgcgtgattgggattgagtttcgcggcgcgctgtcgatctacggcaacagtaagctggtgctgatcgtgatgctgccgctggttggcatgttcgccatcgccaccgtctatctctggccggtagtggagctgggcatctcggcgctgaccggctttatgaaatcctttggcgccatcggggtcttcctgtacggctttctcaaccggttcctgatccccaccgggctgcatcatctgatctggtcgccgttcgtttttacctctatcggcggtcagctgctgatcgatggtcagaccgtcattggcgctaagcctattttcctggccgaaatcgcccgccaccccgttgacgcgctcagtgattccgcccgtttcctcacctatgggatggtgaagatttttggcaccgccggcatggcgctcgccttctaccgtacggcgaaaccggagaataagcagcggctgaaagtcacgctgatccccttgattgttacctccgtcctggtggggatcaccgaaccttttgagtttctctttatcttcaccgccccattgctgtggcttatctactccctgctggacggttttttccagatgctggcctggctgcttcacgtcagggtctgcgccactaacggtctcatcgatttcgtcgtctataacctcccggcgggagtcagcgcgacgcgctggccggtgtttgtcgccctcggtctgctggaaaccgcgaccatgtacctggtcggcaccttctgtattacccgtctgcggctgctcaccccgggccgcgaaaccgcagccgaagatgagcattcgcaacaggctaatagcgagcatccggataaaggcgcgctggtgattgccgggctgggagggaaagagaatgtctgtgcggtgggcaactgttttacccgtctgcgggttgatgtgcgggaccccgcccttatccagcagacgctgttgaaagagagcggcgggagcagcgtgctgattaaaggaaaccatgtccaggttatctatggcctgggagttaacaaaattcgaacggcggtcaacgccagtctgggtgttactgaataa

SEQ ID NO: 242849 - DNA, 1329 bp, Klebsiella pneumoniae
atgaaagataattttgtggtcaccattgccggcggcggcagtacttatacccctgggattgtgatgatgttactggaaaatatgtcccgctttcccctgcgggagatccgtctgtacgacaaccatcaccagcgtcagaagactatcggcgacgcctgcgccatcctggtggctgaacgcttcccacaggtgaagttcagctataccaccgatccgcaggcggcctttaccgacgtcgatttcgtgatggcgcatattcgcgttggcctgtatgagatgcgggaaaaggatgaaaagatcccgctgaaatatggcgtgccgggccaggagacctgcggtccgggtgggattgcctacggtatgcgctcgattgccggggtgctggagctggtcgattatatgcagcagtacgcaccaggggcctggatgctcaactactccaacccggcggctatcgtcgcggaagcgacccgtcgcctgcggcccgacgcgcgcatcatcaacatttgcgatatgccggtggctatcgagggtctgttcgccgacatcctcggcctgccgtcgcgcaaagcgctgaacgttcgttactatggcctgaaccacttcggctggtggaccagcatcaccgataaagccggtaacgatttgatgcccgcgctgaagcgtcacgtggcggagcagggatacagcagcccaaaagaagactttcagcataaggcgccgagttggatcgagacctttaaaaaggtgaaggatgtgtttgccctcgatccgtcgacgctgcctaacacctatctgaaatactatctctacccggactatgaagtggcgcattccgacccggagtttacgcgggccaacgaggtgatggccggacgcgaaaaagaggtctttgatatggcccgggagatcacccgtcgcggcacggcggaaggcgcgcatttccatgccggggcccatgccacctttatcgtcgacctcgcctgcgccatcgcctttaacacccaggagcggatgctgttgatcgtcgagaacaacggagccatcgccaacttcgatgagacggcaatggtggaagtcccctgcctggtgggcgttaatggtccggaaccgctggcgatggggaaaatcccgtcattccagaaagggttgatggagcagcaggtggcagttgagaaactggtggttgacgcctggattgagggcagttaccagaaactgtggcaggccatcgccctgtcgaaaacggtgcccagcgcttcggtggcgaaagctatcctcgatgaactgatcgtcgccaacgaaggctactggcccgcactgcactga

SEQ ID NO: 242850 - DNA, 1446 bp, Klebsiella pneumoniae
atgtcatttataacaaacctgaaccagcaacagagaaaacgacttcatcagatcaccttagtggccaccttcggcggcctgcttttcggttacgacaccggcgttatcaacggcgccttttcctcactgaagcagtacatggcgctgaccccaaccaccgaagggctggtaatgagcgttctgctggtcggcgccgcgctgggcagcgtgtttggcggcaaatttgccgattacttcggccggcgtaaatatttactctttctctcctttgtttttctcatcggcgcgttgctttccgccgcggcccccgatatcactaccctgctgattgcccgcgccctgctgggctatgccgtcggcggcgcttcggtcaccgcccccacttttatttcagaagtggcgcctaccgagatgcgcggcaagctgaccggcctgaatgaagtcgccatcgtcattggccagctggcggcgtttgccatcaacgcgatcattggcatcatctggggccatctgccggacgtctggcgctatatgctgctggtacaagcgattccggccatctgcctgttcgttggcatgtggcgcgcgccggaaagcccgcgctggctgatcagcaaaaatcgtcatgatgaagcgctgcatatcctcaaacaaatccgcccggcggaacgcgcgcagaaggagtacgatgacatctctaccctgatcaaaattgaagcttgtaataagtacagcgcccagagcacctttgcgacgatcgtcaaaacaccctggatcctcaaaattttgctggtcggcattacctgggccgcactgcagcaaaccaccggcgttaacgtcattatgtattacggtacggaaatcctgagtgccgccggtttctcagagcgtacttcgctgatctgcaacgtgctgaacggtgttttctccgtgggcggtatgctgatcggggtgctgttccttgtcgaccgcttcaaacgtaagacaatcatcatctacggtttcgccattatggcaaccctgcatctgattatcgccgctgtcgattacaccctggtgggtgacctgaaagctaccgccatctggctgctgggcgcgctgttcgtcggcgtgatgcagggctccatgggctttattacctgggtggtattagccgaactgttcccgctgaaattccgcggactgtcgatggggatctcggtatttttcatgtggatcatgaacgcggtggtcagctatctgttcccgctgctgcaggcaaaactgggccttgggccggtcttctttatcttcgccgccattaactatttagccattcttttcgtggtctttgccctgcccgagacctccaataaatcgcttgagcagttagaagcagagctgtcagcaaaccatgaagataaaaaatccactcgtctcaccagggaggttggttatgatcgataa

SEQ ID NO: 242851 - DNA, 444 bp, Klebsiella pneumoniae
atgatcgataacatcacgctggataatctgcatattggctgcaaagccagtaataaagcggaagtcatcgccatgatcggcgcggagtttaaagccaaaggctatgtcaatcaggaatgtgtccactttctgctggagcgtgaacatcaggtctcgacctttttaggcaatggcatcaccctgccgcatttgccgaaatccgcgacggatatcattcttaaaaccgggattgagatctatcagtttcctgatggcgtaatctgggatcggagcaatgtaatgtttattgccatcggcgtgatcgcgaaagagaaagagcatattgacgtactcaaggaaattgcctcgatatttagcgatgagctgatcgctaacgcactgtcattaatctccgacaaacatgatttcctgaaaattctgcagcataacgccttgccccattaa

SEQ ID NO: 242852 - DNA, 240 bp, Klebsiella pneumoniae
atgtgtaatgcgtttaacggtattgcgattgtcctctgctttcgtggcataagcatcgtcaccggtttcagcgaggcgatctggcaggtcatcatcacgctggctattatcatatcgacctggtacagcgctaactattttgctgcgctggaagctcgacgcgataaacgacgctatctgctactggcctgggtggtcataaccattctgttgaattttattcaccttggcggtggttaa

SEQ ID NO: 242853 - DNA, 141 bp, Klebsiella pneumoniae; identical to SEQ ID NO: 212292

SEQ ID NO: 242854 - DNA, 930 bp, Klebsiella pneumoniae
ttgagttcagggagcatcacaacaggtcgtacgagcgggctgctgacgctggcgattggcgcactcttctacagcagcggcagtattgcccggccggatcttcagccgctggggccgaacattgcggataaagggtcggcgttttaccactttacacaacgccagtatgactctgccgatggcgaacgtcactaccgggtatggaccgcagtgccggacaaagccccgcccgccgccggctatccggtactgtatatgttggatggcaacgcggtgatggataaactcgacgacgcgtttctgcagcagctcttcgccggctccccgccggtaatcgtcgctatcggctaccagaccgcgctgccctttgataccgcagcccgcgcctgggattacaccccaccgctaaagacgaatgagcctcgcgccgggaaacccgcgctaccgccgcgtaaaaccgggggcaatgatgtttttcgccagctgctgaccgaaacgatggttccccagacggaagctaacctgaaaatagatccccaccagcgcgctatctggggccactcctacggcggattgtttgtgctcgacgcgtggaggaaggcttcgccgttcgggatctactattccgccagcccgtcgctaggtcaggccctgcaatcgcctttgcaggcaagccaaagtcttgatgccgtccgctttcgcgggaaatcgctgtacctactcgagggtgacggtaaagcccgtggagagccgtccgggcacgaggcctcgcttgaggtgttgcgtcaaacccaacagcagcttgccagtaaagggttgaccgtagccttctggcgctaccccggcctgacgcacggtcagatgttcgaggtctcgctgcgctcggcgctgctgcatctttccgggcaggcagcgcttgcgcatcagtaa

SEQ ID NO: 242855 - DNA, 1656 bp, Klebsiella pneumoniae
atgagtaacgatcacctgacggatattgcctatcgccactttattgaaagcgttaaagattatgccatctatatgctgagcgccgacggcacggtcattagctggaatgagggcgcccgccgggcaaaagggtacctgagcgatgagatcatcggtcgctacttcggtctcttctatagcgaagctgagcaactctccggtgtacccgcaaaaaacctggaaatcgccctgcgtagcgggcagtttgaaggggaaggctggcggtatcgcaaagacgggtcccgattctgggcgcatgtcatgatcgataccatccgcgatgagcagaacaccctgctgggttttgccaaaattacccgcgacattagtgaacagaaggcgattaacgaccgcatcgcctggatggcgcgctacgatgcgttaaccggtttacccaatcgggtggagttttttgaacgggtggagaagctgatcactggaaatgatgcccgccgctttgccattttcacgatcgatttagacaaatttaaagagattaacgatctgcagggccatctgattggtgaccagctgctgcagcgcgtggcgggcgccgtgctcaaaacgctgcagaaggaggagatggtcgcccgcttcggcggcgatgagtttgtggccgttaaacctttttccgatgagggtgaagtggatgcctttgctgcgcgcctgtggcactgcttcagcggtaagcagacgtttgccgcgacggaagtggttctctccgccagcattggcatctcagtctacccggaggacggcacggatattaatacgatactgagcaattccgatctggctatgtatcgggcaaaaagcagcctcgaccataagatttgctggtatgaacgtgaaatggatgacaagacgcggcagcgcaatatgatggccgccgatatccggcgcggtattcacgccggggagttttcgctccactatcaggctatccgcaacatcaaagatcgtagcatcaccggttacgaggcgctgctgcgctggcagcatccgcagctggggacgatcccgccggacgtgtttattcccatcgccgaagagagcggcgccatcgtgcccttaggttactgggtgctcgagcaggtgtgtaacgaatcgctggaaaatggtttgaacagaaaagtttcggtcaatatctctccggtgcagttgcgtcatcgtagctttatcgaaaaagtccgcgagatcctgatgcgtaccgcctacccggtcagtctgctggagtttgaggtcaccgaaacggcgtttgtgatcaataaacagctggcgttcagcgttctgcatcatctgcaaaaaatggggatcagtattgcgctggatgactttggcaccggttactcctccctgagcatgctgcgcgattttcatttcgacgtcatcaaactcgaccgcagctttatgacagatgtggagagcaaccctcaggtacgctcattcgtgcgagccattatttcgctgggcaattcgatcaatacgccgcttatcgccgagggggtggaaacggctggacaactgcagatcctcgaagaggagggatgtgacgaaatgcagggatttctgttcggcgagccggtcgatatcaaacacctgcccgaccggcgctga

SEQ ID NO: 242856 - DNA, 249 bp, Klebsiella pneumoniae
atgttgcgtgattatttaaaagtggaaaaagaagaccagcttgttgaacaacagagtcggcatgacaatagccagcattattcttcggtgaccgaatgggttattttaagtaaagatggccagcgcaaaggccgggtatccctgttcgaccgcttcaccacccgccgctcctggagcgacagtttccgcattacgcagttcgataatgcgggtaaagtggtggtggataaactcactgacgcgctgtaa

SEQ ID NO: 242857 - DNA, 219 bp, Klebsiella pneumoniae; identical to SEQ ID NO: 134601

SEQ ID NO: 242858 - DNA, 783 bp, Klebsiella pneumoniae
atgccatcaataatcattaaaaccgccgacgaactcgcccggcagcgccatgccggccagctgctggcgtcagtgtttgatatgctggatacttttatcgttcccggcgtaacgacgatggcgattaacgatcgagtggaagattttatcgtcaaccagctgcacgcccgcccggccagcaaggggcaatacgattttccctatgtgttgaacacttccattaacgatgtggtgtgccacgggatccccaaagcgaccgaacatctgcgctccgggatgattgttaacgtcgatatcaccctcgagaaagcgggcatgattgccgactccagtaagatgtacctgataggcgatgtctccccgctggcccgccggctggtaaagactacctatgaagcgatgtggaaaggcattgaggtggtgaagcctggcgcgacgctgggcgatattggccacgctattcagcgctgggtggaggaacatggctatagcgtggtcagagaatattgcggtcacggcgtcggtcaggaaatgcatgaggaaccgcaggtgctgcattacggccgccccggagaaggcgccgtgctgcaggaaggcatggtgttcaccattgagccgatggtcaaccagggcgacagccgtatcaaaaccaaaaaagatggctggacggtggttacccgcgataaaaaactctccgcgcaatgggagcacaccgtggccgtcaccgccaacggttttgaggtgctgacgttacgcgacgatgaacagtcgcggatccgctga

SEQ ID NO: 242859 - DNA, 288 bp, Klebsiella pneumoniae; identical to SEQ ID NO: 134599

SEQ ID NO: 242860 - DNA, 564 bp, Klebsiella pneumoniae
atgaaagaaaaaggcaccctgctggttgttggttcactgctggccttaagtctggctactgtgaccaccgcccgcgcggcgggtacactgaatttcaccggtaaaattattaacgagtcctgccagatcgccaataacggtggcgatgttaatgtcgattttggcaacgtcgatatgtcggcgctgaaatcccatgaagcgaaaaccgcagaaacgccgttcactatcaacctcaccggttgcccactggcgcagaacatcagtatcagcctggaaggtactccggataccaacgctaacggcaccagcgccgccgtgctggcgctctctgacgccgcggataccgccaaaggggtgggcattgaagtcttctcttcccctgacggctcaacggaaggcactcagctgacctttgacaagcagagcaaaacggcggtttcgcaagccgacgaaaacggtgatattgcatttaactttattgccgatctgaagagcgattcctcacaggatgtcaccgccggcaatattaatgccacggccaatattgatattgtgtacgaatag

SEQ ID NO: 242861 - DNA, 696 bp, Klebsiella pneumoniae
atgcagtgttataaagcggcttttatcctgagccttctcttttgcccgttcctggcgtctgccgccggggttgccattgccggcacacgtgtcatctataatgaacaaagccatgaggcagacatcacggtaaaaaacaccaatcctcacgatccggtgcttattcagagctgggtagacgatctggctgataataataaatcaccgtttatcgtcaccccgccattgttccgtctggatgccggagacagcaacgatctgcgcgtgttattaacctcggcgcaactgccaaacgatcgggaaagtttgttcaccctgaatatcaaagtgattcccgccaataccgcgccggctggcaagaacattctgcaatttgctataaagaatcaactgaagctcatttatcgcccggcagggctccctggctcggcgctcgacgcggcgcagcacctgcgctggcgggtcagcggcaaccacctgcaggcgaagaatgcctccccctattatgtgactatcaccacgctcagctgcgcgggccagaaccagaaaacgccgcttgagcgcagcgtgattgctcctcacagccgtgaagagtattccctccccggcgaggcctgcgcccgcgaggtgagctggcgcattctggatgactttggcgctgtgcagacgtttagcgcccccgtttcggcgcactaa

SEQ ID NO: 242862 - DNA, 2502 bp, Klebsiella pneumoniae
atgcgccatggcccggctcataccgttaccgtcgtcagcctctccatcctgctgggcggacagagcgcgctcttgcacgcccaggcgacctttaatatggatctgctggagaaaaacgaccatttgccggcagtggatctgcaacgcttcaatcagcaggcgggccagccgccaggcgcctatccggtgagctggcaggtcaacggcgtcacgctggacgcccgtaagaccgtcacgtttcgccagaacgatcgcggacagctcacgccctgccttaagccggaagatctgctgcaggccggagttaacccggccgtgctgtcccaggcgaccggcgcaacgtcccgctcatgtcccgaactcaacgcgctgctgccgggcagcacggtcaatttcgattttgctcatcagcggctggtaatgaccattcctcaggcgctgatgacgcaccgggcgagggataatgttccctctgcgctgtgggacgaaggtattagcgccttccagagtaactatcgttattcaggcgccagccagcgtacccgcgagggcagcaccgagcgcgataactatctgatgttgaaaagcggcgtgaacgtcggcgcctggcgcctgcgcgccagcaataacctgaccgccaacagcgatgataagccccagtggacgaccagcggcgcctggcttgagcgcgacctgacgcgctggcagagtgaactgaccctcggggataccttcacgtcgggcgatgtgtttgacgcggtacagtttcagggaatatccctcgcctccagcgatgcaatgctcccggactcgcagaaaggttttgccccgaccatccgcgggattgccagaaccaacgcccaggtcacggttcggcaaaatggctacgtgctgtatcaaacctacgtcacccccggcgcgttcgtgattgacgatctttatcccaccgccagcagcggcaatcttgaggttgccgtcaaagagtcggatggcgaaatccgccgcttcacccagccgtatgcttcggtgaccagcatgcagcgcgaaggcagcctgaaatacaacctggtcgccgggcgctaccatagcgacgatgccagccagcggccgttgatgatgcagctgtcgctgatgcgcgggttcgcccacaacctgacgctgtttggcggactgcagagcgcggcgcaataccataacctctcgctcggcgcaggacagggtttgggagaagccggggcgctctcgctgcagctgttaaacgcccgcgaccggcaccagcaggatccgatcgatggccgggcctggcagctccagtacagcaaaggttttgatcgtctcggcacgcagttgactttcaccggctggcgttattcgcatcagcgctatgccacgctgagcgaggcgttttccagcccgggtagcgacgacgacctgcaggatagcgacaacaaaaaagcaaccctgcaaatcaccgccagccagagcctgccgtacgatatcaccctctatctgagtctcgaccaggacagctactggtcagggggcgccacacagcgtaccgccaatatggggatcagcagccaggttcacggtatcgcgtggtcgctcagctacagcgactcccgcagcagccacggtgacgaggaggatgacgagccgcattccgacaaagtagtgacgttatcactttccgtgccgttgagccacctgctgccggggagctatgccggctataccctgacctcctcccgccacagcgttggcagtcagatggtcagcctcaacggcacattgctggacaatcacgcgcttagctacgccgtcagccaaacccgcgatcggcaaaacgggtccagcggcagcctgacggccgggtacagcagtggaagaggcgatctgaatctcggctacagccacgattcgcaggccgctcgtctgaactacggcgccagcgggggcattctgattcaccgccacggggtagtctttgcgccggaaatgaatggcgctgtcgtcctgattgacgccggtggcgccgggggtgtgaccctcgccaaccagaaaaccatcgccaccaatggtgacgggtacgccgtgctgcccttcgccaccgcctatcaccgcaacgacgtctctctcgacagccattcgctgccggagaatgtggatctggccaacagcaccgtgacgttggtccctaccaaagacgcggtggttctggcgcgctttcacacccacgttggctataaggcgctgtttacgctgcagtcgcggggacaaccgctgccctttggcagcgaagtacgcgccaaagacaccaacagcatcgttgccagcgagggtcaggtgtacctggccggcctggcgccaaaaggcaccctttatgcgcaatgggggccgggccctcagcagcgctgtagcgcccgctacgatctcaccccgacgctggcgcagaccccccatccactcattttacagcagacgttatcatgtcctttttaa

SEQ ID NO: 242863 - DNA, 1005 bp, Klebsiella pneumoniae
atgtcctttttaactctcctgcgtcgggtcgccatgacgctgttatttattctgttaccggccgccagcggatgggcctgtacgccagtgtttgtccgcggccaggcctccacccttcggctgaacgtggggcagctcacggttccggctgacgccagacccggcaccccgctgtatcataaaagtttcgcctggaaccgccttagcgacggcggcgaacagtggatccgctgcgcggacgatccgcacgggctgtcaccgctgctgctggacagtctgctgtccgggggagtgacgcgaccgacggtttatcaaactaacctcgccggcattggcgttcgcgtatcgctgcgcgctatcggcggctatggcggctttcctgaccggccgacgccctcgccgtttagccaacgggtggacaatcccgccgccttgcccgatgcggtgtggaaactgggctatttccgcctgacgattgagctcattaaaaccggtcccgcggcgacgccgggcgagcttgagtatcacagcgagcgctttttaatggcggagcataccccgctggccgcgttagacttaaccggcaggatcagcaccgcgggatgttcagtgaatgacgccacgccagccctgattaagctccctgcggcgatgcttgaccacttcggcggcgtcggcaaaaccaccggcgacacccctttcgcgctgcagctggattgcaacagcgcggtcacgatttccctgcgagttgacggcgcggagcccctctccgcccgggggcatggcgttctgcgcaatgacgccaccgacgatcgggcgcagggtattggcgtgcagttgctttaccatcgtcagccggtcgtactgaatcatgagatgacgctgggcagcgcgagcgcgggccggtttaccctgccgctcactgcccgctactaccagacacgttcccggatcaccgccggtcaggtgtcggccgtcgcgacctataccttgcattatgactag

SEQ ID NO: 242864 - DNA, 1293 bp, Klebsiella pneumoniae
gtggcgctggcaggcgcggcgctcatcgccgctggcatgctgttcagctgcaccagtaaagcccctaaatcccttgtcacgccgccgaacgctgccgccgtcaaagccgggcaggcgcaccgggagccggtgcgcggcgtgtggctcaccaccgtttcgcgccttgactggccgccggtcgggtcgattatcgccagcacgccggagagccgcatcacgcagcagaagctggcgctgatcgctaaactcgataacctgcagcgcctggggatcaacaccgtctttttccaggtgaaaccggacggtacggcgctctggcggtcggatattctgccgtggtccgatatgctgaccggcaaaatcggcgaataccctggctacgatccgctgcagtttatgctggatgaagcgcacaagcgcggcatgaaggttcacgcgtggtttaacccctaccgcgtctcggtcaacaccaaaccgtcgacgattgccgagctggacaacaccctcacccaggtaccggccagcgtgttcgtcctgcaccgtaactggatccgcaccgccagcgatcgctttgttctcgacccgggcattcccgaagcgcgtgactggatcaccagcatcgtcgctgaagtggtgcagaactacccgattgacggcgtgcagttcgatgactatttctataccgaaaccgcctcttccccgcttaacgacaacgtgactttccgccgttacgggcagggctatgcctcgaagggcgactggcggcggcataacacccagcagctcatcgcccaggtttccaccaccatcaaaaagctcaatccgaacgtcgagtttggcgtgagcccggccggggtgtggcgcaaccgctcccacgatccggcggggtccgatacccggggcgcggccgcctatgatgaatcctatgccgatacccgcagctgggtgcagcagggactgctcgactacatcgcgccgcagatctactggccgtttgcccgcgatgccgcgcgctatgatgtgctggccaactggtgggccgaggtggttaaaccgacgcatacccggctgtatatcggcgtggcgctgtacaaggtgggtgaaccgtccaaaaacgagcctgactggacggtggacggcggcgtgccggagctgaaaaagcagctcgatctcaatgagactctgccgcagatccagggcaccatcctgttccgcgaaaacaacctcaatcagccgcaaacccggcaggcggttaactatttgcgcagccgctgggggcagccgcagagctag

SEQ ID NO: 242865 - DNA, 1323 bp, Klebsiella pneumoniae
atggcgacgcttaccacctggatgaacaatgtgcgcgtgggaaccttaacccgccaggctaacggggcgcacagttttcgctatgaggaagagtggctgcgcagcccgcgcgccagaccgctctccctctcactgccgctgcagtatggcaatatcactgccgacgcggtgtatcactattttgataacctgctgcccgacagcccgcaggtccgcgaccggatcgtcaggcgctatcaggcgcgctcgaagcagccgttcgatctgctggccgaagtcgggcgggatagcgtaggggcggtgaccctcctgccgccgggggaagaggcgcacctggaaggattacgctggcagacgctggacgaggcgcagctcaccgctttgctgaccgcttaccagtcggatatccccctcgggatgattaccggccaggacgatttccgtatctcggtggccggcgcccaggagaaaacggcgctgctgcggatgggcgagcagtggtgtattccgcagggcgccacgccgaccacgcatatcattaagctgcccatcggcgagataaagcagcccaatgcgacgctggatctgcgtgaaagcgtggataatgagtatctgtgcctggcgctggccagagaactgggcctggcggtgccggaagcggagatcatcgccaccccgcggatccgcgccctggcggtaacccgcttcgaccggcgctgggcgcaggagggacgggtgctgctgcgtctgccgcaggaggatctgtgtcaggcttttggtcttccttcagcgatgaaatatgagtctgacggcgggccgggtatcgccgcgatcatgacctttctgctgggctcgagtgaagcgctgaaagatcgctatgactttatgaagttcatggtcttccagtggctgacgggggcgacggacggtcacgcaaaaaacttctcaatttacctgttgcccggcggcagctaccgcttaacaccgttctacgacattatttcggcgtttccggtgctgggcggcacgggactgcatctgcgcgatctgaagctgtcgatggggctcaatgccacaaaagggcgtaaaacagagattaacgccatctatccgcgtcattttctggcgacggccaaagcggtgaactttccccgggagcagatgctggcgatcctccaggagtttgccgggcatgtgccgcaggcaatcgaaagcgctcgccggacgctgccggcggacttttccagccacgtctggcaggccattacagagaacatgctgaagctgcacgcccgcctgcagcaagggctgcaggcgctatag

SEQ ID NO: 242866 - DNA, 288 bp, Klebsiella pneumoniae
atgatggtgaggaacaaggcgatgaattccccgcagatatacagtcccgtgcagctggccaattacctgaagctgctgcgccagcagaatcactggacccaggatgcgctggccaggcggatcggcattaagcaggcgacactgtccaattttgaaaatcaccccgacaaaaccaccttaaccacgctgtttaagatcctccagtcgctgggggtggtgatgatgctgaacgccaaagctgctgagacggcgccggctcccgataacaacacggaccttgactggtaa

SEQ ID NO: 242867 - DNA, 327 bp, Klebsiella pneumoniae
atgagtaccctgagcacccatattctggatatttccaccggtacgccggcggaaggcgtaacggtcagcctgagtagggagggcgagacgctggcgaacctggtgaccaacgcccaggggcgtatcgccacctttagcgccgcgccgctgccggcggggcgctattgcttaacagcggaaaccggggcgtggtttgcccgcgccgggcgcgagagcgtctttacccgggcgcagattgattttgttatcggcgaggcggcagaggaccatttccatctgccgtttctcatcgccccgggcgggtggtcgacctaccgcggcagctaa

SEQ ID NO: 242868 - DNA, 501 bp, Klebsiella pneumoniae
atgatcgcgctgagtcagtttaacagcctgagtacacatgaggcagtggggctgctggccccttgcgtggcgatcccggcctggggcgagacgctggtgagcttacgacctttcgccagccgccatgcgctgctgcaggccgcccgggaggcgatggctaactggggagaggacgagctgaacgcggcgctcagcgcccatccgcggatcggtgaaaagccgaccggcagccaggcgcacgcggcgctgtcgcgccaggagcagtcgtcggtggacagcgagaatgagcggctcgcgcaggccctgcgggaggggaatgcccgctacgaagcccgctttggccgggtgtttttaatccgcgccaaagggcgcagcggcgaagagatgttgcaggcgctgacgcgccggctgcagcataccgccgacgaagaagtggccgaggcgcttgcccagctgcgagagattacgatgttaagactggaaggagtgattggcgaatga

SEQ ID NO: 242869 - DNA, 1380 bp, Klebsiella pneumoniae
atgtctgacgaacatcacagtggcctgctttacggccttgaacagcggatcccaccgcttccggcctttttcagcgctctccagcatgtgctggcgggcctggtggggatcatcacgccgccgctgatcatcggcgctaccctcgggcttggcgactggctgccgtatctcatcagtatgtcgctgctggcctcgggcatcggcacttttctgcagtccaatcgggtatggggcatcggcgccgggatgatctgcatgcagggcaccagttttgccttcctcggcgtgacggtggccggagggatgtgggtaaaagcccagggcggcgggccgcaggatatgatggcgatgctgtttggcgttaactttgtcgccgctctggtgccggtgattgtcagccgctttatcgaaccgctgaagaaaatctttactcccatcattaccggcagcgtgattgcgctgatcggcatcagcctgatcaaggtcagcgtcatcaactggtgcggtggggaaaaggccgaggatttcgccagcatgagcaatatcgcgctcggggcgggcaccctcggggttatcgtcctgctgagctgcgccaaaaaccgctggctgcggctctcctcggtggtggtgggcattgccgtgggctgcatcgcagcggggctgagcggtcagttccatcttcacagcctgggcgacactctgtttcgcctgccgacgctgtttccgttcggctttcagtttaacagcgcgatatttctgccggtcgccctggtgtcgctggtctgtattctggaggcggtgggcgatctgacggccaactcgctgatttcacaacagtctgttgacgatcgcgcttttcgtaaccggctgaagggcggtatcctggcggatggcgtcagctgtatggtggcggccatgctctgtgcttttccgaacaccaccttcgcgcagaacaacggcgtgatccagatgaccggggtggccagccgctatgtcggacgctacattggcgtgattctgatcctgctcgggctgttcccgccggtgggcgaactgctgcggcagatcccggcgccggtgctggggggcgccacgatggtgatgtttggctgcgtagtggcggccgggatccggattattacccagaccccgctgagccgtcgcgatgtgctgatcgtggggctggcgtttggcgcgggtcttggcgtggagtcggtgccggcgtttctcagccattttccgccgatggtcggcgatctgttcggttcggcagccaccagcggtgggctggtagcgatagcgctgaaccttattctgccgcaggagcaggcggcgacgaaaacgataaggagtcaggatgatcgcgctgagtcagtttaa

SEQ ID NO: 242870 - DNA, 1155 bp, Klebsiella pneumoniae
atgaaagcaatcgtgattggcgccggcatcggcggtttaagcgcggcagtggcgctcaaacagtcggggatcgactgcgacgtctatgaagcggtgaaagagatcaaaccggtcggcgcagcgatttccgtgtggcccaacggcgtgaagtgcatggcccacctcggcatgggcgacatcatggagaccttcggcgggccgctgcgccggatggcgtatcgtgatttccgcagcggcgagaacatgacccagttcagtctcgccccgctgatcgaacgcaccggcagccgcccctgcccggtctcccgggcagaactgcagcgggaaatgctggattactggggacgggacagcgtgcagttcggcaaacgcgtcacccgctgtgaagaagacgccgacggcgtgacggtatggtttaccgacggcagcagcgccagcggcgatctgctgattgccgccgacggcagccattccgcactgcgtccgtgggtgctgggctttaccccgcagcgccgctacgccggctacgtcaactggaacggtctggtggagatagatgaagcgctggcccccggcgatcagtggaccacctttgtcggcgaaggcaagcgcgtctcgctgatgccggtctccgccggccggttctactttttctttgatgtgccgctgccggcgggtctggcggaggatcgtgacaccctgcgcgctgacctcagccgctactttgccggctgggcgccgccggtgcagaagctgatcgccgccctcgacccgcagactaccaaccgcattgaaatccatgatatcgaacctttcagccgcctggtgcgcggccgcgtcgcgctgctcggcgatgccggacacagcaccaccccggatattggccagggaggctgcgcggcgatggaagatgcagtggtgctgggcgccgttttccgccagacccgagatattgcggccgccctgcgcgagtacgaagcccagcgctgcgaccgggttcgtgacctggtgctgaaggcgcgcaaacggtgcgatattacccacgggaaggatatgcagctcaccgaagcctggtaccaggagctgcgcgaggagaccggggagcgcattatcaacggcatgtgcgaaaccatcctcagcgggccgctgggctga

SEQ ID NO: 242871 - DNA, 924 bp, Klebsiella pneumoniae
atgagtccattttcccgtttcgcgcactatttcatcgccgtggcccgctacggcagcctgcgccgggccgccgagcagctgcatatttccgcctcggcgattaaccgccagatcctgcaggccgaggaggccttcggcaccccgctgttcgagcgcctgccggagggactgcggatgaccaccgccggtgagttgctgtatgacaacctgctgcgctggcaaaaggagtttcgccagacgcggcagaaattcgatgagctgcaggggatgaagcgcggaagcgttagcgttggcatggtgcaggcgctggcggaagggggcttcgccgccgcgctggcggagatcatcgccagctggccgtggctggagctggatctgcaggtggctgacagccacaccgtcagccagaaagtgcgtcaggcggacctggacgtcggcctgatcctcgatccgaaggggcaggctggactcagcgtgctggcctttgccgaactggaggtggggattgtgatgcgtccggaccatcccctggcgggggcgaaggcgctgtctttgggcgagctcagcctggagcggcatatcgtgcccggcacgccgctgatcgtccatgagcgggtggcgctcctctatcgccaccatgactttgcgccggagaataccatcagctgcaatgatatccggcttatcaagtcgttggtgctgcgcggcagcggcgtgacgctccttagcctgctcgacgtgctggacgaggtccagcgtggacagctggcctttatcccgctgcgcagtacgctgctgcgaccgctgaccctggcgctgtgtactgcgccctcgcgtcagctttcgcggcccgcgcaaatggccattcagacgctgagtgtggtgatcgaatccatggcgacggtcagcccagcggcccgctga

SEQ ID NO: 242872 - DNA, 1038 bp, Klebsiella pneumoniae
atgaagacaaccacccccacgccccccgcccattgcacctttgatccagaggactggctgcggctggcccgctgctggcacccggtggcccgcgcctgcgatattgccggcgccccggtgaaagccaccttgctggacgaacagctggttatctatcgtattaaaggccaggtggtagtcgcccgcgacgtctgcccgcaccgcggggtgccgctgaccctgggatttcatgaagaggaaggtatcgtctgcccctatcatggcctgcgctttggcgaggatggccgctgcaaccgtatcccctccagtccggggcaacccattccggccaaactgcatctcaccagcttcgccgtggaggagcgctacgggctgatctggacctgcctggcctgcgatccggacaatccgccgccgttaccgaccatgccgcactgggacgacgccggctttcagcaaatcaactgcccggccttcgaggtaaagggatttgccggccgccaggtcgaaggctttctcgatgtcgcccacttcgcgtggatccacaccgacaccttcgccgatccggacaaccagcaggtgccggactataccccgcaggagacgccgttcggctttgttgccgactactggagctcggtgggcaattacccggccagctccgatttccgcgcgccggaagggttccagtggctgcgtcactttgaaatgcatctgccgttcaccgctacgctgaccatccattttcccgccgacgccaggctggtgatcatgaacgccgcctcgccggtgtcgtcccgggtgacgcggatgtttgcccctattgcccgcaacttcgatctgcacgtgccggtggaagacgtacatgcgttcaacctgcgggtatttgaagaggaccgcctgatggtcgagacccagcgtccggaacggttgccgctggatctgaccctggaggcgcatattccggcggaccgcagctctatcgcctaccggcgcgggctgaagaagatgggctttggcgatttctttctggtatga

SEQ ID NO: 242873 - DNA, 975 bp, Klebsiella pneumoniae
atgcgcgacatactcccggtggtggtcgatggcctgtggcgccagggcgcgaaaaacctggccgttcgtctggtgagcgccgaggggcaaccgctgccggcgtggacgcccggcgcccatatcgatctccatcttccctgcgggctgatccgtcagtactccctgaccggcagcccggccgaacgggatcgctatctgctctgcatcgcccgcgagtcgcagtctcgcggtggctcccgttatattcatgacaccctgcgcccgggacagccattgatgatctctgccccgcgcaaccactttccgctgcacgagggcggccatgtggtgcttctcgccgccgggatcggcattacgccgctgctggcgatggcccacgcccgggcggcgtccggcgccagctttacgctgcactattacgttagccgtgcgcaggaggccgccttcgccaccgagatcgcccgccagctaacgggtggaatctgccagatccactgctcagacgaggggcagagtccgcgccagcggctggcgcaggatctgggggctccggacgccgacacccgggtctacttctgcggtccgcccggatttatggcccgggttcgcgataccgcgcgggcggtcggatgggaggaggcgcaattgcacagcgaagcgttccagccgcccgccccgacggcggcgtcggcggcggacggaaccttcaccatcaccctcgcctccaccggggagcgctggccggtgccgggggacaaaaccatcgcccaggtgctgcaggagcatggcgtcgcggtgccgctctcctgcgagatggggatctgcggcgcctgcctgacgccggtacgcgagggaaccgtcgaccaccgggataccgtgcagtcggaggcggaaaaacaggccgcagagcagcatattgcgctgtgctgctcccgcagcctgtcggccaatttagttatcgatctcgcgggataa

SEQ ID NO: 242874 - DNA, 1239 bp, Klebsiella pneumoniae
atgagttcctgcatagctgctgacgcgagcctgtctcccgccaaacctgcctggcgcgccgtctatgccctggccctcggggtgttcggcctgatcgtggccgagtttctgcccgccagcctgttaacgccgatggccagcagcctcggcgtcagtgaagggatggccggacaggcggtcaccgcgacggcgctggtggctttagttaccggcctgctgatcgccaccgccacccgcaatatcgatcgccgctgggtgctgatgttcttttccgtactgcagatagtctccagcctgatggtcgcgtttgccgattcgctggcgtttctcctgctgggccgtctgctgttggggatcgccatcggcggcttctgggcgatgtccaccgccacggcgatgcgtctggtgccggcggcccatgtgccaaaggcgctggcgatcattttttccgcggtgtctgtcgccacggtggtggccgcgccgctcggcagctacctcggggagctgatcggctggcgcaacgtgtttattctctgtgcgatacccagcctgctggcgctgctctggcagctgtgggtgctgccctccatgcgcccggagagcgtcgggaccttctccacgctgttcagggtgctgcgccgccccggtatgctgggcggcatgctggcgacgatcctgattttcagcggccatttcgccttctttacctacctgcggccgttccttgagaccgtcgcgcaggccagtatcgaaggggtttcgctgatattgctcggcttcggtatcgctaactttatcggcacttcggtggcgaactatctgctgagccgtagcctgcgtctcaccctggcgctggtgccgttgatgatgagcgttctggcgctgctgatggtgacgtttggccatctgtccgtgctcgacggggtgctggtcgccctgtggggatttgccttcggtctggtgccggtggcctggtccacctggctggccaccaccgtgccggatgaggcggaaagcgcaggcggtctgctggtggcctctattcagctggccatcagcgccggcgccgccggcggcggggcggtgttcgatctgcatggcgccagcggcgtcttcaccggcagcggtctgctgctgttgggcgcgatggtgattgttttcgccgccgtacgggtgaaaccggtcgcccgcgccgaccagccggtgacgggccgcttatcccgcgagatcgataactaa

SEQ ID NO: 242875 - DNA, 438 bp, Klebsiella pneumoniae
atgagccagcctgccatcgacctgaccagcgaactgttgcgcggtatgcgcctctccggcgttaactaccggcgcatcgaaaccgcgcgcccgttcggcgtcggctttagcgccgtggcgggtaaagcccagttccatttcatcagccgcgggccggtgctgctgcgcatggccagcggggaacagttcaccctcgagagcggcgatgcgctgtttattcccaacggcgacgggcacgccctgctctcagatccgcaggccacggtggtcaatgtggcgcagctgcccagcgaaacggtgtgcagcacggtaagttgtatcaacgctggcgaccagcctgactgcccggagcgcgccgtcattttcagcggttgtatggactttgagctcggcggcatgcagccgctgggaggtgatgcgggtcagcagcctgcttaa

SEQ ID NO: 242876 - DNA, 516 bp, Klebsiella pneumoniae
atgcgggtcagcagcctgcttaatacctggccggagatccagccgctgctggcggcgatggagcgggaatcgctcacccgccaggcgggctatgccgggatcctcgcccggctggcggacgtggtggccgcgctgattgtccgcggctgggtagcgtgcgggtgcggcaacgccaccggctgggtacaggtcctgcgcgatccccggctggcgaaagcgatctacgccatgcatcagcgcccgggggtcaactggaaagtggaagatctggcgcgggaggcgggtctttcacgctcgctgttcgcggaacgttttctcgccgccaccggcaccacccccgcccgctatctcacagagctgcgtatgcggctggcggtgcagtacatcacccatgaaggccaggcgctggaaaaagtcgccttcagcctcgggtatcagtcgctggcggccttcagccgggctttcaaacgcatcaccggccagccgccgggagccctgcgcgccacggcacgctag

SEQ ID NO: 242877 - DNA, 756 bp, Klebsiella pneumoniae
atggcaaccttgcagtgggaccacgcagtacagtttgtgaatcagccggaagcggcgattgaaatctttgccgggcagcagctgcgggcggtggccggagggcggcatccggggtggggaacccgtaatgcgctgagctattttggcctgacctatatcgaattcctcgccattgccgacccggacgaactgcgcgccgcgacggacaaattcctcctttcgcgcgacgccgcacggctgctgccggagaatgaggcgctgtttcgggtggcgctgcgcagcgacgacatcgacgccacccatgaccagttgcgtcgcacaggggtgacagtgtcaccgattgtcgatggccagcgcaacgatccgcagggcaatatcatccgctggcggatcttcaccatcgatggcgacactgccgggctggtctatccctttgtgctgcagtgggaagaagacgacgccacccggctgacgcggctgcgcgcccagaggctggacgcgccgcatccgctgggcgacattacgcttgagcaggcggtgttcgaggtggtcaatccgcaggcggtgcgcgatcgctggcaggcgctgctgggctttccgccactgggggagcagggactggacgtgggcggccggcaatttatcttccgtgaaggggctgccaaccagctgaccgaactagtgttccgcgtcgccaacccggcgcttaaggggcagcgctttcgtgtcggcaacggcgtgtatcgctttacataa

SEQ ID NO: 242878 - DNA, 162 bp, Klebsiella pneumoniae
atggatggtcaggtggcgatgcatgtgaaagtcgacggcgaggagcagatcatcatgctaaacgccggcgatatcttctacgccggggtgggatgcgagcatgtcgctcacccgcagggggcggcgcgtattctggtgattgagaaagaagggtcggtctga

SEQ ID NO: 242879 - DNA, 264 bp, Klebsiella pneumoniae
atgcacagctcgaaagatcccctgcacggcgtgacgctggaagcgctgctcaatgccctggtggcgcgctatggttgggcggaaatggcccgccaggtcaacattaactgctttaaaagcgatcccagcattaagtccagcctcaaatttctccgccggacgccgtgggcgcgcaaagaggtggaggctatgtatctcgcctcccttgatgatgacgcgccggtggagaaagcggatccctgggcaaactggcagaaaaaataa

SEQ ID NO: 242880 - DNA, 1029 bp, Klebsiella pneumoniae; identical to SEQ ID NO: 134579

SEQ ID NO: 242881 - DNA, 807 bp, Klebsiella pneumoniae
atgaaatatgccgcttttaaactggcaggggtcgcactgtctctttctctggcatggacgtctgcccaggctgccgcgctgcgcgtcgccgcggacccggttccccacgcggagatcctcaactacatcaaaaaaatcgatcccagcctcgatctgaaggtggtggagctgaccagcggggtcaacgccaatgaactgctggccagtggcgatgtggatgccaactacttccagcatgttccctatctgaaggatcaggagaaagcgttgggtaaaacctttgccgtcgcggccaccgtgcatattgagccgctgggaatttactcgcataagcataaagatttctcatcactgccggaaaacgccaccgtggcggtgccgaataacaccaccaacctgagccgggcgctgttcctgctgcaggcgcagaagcttattaagctggaccctaaatttaccgacccggccaccaccctggcgacgccgaaggatattgtcgagaacccgaaacacctgaagattctggagattgaatcgccgcagatcccgcgctccctcgacgatgtcgacctggcggtgattaacggtaactacgcgctggaagccggcctggtgccagcgaaggatgccttggggctggaaagcgccgagcataacccgtacgccaatattctggtgaccaccccagccctggcgaatgacccgcgcattaaggcgctggcgaaagatctgacctcgccgcaggtggcggagtttatccgtaaaacctacaacggctcggtgatcccggtggcccctcagtcatga

SEQ ID NO: 242882 - DNA, 792 bp, Klebsiella pneumoniae
atgataaccatcgaagggctgagcaaaacctacgccggaaccggccgaccggcgctgaacgatatcgcgttgcagataccgaaaggggcaatatacggcattctcgggcgcagtggcgccggcaaaagtacgctcatccgctgtctcaatttactggagcggcccacctcgggccgcattctggtgaacggacaggatattacccagttgaacaaggcggcgctgcgggattatcgcctgcgcaccgggatgattttccagcacttcaatctgctgcatgcccgcaccgtcgctgacaacgtcgcggtgccgctggagattgccggagtgccgagggccgctcgcgaggcccgggtgcgcgaactgctggagctggtggatctcagcgaaaaggccgccgctttcccgtcacagctttccggcgggcaaaagcagcgcgtcggcatagcccgggcgctggccgcccggccggaagtgctgctgtgcgatgaggcgaccagtgcgctggatcccgagaccaccgcctcggtgctggccctgctggcggatattaaccagcgcctcaatctgaccattgtgctgattacgcaccagctggaggtggtgaaaaccatctgtgaccacgcggcgctgctggaacagggcgagattgtcgaaagcggtaaactcgccgacctgctggtgactccatggtcgcggctgcgccagtcgctgctgcacgacccgcaggctgaacaggaatttcttacccgccacggcgttcaggggaggccattatgcggagtagcatga

SEQ ID NO: 242883 - DNA, 672 bp, Klebsiella pneumoniae
atgcggagtagcatgagctgggaagatttgtggccgttattactcgacggcacgctggatacgctttatatggtgggcctggcggccctgtttacggtgctgatcgggctgcccaccggcgtgctgttatttatttcccgcgccaacgggctggcgccgatgccgaaactgaacgcgctgttaggcgcggtgatcaacatcggcaggtcgctgccgtttatcgtactgctgatcgccctgatcccctttacccggctgatcgtcggcaccacgctgggcagcaccgccgccatcgtgccggtaaccatcggcgcctttccgttctttgcccgtctgacggaaaacgcgctcgacgaggtggactacgggagaattgaagccattctgtcgatgggcggcaacgtctggcacgtgatttttaaatccctgctgccggaagccctgccaacgctgctggccgggatcacgctgaccatcgtgatgctgattggtttctcctccatggccggtgtgatcggcggcggtggactcggcgacctcgccatccgctacggctatcagcggtttaataatgaagtcatgtttggcacagtgctgatcctggtggcgatggtccagggggtgcaaatggccggcgatcggctggtgcgtagcctggcccaccgccgctag

SEQ ID NO: 242884 - DNA, 1059 bp, Klebsiella pneumoniae
atgagcaacccgctgctttcgcttcttgatattgattatcccctgattcaggccccgatggcgggcgtctccacccccgcgctggctgccgcggtaagtaatgccggtgcgctgggctcgctggggctgggcgcttcaaccgttgcccaggcggaagcgatgatagtcgccactcgccagctgacggaccgcccgttcaatgtcaatctgttctgccatgcgccgccccggcgcgacgcccggcgggaagccgactgggcaacaacattacgtccccattttgcccgctatggcagtacgccaccggattcgttaagcgagatctaccagacatttgtcggtcatgcgccgatgctggagctgcttctcgacatctcgccggcggtggtgagctttcattttggtcttcctgaacgtgagacgatccagcgtctgcggcggcaggggatcgttaccctggcgacggcaacctcgctgcaggaggcgctgctgattgaacagcaggggatcgacgtggtggtcgctcagggctatgaggcgggcgggcaccgggggatctttgctccgcaggcgcctgacgcgcagctgagcaccttcaccctggtgcaacttctgcggcgtcgactaaccatcccggtggtggccgccgggggcatcatggacggagcggggatcgccagcgtgatgcagttgggagcgcagggcgtacagctcggtacggcgtttttactgtgtccggaatcggccgccgacgccggctatcgcgcggcgatccacaacagccttgacgggcgtacggtgctgacctccgcgatatccgggcgtccggcacgctgtctggcgaatgccttctgtgcgctgggggaaggctatccggcgagcgccgtgccggattatccgctggcgtatgatatcggcaaagcgctggccgccgccgcgaaagcccagggcgtccatgagtatggcgcccactgggccgggcagggggtggggttgatccgcgagtgtgacgccgccagtctggtccgccagctggcggcagagagcggctggaactaa

SEQ ID NO: 242885 - DNA, 846 bp, Klebsiella pneumoniae
atgaaccacagcacactcgagatcttcattcaggtggcagaaacgcagagcgtcacccaggcagcaaaacggctgggccgcgcacagtccaatatcacgacccgcattcagcagctggaagaggagcttgccgttgagctcttcgttcgcggcaacaaaaaaatggtgttgtccccggcaggcgtgcagtttctcagctatgcccggcggatcctgagcctggcggaagaggcaaagcaggctctgcatccgacaaccccaggcggcagtctgcgtctgggcgcgatggaggcgaccgccgccagccggctgccgccgctgcttacccgcttccaacagcagtgcccacaggtggatatcaccctcatcacccaaccgacccgccagttaacccagggggtgttaaccgccgcccttgatgccgcgctggtctgcctgccgccaggggccgatgggcaacctgcctgtcccgacgagctggcattcaccccggtgttttatgaaaccctgatgctggtccgtccgcagaccccgggtccgctgcggttcgcggcatttgccagcggctgcagctaccgcgcgctgggagaacgctggctggcggaacagcaggcggccgtggaggtgcatgaggtcaattcctatcacagcatgcttgcctgcgtggcgtccgggcgctacgcctgcctgctgccgcagagcgtgctgtcgctgatgacgcttcccgaaaactgccttagcgaaccgctgtgcgaggcgaccacccagcttatctggcgcagcggcttgagcgcccccgccctgagcgagtggcgcaagctgctgcaaagcgtggcgattggctaa

SEQ ID NO: 242886 - DNA, 1170 bp, Klebsiella pneumoniae
gtggggtggtggatgaataaccaatcgcgccaggccttatggctggcactggctggatcgatagtactgatgatcggcatgggctatgggcgctttgccttcaccggcgtgctgccgcttatgcttaatgaaggtctgttaaccctgcacgagggcaatctcgccgcgtcggccaattacgctggctatctggtcggtgcgttgctgctggcgcgggtgcagcctggggccgccacccgactgagcattatctccgccgggttgaccatcgccagcctggcgctgctggcctgggtgagctcgccgtggaccattattacgctgcgcgccgtcgccggcgcgctgagcgcgataacgttgattgcaggttcgctgtggctgctggaacatatggggcatcatcacggggcgccgttgctgtatgccggggtggggctggggatatttatctccgcggaggggatcgcccttggacatgccctgagcctcaccagccagcagatctggctgctctgcgcattatgcgccggtctgctgctggcgctggcgatccgttggctgctgactccgccggctgcactggtgcgggcttcccatgttgagacctccctgcctgcgtccgggagcgatacccgtcgcggggcgtggcgactcttgatggtttacggtctggcgggcttcggctatatcatcaccgccacttatctgccgttgtttctgtccggttcgctgcagagcgttgacccggtccatctgtgggcgctgtttggtctggcggccgcgccgtcctgcctcatctggcataagctggtgctaaagtggggataccggcaagcgctgacccgcaacctgctcgtccaggcgcttggcgtgatccttccagcctgcagcgcttcattgctgttttgcgtgctaagcgcgcttttggtgggctttacctttatgggcaccgtaaccattgcgctaccgaaggcgaaaagtctcagccatcaggtgagcttcaatatgattgccgcgatgactgcactgtacggtgtgggacagattgccgggccgcttatcgccggcgcgctgtatcagatcgcggcttcatttaactcggcgctctgtgccgcggcgctggcgctgctgattgccgcagggctggtctttaccgaacgccaggcttag

SEQ ID NO: 242887 - DNA, 423 bp, Klebsiella pneumoniae
atgtcgttctgtcatatgcgcattgccaggccggtcagcgaactggacaccaccgccagcatgtattgcgccgggctgggactcgagctgctcggcagctttaccgatcatgaaggattcagcgggataatgctcggcgcgcccgaagcgggctggcatctggaattcacccactgccgccaccatcccgtccccccctcgccaggcgatgaagatctgctggtgctgtactatccgcagcaggcggcatgggaggcacagtgcgcagccatggacgccgccggatttctgcgcgttacggcgtttaacccttactgggaggtcaatggcgtcactttcgtcgaccgggacggttaccgcacggtattgcaaaaccgcgcctggggcatggtgtgtgattcgtcgggtatggcggcgagctga

SEQ ID NO: 242888 - DNA, 1188 bp, Klebsiella pneumoniae
atgagcacttccgtcagcactacacaactcaatttgcgcattatttcgatcgttgtttttacctgtatctgctatctctccattggtctgccgctggccgtactgccgggctatattcactatcagctgggctacagcacctttgtggccggaattgtgatcagtctgcagtacatatcgacgctggtaagccggccgcacgccgggcgctataccgatatctgggggccgaaaaaagtggtcagccttgggatcgtctgctgcctgctcagtggcgccttcacgctactggcggtagtcctgcaggcaacgccgatgctggccattgccgcgctgctggcgggccgggtgtttctcggcgtcggcgagagctttaccgccaccggcgccaccctgtgggggatcaaaaccgtcggcgcgatccacacgtcacgggttatctcctggaacggcgtggcgacctatgtggcgatggcggtcggggcgccgctgggagttaccctcaatcactattttggcatcagcggctttgctacggtggtagtgctggtcgcggccatcggtctgctgttcgctcgtacccgccaggacgtcaaggtgaccgccggcgccagagcgccctttcacgcggtggtgcgaaaaatctggccttacggcctggggctggcctttggcaccgtcggtttcggcgttatcgccacctttatcaccctctacttcgccgcgcacagctggcagggcgccgcgtttaccctttcgctgttcagcgtcggctttatctgcgttcgcctggtgctgggaaataccattacccgctttggcggagtcccggtctccctggcctgcttcatcatcgaaagtctcggcctgctgcttatctggctggcgccatcagcatggatggccggcgtcggcgcctttctcaccggttcgggtttctcgctggtctttccggctttaggagttgaggcggtaaaacaggtggaagagcaaaatcagggaaccgccctcggcacctactcggcgtttcttgatctggcgctgggcctgaccgggccgctggccggctgggtcgccgggttatacgatctcgccacgctgtatctgctggcggcgatcgtggtggcgctcgcattcctgctgattttccgcgtacatcggcaacagcggcttgtcgccagagagtag

SEQ ID NO: 242889 - DNA, 291 bp, Klebsiella pneumoniae; identical to SEQ ID NO: 135299

SEQ ID NO: 242890 - DNA, 762 bp, Klebsiella pneumoniae
atggccgactggaatccttcgttgtatctgcaatttgacgctgaacgtacccgccccgcggccgacctgctctcgcgtattgcccatctgcaggtcgagcacgccgtcgacctcggctgcggaccgggaaacagcacccgcctgctacgcgccgcctggccgttggcgacgatcgtcggtatcgataactccccggccatgctggtccaggcggcgcaggccttacccgactgcgaattcattgatgccgatattgcccgctggcggcctgcgcaaccgccagatgtgatctatgccaacgcctctctgcagtggctgacggatcatgagacgcttttcccccatctggtaaaccagctggcggacaacggaacgctggcagtgcagatgccggataactggcaggaaccttcccataccctgatgcgtcaggttgccagcgagatggggttgccggaccgtggacgccagccgttactcccgcccgccgcctggtacgatctgctcagccgccagggttgcgaagttgatatctggcgcaccacctattttcatccccttgcttctcatcaggcgattgtcgactggctgcagggcacggggttacgcccctatctggcaggcctggacgagcaggccggaagcgcgtttctcacacgctatctcgcattgctggccgcacactacccgttacagtgtaacgggaaggtgctcctgcgtttcccacggctgtttatcgtggcgcgaaagatcgccgcctga

SEQ ID NO: 242891 - DNA, 321 bp, Klebsiella pneumoniae
atgagtactcctcctgtcgatcgccgaacgctggctgctatcgcgccaaagctagccgagcttaccgaaacggtgctgtttggcgatatctgggcgcggagcgagctgtcgccccgcgaacgcagcctgatcaccctttccgccctgacggcgcagggcaaaactgaacagctgccgtggcacatcgcgttcggctatcagaatggcctgagccgggaagaaattgtcgaattgtttacccatctggcgttctatgccggttggccggcggcggccagcgccctgacctgcctgaacgcgcaggaggcgtcatgcccctga

SEQ ID NO: 242892 - DNA, 381 bp, Klebsiella pneumoniae
atgcccctgacccgaatttcgcttggcaccgcctggcgtcccgcggagtttgctcaattgtcggcgctctttcatgagtgtctggtggcggagttcgacgttccgtcagcagatagatttcagtttatcgaacgggccgccgatgagcagcgcatttacgacccgcactacctcagcgaaggacgcagcgcccgcttcgtgctgtttcatattttcgccggaaaaccgcgcagccgggcgcagaaacagggactctatcgtcggctctgcgcgcggttagacgatgagatggcggtcagcccgcaggacgtgatggtggttatccagtttaaccaactggaggactggagttttagcgcagggaagatggcggatgaatga

SEQ ID NO: 242893 - DNA, 483 bp, Klebsiella pneumoniae
atgtcaaatccagcatatttatggttaactgatgagaatgattcgcctattataggttcttgcctgatgcccacacgcacgggttccatcgaattgcgcgcagtgaatcatcatgtttggttacctaccgataataatacaggaaagctgacgggaacccgtcttcatacaccggttaaaattcaaaaagagtttgacagaacaacacctttgttatttagggctctttgtgaaggtcgaacattaagatcggcaacgctaaaaatgtacagaataaatgaggcgggactggaagttgaatattttaacatagcgatggcgaatattaagattacggcaatcacaccaaatttacatccggccggaatgacaagtactcaccttgaagacattgatttccgttatgagacgatcacctggatatacacagaagggaacatcatgtatcgtgattcatggaacgatcgctgttgtgcatggtag

SEQ ID NO: 242894 - DNA, 195 bp, Klebsiella pneumoniae; identical to SEQ ID NO: 212252

SEQ ID NO: 242895 - DNA, 372 bp, Klebsiella pneumoniae
atgaaagtattattgtcaattaaacctgaatttgttgaaaaaattcttaatggaactaagaaatttgagtttcgaaaagggattttcaaaaacccagatgttaaatctgtggttatttactcgacaatgcctgtagggatgattgttgctgagttcgatatagctgatgttatcgaaggcaaacccagtaacgtctggaaaaagactagtcgctatgcggggatcagtaaacagttttttgactcttactttcaaagtaaggaaaaagcctttgcgattaagattggtgatttaaaaatctatgaacagccacgtctgttaagttcattaggggacaacgtcactgcaccacaatcttaccgatatctatga

SEQ ID NO: 242896 - DNA, 828 bp, Klebsiella pneumoniae
atgaatgagccaatcactgagcagttatacaataaagttgtaaatttcgttaataaaatggatgggagtgtgcgctttgattatatttctaagtccttgcgcattcctcctgacactcttgatgaaattgtggacaggatgattgctgatggagtcgttgttaatacaggaacggtaggtgaatatttaccagtaaaacacgcatcttccaaaaatactgataaagataatcgatgctgtacatctcaaaaaaacaatgatagtagtggactaaaatttattgttgggagagtagcattagttatagccataatattttttattataacctgcttttatgcttacagagcaccgatatcatttgtttttctaatcccagccataatggctgcatttgtttttacaaaccaaaatcatggtggagaaggtttcctagggttgagttcaatctctgcatgtttaatctttttgctccttactaatgcgcagacaccaatatttggagaagcatatgaattaagaaagcagagggatgaaattaaaaatgaagttgctaggaaatcaaaggaagaagatcagcaacagctaaatgatatccttaacgccagagagcatataaaagggatgctaaaagacccctcctcagctaaattttctggtgaattcattgggaaaaatggtgctatctgtggccatgtcaacgctaaaaatagttttggtggttacactggggagtctcgttacatattttctgtcaatttttctgcaatagatgaaggcaccacctcctttaataaggagtgggagagacagtgttatcttaattga

SEQ ID NO: 242897 - DNA, 1062 bp, Klebsiella pneumoniae
atgcctgatcgctcaagtaatccgcccaatgcatatcaacaactcaataatcctggcgcagcaatcactcagctgaccagagacattgctgagaacaatgcaaacacgacccagaagagtatttccagcattggtaccctggcctcaggacccgtattagagctttctgatagtgctcaggatgtgctgtatgctctttttttccgaggcgcactcgtatctggtgatattccttcaaaagctggcgcctccgcactgcgttctctgggatttgccgagaccggccatacagccacgtcatacaaaggggaagactatttcacctggctgactcctgcggggtatgcgttcgccattgggtatctggttaacactcgcttcggcaaacatcctgcaaatgcaatagcttccgggcagccatcggttcatccagaaggattaagcattcacaaagccatgattaaaggggcgatcagaagcgcagcccatgtttgcggcaataccatcgagcaggaaacgctgtcgaaggttctggccaattcactgcataacgtttcccatgagaaagctggcgatgttgctgaacaactggccagggccgttaagtctgcgtttagtgcgctggggaatgcatccagtgaacaggacaaggtacgacctaaagaatcggacttatccgtcggtactttcaaaatttatcgcgatggaaaggtgaagatagcttcaggctctcccttaacggctgaaatagaaaccgagcgtgaagatcgcaaaatagcagggaccattaatttaaaactggagctggatacctctgatgccatcgaaggcattaatgggctgagcaaagaaatttcagatcttgttgatactgctattgccgatgcgctcaagccgggaggacggttgtgggaggccattcgtcactccagcggagagtccctcagcacgcgtgtagataatcttgaatctagttaccacgccgcatgcgctctgattagtgatttgtctcgccgtatttcagaacgtatcactggtgacgtccatgccagcccggtctaa

SEQ ID NO: 242898 - DNA, 135 bp, Klebsiella pneumoniae; identical to SEQ ID NO: 199869

SEQ ID NO: 242899 - DNA, 1062 bp, Klebsiella pneumoniae; identical to SEQ ID NO: 242897

SEQ ID NO: 242900 - DNA, 1500 bp, Klebsiella pneumoniae
atggcgatgtatgaagtcggtaccgtcacgggtgccgcgtcgcaggcacgggtgacaggtgcgacaacaaaatggtcacaggaggcgctggggatactgcccgggtcgattctggtggtctaccgcagcggtagtgctgacctgtatgcgatcaaatccgtggacagcgacacgcaactgacgctgacccggaatatcaccaccgcattttccggtgccagttacggcattattaccgctgaaaccgccagcacctcgtcgtttgctaaccagctggccagcgcgtttgcattctggcgtagtgtagtggagggctggtcgatggccctgaccggcagcggcaatatcaccctgacagacccgatcacaggaaagcaggtgatcgtgccggcgatagccgggatggcgaaggcatcggatcttaacgcactggcaaaactcaccggaggaaacaaactcgacggctcgcaggttataaccagcgataatgccggttttattttgggcaggaattcagatctggctctgctcaaaaaacaggggcaaggcgggacaattgccgttggctcgggaacaccgttcagggttcaacgttcaagagcgaccactgtatcaccgtcagacacctatgatgacatcctcgttattggcaccaacaaccagacgacgttgcccggagatttggttgtcggtggtggtttcgataatacggcaaagggcaagctgtattcccaggcgttagagctgtcgatgggcactccgtacatcgactttcattttaactacagcaccgacgacttcaccgggcggattatggccactgccgccgatcaaattagtgtacaaggtagtcattggcgagttgacagggatcttcgtgttggtggtatggcagatattggagggtgggcgcaatgcggagtcgacctttcggccaacagaacagactttggttcccctgctgatggttcgttggtttcaggcggacgtattcgatccagaatgctgggacgcggcggtaacggtgacacctccggggcgtggggcggtttctatgttgaagagtacgtgggaaccgaacacaggattatcatgtatatggacggcttcgggagaaccgacgcatggtcattccgcgcaggtggggtaatttccacgcccaagggcgacgtcatgacgaccggttccgacgtgcgactgaaaaccgacttcacacaagcgcctggaaacgcctcagagcgcattgaacgcttaggggtgtgtgagtaccggatgaagggggaaacgcgccggaggcgtggttttatcgctcagcaggctgaaaaagctgatgatctgtatactttcctcggcatcgagcaggagattgatggcgaaaaatttaaggtgatgaatgtggattacacggcaatcattgctgacctggttacggtggcgcagggtttactggttaaaaatcaggaactggaaaggcgtatatctgtactggaggggatctga

SEQ ID NO: 242901 - DNA, 894 bp, Klebsiella pneumoniae
atgagaaaattaatcgtagttgcttccgttgcagccggtttactgaccgggtgcgaccagaagagtactggcaagcgtgaaaccctgtctgaagcgcttgttgctaagtcgctttctgacatggttcccgttaagggcggcgagttcttaatgggggattttggcccattagtcggtcaaaaactacctttcagcataaaccaggatgataaggtattacataaggttgtattaagtgatttttcgatatcaaagtttaaagttaccaacgatgattataataaatatctgcaaataacaggggtaaaaaaatcacccatccatatttttttaaaaaattatccatccttgcaaaaaggagattattctgttggtgttacctgtcaacaggcaaaagactattgtcagtggttaggtaaggggtctggtaaaaagattgatttaccaacagaggcgcaatgggaatatgcagcaagatccagaggtcaatactttcagtttccaacaaataatggtgagtatttacctggaaaaaatgttccgggtaaagatgaattagataaatatacagatggttttggtttcccattttacccagtaggcaaatatcccccaaaccccctgggtctgtatgatatggggctcagtggctctgaatggactaatgactggtatgcagcagattattactctcattcaccggtaaacgatccccagggacctgcgcagggtactaaaaaaatcctgcgtggatatattggtggcgacagacagtacgctttaaccatgttcaggcaatcaaaattgccagttccgaagatcgataaagacgatgactatgaaaaatatggtgttggtccgcagtatgtatttcgttgtgtcgttaataaataa

SEQ ID NO: 242902 - DNA, 1452 bp, Klebsiella pneumoniae
gtgaaaactttaaaccgtcgtgatttccccggcgcgcagtaccctgaccgtatcatccagtttggggaaggtaacttcctgcgcgcattcgttgactggcagatcgacctgctcaacgagcataccgacctgaatgcgggcatcgtggtcgtgcggcctatcgccacagattttccgccttcgctgaacacccaggatggcctgtacacgactattattcgcggcctgaacgagcagggcgaagcggtcagcgatgcgcgtcttatccgctcggtcaaccgggagatcagcgcttacgcagacttcgacgcttttttacgcctggcgcataacccggagatgcggtttgtcttctccaacaccaccgaggcgggcatcagctaccatgccggggatcggtttgacgacgcgccgccggtcagttatccggcgaaactgacccgtctgttgtttgagcgttaccagcatttcgccggtgcggccgacaagggatgggtgattattccctgcgagctgatcgattataacggcgaggcgctgcaggcgctggtgctgcgctatgctagcgaatgggaactgccgcaggcatttatcacctggctgacctcagcgaataccttctgttcgacgctggtggatcgcattgtgaccggctatccgcgtgatgaagtggcggctctcgaggcgcagaccggctataaagatgctttccttgataccgctgagcatttctacctgtttgtgatccaggggcctgcctcgctggaggccgagctgcgtctcgataaactgccgctgaatgtgcgcattgtggacgatatcaagccgtataaagaacgcaaagtggcgatccttaacggggcgcacaccgcgctggtgccggtggccttccaggccgggatcgacaccgtgggtgaggcgatgaacgatgcggagatttgcgcgtttgtcgaaaaagcgatttatgacgagattattccggtgctggatctgccgcgcgatgagctggtgtcattcgccagcgccgtgacagggcgcttccgtaatccctatattaaacatcagctgctctcgattgcgctcaacggcatgaccaagtaccgcacccgtattctgccgcagctgctggcggggcagaaagcgcatggcgcgctgccgccgcgtctgacctttgccctggcagcgctgatcgccttttaccggggagagcgggatggtgagagctatccagtacaggatgacgccgactggatatcgcgctatcaaacgctgtgggcccgccatcgcgatggccagatgagcactcgcgagctggtcaccgccgtgctcagcgtggcggatcactggcagcaggatctgagccagaccccggggctggtggagctggtgactgccgaccttgactctatcctgacctgcggtatgcgcgacgccgtcaaacctctttgctga

SEQ ID NO: 242903 - DNA, 723 bp, Klebsiella pneumoniae
atgaaagaacgcggaatgatattcaacggggagatggtgcgcgccatcctcgacggtcggaagacacagacacggcggattatggcgccgcagccggctgacgacattgagcgtggcattttccctaacccagaagtaattggctggaaatcctctcggaggcacaagcatggcagcaccactgctcatttttgccattacggaaaaccaggcgaccgtatctgggtgcgtgaaacttggggcgttgtcagtcacgcctttagtgacgatggcttgatgattgactgggttcctgatcgtccagcgactgccatccacgaaatgccgtttggcaatggctattactctggctacgccatttatgcagctgatggtgattttacctggggtgatgacgatggttatgaagatggccgttcgtgctggaaaccttccattcatatgccgagagcagccagccgcattctgctggaaatcaccgacgtgcgggttgagcggctgaacgctattagcgaggaagatgccactgccgaaggtgttccgcctgcaggaagtttgcttcctgattacccgggaacattcctgactccgaaaggtgatttcgcaacggccaaggttgcatttcagcgcctgtgggaatccatctatggcgccgaaaactggcaagccaacccctgggtttgggttatcgagttcaaacgcattgaaggcggtgcagcatga

SEQ ID NO: 242904 - DNA, 981 bp, Klebsiella pneumoniae
atgtcaacacaaataaacacatttcgccatattgatggcgagcataaagcaacgatcatgcagaatcgtggtggacaaaaagtcatcgaacgtatcgttacggcctatggtttcacgtctcgccaagcactctgcaagcatttcggtatatcgcaaagcactatggctaatagatatgcgcgcgatacattccctgctgattgggtattgatctgcagtatagagacaggttcttctatcgagtggctatcgtttggctccgaatcatcagtatcaacatcagagctaaactcaccggaagggcttgctcagagcaattcagtgattgatgactgtgtgcacgtcgcgaagaacccaattgagaccatcataaaccccaatgaaggtggaaaggcggcaattaaacgtttaatcgaggcatatggttttacaacaagacaagccctagcagaccatcttcaagtctcaaaaagtactttggctaacagatatatgcgggacacctttccagcagactggataatcaggtgcacgcttgagacaggcgcatcccttcaatggctttcattcgggattggttctgctttcccagtttcaaaagaaagtgacacaactccgttaaataatgatgcaactactaatgtagttatggtcaaacagaaaaaaatcattgatggggttttatgtgacgataatgtatatagcttggacagagcgcttttagccaaatcgttgaaaaatcctttagtagttagagatgctgataaaagttatttggtagatgaaagctattctgaacttactgatggcaaatggattattgaaattgaaggtaaggtaagcatcaaagatttagttaaaatgcctttaggaaaagttttacttacggcctcaagcccatcgattacattcgaatgcatggcaaaagatattaaaccaattgcaagatgccactattatttaatggtagaaatattttaa

SEQ ID NO: 242905 - DNA, 201 bp, Klebsiella pneumoniae
atgctgaaaaatgaaccctcatttgcgtcgcttctcgttaagcaaagcccggcaatgcactgcggccatggctggattatcgggaaggatggtaagcgctggcatccgtgccactcgcaggatgcgcttctggctgacctgtccactataaaacaggggaaaccatggctattgaaggccctgtggcgactgttccactaa

SEQ ID NO: 242906 - DNA, 237 bp, Klebsiella pneumoniae
atgcgaaatagtgaaacccgcaccacaaaaacaggaccagatgatgctggtttgttccaactgtttaacgcgactcggcttgatgaacgtaaaagctgtgcctttgccgtatccatccgcatggaggcactggcgatccacatcctgcagaaggaaatgaccggaatagaggcggcggagttgctgcgcagtgaagttgcccgttatgaagctgaatcacgtggggactggcactga

SEQ ID NO: 242907 - DNA, 228 bp, Klebsiella pneumoniae
atggctgattccatggatctcgttcagcagcgcgtcgaagaaaatctgcagcgtcatattcagaacgcccgtgctagaaagaccggtacagcccgcgttctttgcatcgactgcgacgcgccaattcctatagcacgcagacaagccattcctggcgtgcagtgttgcgtgacgtgtcaggaaatcgcagaactgaaagggaagcactatacccgaggcgcgctgtga

SEQ ID NO: 242908 - DNA, 2382 bp, Klebsiella pneumoniae
atgcctgagttaacaaaagacaacggcggcccaactgaggctgccggggttttctcatggaatgccccgaaaaaagcagttaatccctatctggacccggcggactttgcgccggtgtccgcgctttcaaacctgatcactctctacgctgcgaacaaagagcaggaacagctgcgccgcgaggcgctgagtgatgaggtctgggaacgctatttcttcaatgaatcccgtgatccagttcagcgtaaaatggaacaggatctgctcatcagtcgcgccaaaatggcccgtgagcagcagcgctttaatcccgatttagtcattctggctaacgtcagcgccgaacctgcccacgtcagcaaacctctactggagaggattaagttcttccaagggctggggaggccgaaagcatattcccgctatctccgcgaaactatcaggccgtgtcttgaacggctggagtgcgtgcgtgaaagccaggtgtctgcctcgttccggtttatggcgagccatgaaggtctggaggggctactgattctgcccgaaatgaaccaagatcaggtcaagcgactgtccacgcttgttgcggtgcacatgagtctctgtctcgatgctgcctgcggcgatctgtttgtgactgatgacgttaagccagaacaaatccgccagtcatgggaaaaggtggccgctgaggctatacgccttgatgtgatcccaccagccttcgaacaacttcgccgcaagaaacaccgtcgtaagccagttccctatgaccttattccgggttcgctggcgcgtatgctgtgtgcagactggtggtatcgcaaactgtggcagatgcgctgtgagtggcgggaggaacagctgcgcgccgtttgcctggtcaacaaaaaagcgtccccgtatgtcagttatgaagccgtgatccacaaacgcgagcagcgccgcaaatcgctggagttcttccagtcgcacgagctggtcaatgccgatggtgacacgctggatatggaagacgtggtgaacgccagtagcagcaatccagcgcaccgtcgcaatgaaatgatggcgtgcgtgaaaggcctggagctgatcgccgaaatgcgcggggattgcgctgtgttctataccatcacctgtccgtcacgcttccacgccacgctcaacaacggcagacctaatccgaagtggaccagcgaaacggtccgccagagtagtgattatctggttgataccttcgctgcattccgcaaagcaatgcataaagctgggctacgctggtatggcgtgcgcgttgctgagccgcatcatgacggcaccgtgcactggcacctgctgtgcttcatgcgcaagaaagaccgccgcaccctcactacgctgctgcgtaaatttgccattcgtgaagaccgcgccgagctgggcaacaataccggcccgcgattcaagtctgaacttatcaacccgcgcaaaggcacgccgaccagctacatcgccaaatacatcagcaagaacatcgacggacgcggactggcgaaagagatcagcaaagaaacaggcaaatcactacgggacagcgctgagcacgttagcgcctgggcatccctgcaccgcgtccagcagttccgtttcttcggtattccagggcgtcaggcttatcgcgagctgcgcctgctggcaggccaggccgcgcgccagcaggcagataaaaaagccggtgcgcaggtactggataacccgcgactggatgcggtactggctgccgccgatgctggatgttttgccacctacatcatgaagcagggcggtgtgctggttccccgtaaacatcatcttgtcagaacggcatacgagtttaacgacgagccgagcgcctacggcgatcacggcattcgcatttatggcatctggtccccgattgttgagggccggatctgcacgcacgctatcaagtggaaaatggttcgtaaggccgttgatgttcaggaggcgacagccgaccagggcgcttgcgccccttggactcgtggcaataactgtccccctgttgaaaaaacgtaccagatagggggcgaactaccaggcagcgaagaacctgcagcgctgccggacttcgaaaacatgagcaaaaaggaactgcgcgagctgacggcaaggctgcggctggttaaaccgaagcgccgaaaaggctacaaacaggaaattacggaacaccaacggctacagctcaatgcggagttgctgtccagaggctttgacgccagtgaaacggaagtggatctgcttctgcgtggtggcagcctaccatctggagccgggctgcgcctgttctaccggaatcagcgcctacaggaggatgacaaatggcgtcaatggtactga

SEQ ID NO: 242909 - DNA, 849 bp, Klebsiella pneumoniae
atgttggtacgaggaacatcatggcgtcaagggcatgttcttaagcatgatgatgccgtttcattaggacttttgacgcctgatgaaacgaaccataaagttgttgtgataacacatgattgtgatttacagagtaattctgaaaaaaacgttgagctcatggttggccccttgaaaaaggggtcaggcaagatgatgagagctaaacacccaagaatactcgatctttgttttgaaaacccggaaagcactaagaagaatgcagttgaactgcggcatgaacggaaagttatcctttcaaaagaggctttccattgtgaggaacatgattcatcctacactatttcggcagaagagaagcaagcgcttaagcaatggttagcagctaaatatggtcgtccggcattccctaactcgtttgaggagcgtctgagagcgtatgacgaggataaaaaagtcatctttgaaaaagaagttgcggaaattatcgccacaaaggcagaacatttgatcggcgttttttttgacttgggtgaagagaggtttgacgatcttgaggaaggtataccgtatgagctttccatcaatgttgtatatgatgcgaccgaaggtggcccagatgcaagggatactgctgaaaaaacctgtgctggtttgaaagatctattttttaaattctatggagacccggctttgggtcattcagagcttatagagctgaatcagtgtaatgctgttgctgatacccacttttcgctatatgcattgaggcgaatggatcaatggagggtggaatatatcagccttgaagacgattcatatggggatttcattggcgcaggcgtttaa

SEQ ID NO: 242910 - DNA, 2265 bp, Klebsiella pneumoniae
atgaccagtattatcgaaacacctaaatggggcgacgttcctctaattacccgcacggataaagtggagggcggtcgcggtggtgcagctaatatacaggcgcaggagctggcaaaccgcaccttgcttttaatgcagacgctggaaggttattccgttggcgaaaagccttacaacaatgaggcagacgcacaagctgatattgataaggggctgattaagcctgatgctatctttaccgtgcgtactgatgatgccgattactggctggatgaatataaaaatattaatggtatcgccacgccaaccgggaaaaagttacccagcgataaaatgctgcaggaaattaaaaataactttttccagtcacgtcatgatggcgatgtgatgctggattttgttgatgatgactggttctcattttttcgcgtgatggcaagtggggcgttcggggccattaactgtatggtcgcgcctgatggtttatatgttaaagacatggcgatgtcgcatgaggatggcgatccagggctgatttatcgcgacccggaaggatttagcgtaaacatcgtcggaccagatggtatcgggcagcgtccgggtacgctgaatggtggcggcaaatttcatactgaaaccacggacagcgcctggttgcgtctggaagatatcgatgggttttattctgacgtagctgaccagtcaggtaaagcggcgcctcatgcgctgagtggcgatggtgagttcacgacgaaagccggtggtatgggatggctgaatcttgaggatgaggaaggttttttcaaagcgctgacggatggggatggcgagctaatcggggtcaaagaaaatcctgttgaaaaccttaacctgattgctgctgatgcacaaaataaagcgtattcgcagaatgttcgtgcccggtataacgctgccgttcagcgtcttgttagtgggctgaatcacctgatcatctacagtcagagcctcggcacgcaacaggagggatggcccgccctgagcaaaacgccggttgagggattcgataacctgatgctgggtgattcaatacgaccggcaagccggactaatgcggagttctcccctgtcggcagcgctacgcttaagcctatgcgggcagtggtgcagtctggcaccggtaatgatttgctgacggatgagcagatttctgcgctgacaccaggggccgggaatgaaggtgaaggcggtgtagcgatggctaacgcgctacgtcgtctctggttacaacgtaattgcctggagcgtgacacctcgcgccggttcgtattatccagcacgggcgtaaacggtcgcagtattgagcagttatcaaaaggggcatcgcctgagctttatcaacgacctttacaggctgtgcagcaggttaaagcactggctgaccagttaggtgttacgtattccgttgcagctattctctggatccagggggaatggaattaccagaaaagggatggctcaaacgataaagaaacctataagcgcaatctcggtaagctgtataacgacatgattgcagatatggccgttggtatcgcaggacaaaaatcccctccagcattgtttatgtaccagaccggcgcggggtatacccgcgatgatgcttatctgtctattggaatggcacagtgggagttttgccaggaaaacgaaaacgcttatatggtcgggccggtttatcactacccggataaaggcggtcacctggggccaaatggctaccgctggtttgatatgaaagttgcgcaggttaagcacctggtattaaacgaggggcaaggctgggaacctctggggccaattaagattgcgagcagtgggcgggaaatttacgtgttttatcatgtaccgtcaccgccgctgacgttcaggccgtcatacgtgaaaaacgtcgctacgatgtatgtcgataaaggttttcgggtgacagataacgccgggacagtcgccatcaccgctgttgaaattgtggcggatacgattattaaaatcacggttggtcgggatatatccggtaatgcaaagttgtggtatggcgataaaactacccacgaaggaaacggtaacgtttttgatagcgacacttttaacgcactggatgattttatttttgaagcgggtactggacagtatgagactgaaaatataccggagctggttggcaagccttacccgctaaacaacgcatcagtgcaattctgcctttctattccttacggagaataa

SEQ ID NO: 242911 - DNA, 744 bp, Klebsiella pneumoniae
atggttatggtcattaaatctaacgtgccgtctaatatcattgctaacccggatggatggaatccgccgttttctaccgagggtttgttatatgccggaatttatgggcggggtagtcttacaaagaactttgctaaaaatggtattgatgctgtgattaacggcgcgccggtagtgaataatcattttgctgaatttaatgcaaatgattttttggataccggtgttgttaatacaaaagaggcaacattgattgttgtggctaaacgcaccattaacgctcgtcgtcaatttttagtttccagttataccggtgatgctaagtttggtcgctccattcttattggtaatggtgacgcgcaggctttaaccgtgtactcgcattatcaggggcaggatgccagcggcgcagataagagcattgcgttttctacggcggttcaactgggggttcaggcaggtagtccgggatttatgtatgcgaaagacacgggcaaaaccatttctgtaaaggacattacttcgaacaaaagcagtagcgtcactgctgcggggacgatggaatctcttgtgaccgccgggttaacttaccgtattggccggagccataacaatgcggaggtacaaggagataacgctattgcggccgcactgatttttgaccgtgcactatctgatgcggaaataaagtcaatttacgattacttccaggcctactatgcccgccgtggcatcagcatttaa

SEQ ID NO: 242912 - DNA, 402 bp, Klebsiella pneumoniae; identical to SEQ ID NO: 214728

SEQ ID NO: 242913 - DNA, 1017 bp, Klebsiella pneumoniae
atgaccgacggcgtgacccgggctgatgtcgacaaaacaatgtggctcgtgacactggcggatatcattacaaataacagtacccgccaggaggaaaatctggtcgtcattctgagcagggaggaatcgtgggacccggcttctgaacgtaattccgacgcgttgtatcgggcctcctgcataatgacactgtatctggccgatactgaacagacgaagactcagactttcactgcaaactactggcctctactgagttccctgcacctgtttacagaggaattcagactggaagagcgcctgcggggacacggcctgggtacctggatcacgcagcagtttgtgctctgggccagaggtctgccgcctgaaacccgggtctggccgatagacatttcgaaggctgatgaaaaaagcgaagaaaaccagatccggagggacaggctatggcatgcaatggggttccggttcccggccgggcaaaactgctcaatgccgctgcgggtagacgaactgcagttgccgcggagcaggagttcaacgctccgggtggagcccctggcatccggggtacgccggctggaagagggttaccgcgggctgcaggaaaaaatcttgcagctggaaggggaaatattgtcgaaaaaacagttaattggttcaataaagaagcatccttttcttcatctattgcacaggaaatggcgccagctcccggacgggaaatgtgatgccctgccgctgcgggcagaaaaactgtctctgccgcagagcggggattctgacctggagttggagcaaccggcaaccggggtcatccggctggctaccctgtgtgctcagtcgcagaaaaggatccttgagctggaaagagatcttgcctcgcaaagtgaggagctcgctgacctgcaggcacatccattttctgacatgctggagaaaattgacaaccagagctggttctgggtgggcgtgttggcttttctgggctttatctactggatgttgggggcatga

SEQ ID NO: 242914 - DNA, 255 bp, Klebsiella pneumoniae; identical to SEQ ID NO: 239479

SEQ ID NO: 242915 - DNA, 2682 bp, Klebsiella pneumoniae
gtgaaaggttcagaatggaataaatgggatttacatattcacagtccagtgacatggcaggccaatggttatgccagccagtgtgatatcgcgcgctatgttcagcttctcggggaaaagcaactttccctcatcgccgtgactaactatttttatttccggcagaatgagctggaaatgataagggaagaaattgcccgccagaacctgaatatcacggtactgggaaatgttgagtttcgccttgatcaacagaacaaggctggggactttattaatgttcatattcttttctccgacaggatcagcactgagcgtattaatgaagccctgtcccgtttcccgctcaggttaactgacggtgacagaaaagccatttactgctgcgaaaagagtgttgcggagagcggtcatggcgtggataccattgtggtggcgttcagtacactgcttgaacacctcagtgcatcattccggccattcagggattatctggtggcggtctgtcctaacgggtatggcggttaccggccggatgcgaacggccgttctgcggcaatagcaaccgaaatcgaccgtcagggacagatgatttttggcgggaaaggcgatcgtgaattctttctgagaacggatcgttatgatggcgccagcgtcaaacccgtcttcctctgctccgatgcccaccggatggaggatatcggtagccgctacacttgggtaaaggcgcttccgaccttcgaggggctacgccaggcactgctggagcctgaagcccgcctcaggataggggaggagtggctggcagagcttacgccaaaagcgcatttcagtcagattgatgttgaagggacgatttttgatggccaggaaatcagcttcaggaaactgtccatcccactcagtcaggatatggtggccatcattggcggccggggaacaggtaaaagtctgctgcttgatgcgctccgttcccgttttgccggggcggcggcccggggaagcgatcagcgtgatgtgaatgttcagcatatgagtattgagctggataaggccaatggtgagaagatccgttttgatgcccgttctgaagggtatgagtacttgcatgtgtctcagggcgaaatcaaaaagctctgtcaggagccggggctcatcagcgatgagataaagaaaatgctgaggctgacaccggcccatgaggcgggcaatacggccgcacagctggcggaaaacctcagtgcatggcgtgcctggcgtgaattcagcctgtaccggagtgcgtattcagagccggtgaatacgcgtcattttcagctgaatatcatcagagccgctcaggaaaagattgaggttctcactagtgaccgcaataaggcactgattgagacgtttcgcgaaaacagccggcgccagacattactgattcagacgcgggataaactgacgagtgtgcgtgcggacattgtgacgaccgcagaggatctgaatgccagaattgcggcgattaatgcagaggatactgctcatgaagcgatcccgctcgtggatctgtctgcccagacaggggttattgagcgcagactgctgtccatgcaggagcagaccgaacagtttggtcgcgataacgacgagattatcggtactttccgcgagcaggggctgggacaggacattaccgggttgctggaaaaggtacatgaatatcagcgccagacggagctggcggagactcatctgcgtgaaatcggacatcaggagacactgtaccggagcggactggaacaacgcaccaggcttgcggctgaattcatggatggattgctgtcaagacagggcgtgatcgacacggctttcgcatcgctgaccacaaaacctcatctgacgcaggatcagcaggccctgatacaggatattcttacggatatccgcatttacggccagcctcactttgatgtcactgccttttacaacgggatgctcagttgtctgaacagaggccggttcagggcggccggggagctgactacccaggataggttgcgggaggtattcaggatcagcagcattgatgagttccgggccctgctggcaaatgaacccatgctggttctgccggaatgtccggacaataaactaaccatcgaggcgtttttctggcgcgacgaatattttaacagtcagggaccggatgcacttctcagttatctgttcagtccggagcagatccagcgctatctgaacgtcagggcggaatttgaatacaaaggtaaaaccgtcgataaactgtcagccgggcaacgggggaccttctatgtctgccttaaactggcgacagatgccttcggatcgccgtttgtctttgatcagccggaagatgacctggataatgaattcatcatgcacagtctggtcccacttttcagaaaaataaaacagtaccgacaggtcatcattgtgacgcataacgccaacctggtggttaactgtgatgctgaacaggtcatcatcgcggccaacgatgatgaagttatcagttaccgtagcggagcgctggaatacggagatcacggggcgccgaacagtatgcgcaaggctatatgtgacgtgcttgaagggggacgccaggcgttcgaagcgcgtgagcaaaaatacgggatgatgtggcttaacgccatctga

SEQ ID NO: 242916 - DNA, 489 bp, Klebsiella pneumoniae
atgcgaatattgactgtagttgattatgatgagatgtggccggctttatttgagaacgaacgtactctgttgcagatgacgcttggtaaagtgatatcccggattcatcatattggtagcacctcggtgcctggattatcagctaagccagtaatagatatattaatcgaagtttctaatcttgaagaactggacagtttgaatcaggcaatggagggtataggatatactgtgcgtggtgaaaacggcattttaaatcgtaggtactttacaaaaggtggaaatcagcgtagtcatcatatccatgcgtttgccaccggggatgctcaaatcataaaacacctggcattccgtgattaccttattaaacacaatgacgtagccattcagtacgctttaatgaaaaaaagcgcgatgttattatgtgaaaatgacagccaccgatacagcatttataaagcggatttggtaatgactccaacttattga

SEQ ID NO: 242917 - DNA, 621 bp, Klebsiella pneumoniae
atgctcgtcactgattcacttcttgcttacaccctcgctgctacactgcttaccctgacgccaggtcttgatactgctcttattctccgcacggcgactgctgaagggggacgcaaagccttgcatgccgcgttaggcatcgatctcgggtgctttatctggggcgcgctggtggcctttggtttaggtgcgctactggcggtttctgagttggcttataccttattgaaatggtgcggagcaggatacctttgctggctgggcatccagttgctcctgcgaccacgccagcaatttaacacccaccctgccgaatcagattccacgagtaactggtttctgcgtgggatgctggggaatgtgcttaaccccaaaatgggcgtcttctacgtttcgtttttgccccagtttatccctgccgggcattcaccgatcagctggacctttctcctggtcaccatccatgtattgatagggacgctgtggtcgttaacgctgattaccgccactcgctatgccgccggcatcctgaaaaaaccggccgtagtgaaatggatggaccgaacgaccggctgcctgtttctgttgtttgccgcgaagctggccatgagtcggcggtaa

SEQ ID NO: 242918 - DNA, 1371 bp, Klebsiella pneumoniae; identical to SEQ ID NO: 83601

SEQ ID NO: 242919 - DNA, 423 bp, Klebsiella pneumoniae; identical to SEQ ID NO: 221934

SEQ ID NO: 242920 - DNA, 474 bp, Klebsiella pneumoniae; identical to SEQ ID NO: 5003

SEQ ID NO: 242921 - DNA, 309 bp, Klebsiella pneumoniae; identical to SEQ ID NO: 131576

SEQ ID NO: 242922 - DNA, 636 bp, Klebsiella pneumoniae; identical to SEQ ID NO: 131577

SEQ ID NO: 242923 - DNA, 189 bp, Klebsiella pneumoniae; identical to SEQ ID NO: 20846

SEQ ID NO: 242924 - DNA, 201 bp, Klebsiella pneumoniae
atgagcctttgccccgatgaacgtctgctctttgtgcggatgatttccgctatgcttcgccgttcgggcggtgatgcgggtgctgttatgtttgaggcgtatcgccatattgtgtccgataccaatcaagctcgtcgttcctacatgctcgacctgctcgaaagcgtcaggcatgactatgtacacggtggatatacatag

SEQ ID NO: 242925 - DNA, 1560 bp, Klebsiella pneumoniae
atgggggccgctttctccagtgcctacagccatttttcttcatcggggctcagtgcaacatcgcaggctgcctccggcgtggtggacgggaattactctttcgccaacatgcagatggagaacgtcagcggctacagctggggtaccaacagcacaaccagtttcggacagatgtcgcggcagctggcgaatgggggcatgagcacgcagacgcgggatggttcgatggtctgggacagtggtggtgcaatgtcaaaactgccggtggatatcaacgtcggtcgtcagatagccagtgcgcagcaacagatggcccgtgaggctgatgtccaggccgaaagcgcgctgcatggctataacagcagcgtgacaagtgcctggaatagtctgcagcaatttggcaccaataaagggaacagcgcctcaacaacgaccggggccgatactactgagtcttcgcaggattcgatggccagaagcaagatgtggaatgcggttgttgctaatgcgaaagccaacaacatcagtaatgaggagtctttccagcagttgatggatgagtctaggaagggaacggtatcaggtgagatgtatggtaatgctaaatggagtagtggcgaccaattggtcgggaaactgggtaaatgggctacaggactcactgctgaagggggggctaaaattagtgctggagcgaatgcatcaagtggctctactgactcgacaaccgaatctggaagggaatctcatgacagtaggcacgataccagcagccaggcggcgaaagactttaaggaagcatccgattacttcaccagccgcaaaaccaccacatcgggtaatatcaccgataataatgccagctcgcgtgttgaccagtttgccgcgtcactctccagtgccaaaaacagctacgaccagtatacaaccagccggacacgcagccatgagtacagtgagatggcgtcacgcacagagagcatgactggccagatgagcgagaatctcactcagcagtttgctaactttgttcagcgtcgcgctccacaggatgccgaggctattctgaccaataccagttctcctgaaattgcggcgcagcgtgaagcactggcgcgtgaattcgtcaaagagcaggttgaacccagggttgatgccgcgtatcaacaggggcgtgaaagcatcggacagaatatggctggggtgtcaggtggtggggacaatggttcggtaatggctgactacggacaaaattctggtcgtatcgatgccatgacgcaagacgctggtattaaggataatgtgggtcagaaagtggatgggatgattgcagagaataaacaacagcatcaggaaacccgtgaaaacatacaacagcaaggcgttgaagtgaaaaaagagaatgctgaactggaaaatgaccacaaaacaaaaggaaatgatttcaaaaattcttataatgataagaaagagcatcaaaccagactgcctggcgcggattcaaccaaagaactactggataaggcaacaaaattagaaaacgagaaaccaaagggatag

SEQ ID NO: 242926 - DNA, 492 bp, Klebsiella pneumoniae
atgcaattcgccaaagtgatgcaccaggtattaaacgaggggcaaggctgggagccgctggggccgattagaattatcaatattgggcgtgagatttacgtgttttatcacgtgccgtcaccgccgctgacgttcaggccgtcatacgtgaaaaacgttgccacgatgtatgtcgataaaggttttcgtgtgaccgacagtgccggaaccgtagctatcgccgctgttgaaattgtggcggatacgattatcaaaatcacagctggccgggatatcaccggcaatgcaaagttgtggtatggcgataaaaccacccatgaaggaaacggcaacgtttttgatagcgacagatttaactcgctggacaatttcattttcgaagcggggacgggccagtatgaggccgaaaatataccggagttggtaggtaaaccatacccgttaaataacgcatcagtgcaattctgtctttcgattccttacggagagtaa

SEQ ID NO: 242927 - DNA, 585 bp, Klebsiella pneumoniae
atgaaggaattaatgctgttaattcctctgggcagcgctttgctcttaaccgggtgtgcgggcacagagaccgaatttcaatgtaatgccacgacgtcggatacctgtatgacgatggagcaggcaaatgaaaaagcgaagctgaaggaggtacgcagtgatgcaaagccggctgcggccgggttgccacaactggctgagggtaatttcagaaccacgtcagttaattcgttcccgttgccgcctcaacccaacctgaaccgggccagagtggcagcggagagagaacgagcacgtgcagtgtacctaaataatccaacggcaaagaatgaggcaatatatttcgaaaccgagaaaaggctccagtctttgccggtagtgaaaatgtctttaccagtagtggcgtcaacgtttacgtcaccgtcaacaccgccaggtaattatccccggccattaagaaaaggggaggagacaacgtcattgtggatagcgccgtatgtggattcagatgatgtatatcaccagccggcaacggttctttttgtcgtaaaaccatcggcgtggggacagcctcgccttaattga

SEQ ID NO: 242928 - DNA, 405 bp, Klebsiella pneumoniae; identical to SEQ ID NO: 111143

SEQ ID NO: 242929 - DNA, 369 bp, Klebsiella pneumoniae
atgaatattgacgtcgaaaaactggtaaaacaattgggtaagtcctatcaggagattcttgagaaagggttgattccttataaaacaaaaccttatggccctattgatgaagatgaagctgaatttgatatgaaacgagaaggaattcttttggttttcaccaataattccgagaaaaatcttactgaaattacattaaggttagaagataaaggcaaaacagattgggtattccccaatccgatgccatttggtatggaaccggtgatgacccaattgtgggttagagagcgctttgggttgcccatgatttatgctgtatgctctaccagctcctcatcaatatatcgctgccgtatttatctataa

SEQ ID NO: 242930 - DNA, 357 bp, Klebsiella pneumoniae
ttggttttcaccaataattccgagaaaaatcttactgaaattacattaaggttagaagataaaggcaaaacagactgggtattccccaatccgatgccatttggtatggaaccggtgatgacccaattgtgggttagagagcgctttgggttgcccatgatttatgctgatgcggaaatcatcatgactatttatataggggtgaaagaggtctatgctctgcctgctcctcatcaatatatcgctgccgtgtttacctataacaaagatttatttgtagaaaccgtgactttttacccactggaacgggccaaagagattcaggcagtactggagaaaaaacgattagagagttaa

SEQ ID NO: 242931 - DNA, 585 bp, Klebsiella pneumoniae; identical to SEQ ID NO: 226848

SEQ ID NO: 242932 - DNA, 585 bp, Klebsiella pneumoniae
atgaaggaattaatgctgttaattcctctgggcggcgctttgctcttaaccgggtgcgcgggcacagagactgaatttcaatgtaatgccacgacgtcggatacctgtatgacgatggagcaggcaaatgaaaaagcgaagctgaaagaggaacgcagtgatgcaaagccggctgcggccgggttgccacaactggctgagggtaatttcagaaccacgtcagtgaattcgtacccgttgccgccacagtccaacctgacccaggccagagtggccgcggagaaagatcgagcacgtgcagtgtacctaaataatccaacggcaaagaatgaggtaacatatttcgaaaccgagaaaaggctccagtctttgccggtagtgaaaatgtctttaccagtagtggcgtcaacgtttacgtcaccgtcaacatcgccaggtaattatcctcgtccattaagaaaaggggaggagacaacgtcattgtggatagcgccgtatgtggactcagatgatgtatatcaccagccagcaacggttctttttgtcgtaaaaccatcggcgtggggacagcctcgccttaattga

SEQ ID NO: 242933 - DNA, 1038 bp, Klebsiella pneumoniae
atgaatattataggaattcgaatttctgagaatgtaggtgatcgtcatacagatagatatgatacaagagctatcgctaacggtcgattccacattaattcattattagatggtcatagagattatatcaatggccgcattttaaagaatagaattggtgagttaaaagcacaaaacatcttagttgaacgtaacgataactcatggataatgggtagagatcataatcctacttataaaaaaatatctgagcatacagtagctataatcggatgtggctcagtcggttcatctatatcgaggctgttaatacaatctggcattacaaatataatgctctgggatgaagactctatgaaatcagaaaattcttcacgacatctcctggggttcgattctgttaacaaaaataaagcatctgctctcgcctccaaacttcgtttagaatttccaaacaccaatatagagtattttaatgaagaatggtccgaaaacgctgaatcaagtacaagaattactgaggctgaccttatcctaagctgcactgccgattggaataccgagcaacaactgttaagtaaacaatctcagtgtaatttgggagttcttgtttttgcttttgttgaagcccatgcaatggctggacatgtaatagtaaatcaaatagattctggtgcctttaatgcctggcattacacacaaggtgaaaaaataggtgcattgagatatcctgctacatattggaaagaaaatacaaaaaaaagaattgctgcttgtgctggagaatttcagccttatggagcgatacctttagcaaacttacattcacttgctgcaagaacaataattgacttaatattgaatagatttcctgacagttcctttgcatatagctatcttggtagacaagaagaactggtagaacttggtggtcaatggaatgattgttggataaataaatttggcaatccaaataaaggcgatcgaatcatttctttgatttatgaaaactcaaactggatgaataacgatgcataa

SEQ ID NO: 242934 - DNA, 585 bp, Klebsiella pneumoniae; identical to SEQ ID NO: 226848

SEQ ID NO: 242935 - DNA, 861 bp, Klebsiella pneumoniae; identical to SEQ ID NO: 25304

SEQ ID NO: 242936 - DNA, 501 bp, Klebsiella pneumoniae
atgcgctggtgttcagatggcttcgagttcggctgcgacaacggcgaaaaactgcgggtaacgttcgcgctggactgctgcgaccgtgaggccatagactgggcagcaagcacgggaggctatgacagttcaaccgtgcaggatgtgatgctgaggtcggtggaaaagcgcttcggcgacaggttgcccgatacagcggtgcagtggctgacggacaacggttcagcgtataccgcgtatgaaacgtggaggttcgcgagagagctgaatctggagccctgcacaacagcggtgagcagcccgcagagtaatggcatggccgaacggttcgtgaaaacgatgaaagaagactatatcgcgttcatgccaaaaccggatgtgagaacagcactgcgaaaccttgcagtagcgttcacgcattacaatgaaaaccacccgcacagcgcgctgggatatcactccccgagggaataccggcggcagcggacatcgttaacttaa

SEQ ID NO: 242937 - DNA, 546 bp, Klebsiella pneumoniae
atgaataaaagtgatgaaaaccgttcaagctcaggaataagtgttctatggcctgaactaaataaccctttctttattgaggcgttaagtgcctgcgaaacaggtgaaagttataacaatgcctcagcagtaattagatatagcctcaataatggtgccagcataatgtggttaggagaccttgaaactgaatttatggaaaatattgctaatgacatacacttagaaaaaaccacaattgtttttgcagcacatcatggtagaaagtcaggaaaaataccagattcatggctgaaaaagttagatcctcaatatattatcatcggagaagccccatctcgacatttaaattactataccggataccaaaaaataacccaaaacagagccggtgatattacaatgaaatgcatcgatgataaagttcatttttacgtatcgaatgcagcctatgaaaaagactctttgattgatgaacaagtatatgacgcatctctcgggcactacatcggctcacttacagtagaaaaagaatatacgttatag

SEQ ID NO: 242938 - DNA, 480 bp, Klebsiella pneumoniae
gtggtctcgtccccgccggcctggaaggcaaaaaaagagaaacttgagaaggttaaacaagcggccgaagccgccgcgcgcaacgctgcgccggtgccggttaaagcggtaaagacgccacctccggtgcattatcttcgcctgctgccgccggaacaggccatcatgaccctgaaggcattctggccacagctgttcgacggaaactcaccccgtctgctggcaacgggtatgcgcgaacagctgttcgccgacattgtgaaccgcgacctgccgctgtcgcataaacaggtcattaagtgcctgaagagtctgacccggtctgcgggctatctgtcccggatgaaggtgggggcctcccgctatgatctgcaggggaatgccgtcgcgaccgtcactgcagaggaagcgcagtacgccagtgagcgcatgatgaaggagctgctgcgggctgaacgaaagatgagtcagaccctttaa

SEQ ID NO: 242939 - DNA, 198 bp, Klebsiella pneumoniae
atgtctgccatcgatagtttttgtgtcgataagatattcattaaatacagcagtaacaagatctctactggactcgaggttttcgctgaggtctgtaaaatcgttattgttttttataaatggaatgaatatacaaatggcaccgtgatcagtgattgcaggatcatctggtgttttaaaagtaacaccaaaatctaa

SEQ ID NO: 242940 - DNA, 213 bp, Klebsiella pneumoniae
atgatgaaatacgttgtacttttggcactctcactgttcacttctctctctggctgggctttttccctcgacaacgccgatattcgactcctctgtccgcagcgcgggcaaatcgaggtgatccttcatcgctatgaacatacccagcaatcctggggcagcatcactttgaaaccggcggcggccacgttcgccaggggccgctgctggtga

SEQ ID NO: 242941 - DNA, 186 bp, Klebsiella pneumoniae; identical to SEQ ID NO: 229852

SEQ ID NO: 242942 - DNA, 471 bp, Klebsiella pneumoniae
atggttacgctttggggaaattatgaggggatctctcagggccaggtggccttttcctggacccaatatgtcggcgccgattgtattttaatcgccaacgatagcgtccctggcgatgagctgcggaaaaccaccattaagcttgccaaaccgccctcggtgaagctggtgattaaaaatataaatgattctattgaggcaataaaaagcggggttaccgataaatataatttatttattgttgtggagtcggttaatgacgcctggcgtattgccagcgccatcgacgaaataaaaagcataaatcttggcggaataaaggctaaagagggcagtaaaaatatctctaaggcgattaatttactgccgacagaaatagaacagctacaacaactggtgggcaagggcgtcgaagtggagattcgccaggtcccgaacgatcgcaaacagctttttgcggaatgcgtgtaa

SEQ ID NO: 242943 - DNA, 195 bp, Klebsiella pneumoniae; identical to SEQ ID NO: 141587

SEQ ID NO: 242944 - DNA, 261 bp, Klebsiella pneumoniae; identical to SEQ ID NO: 20381

SEQ ID NO: 242945 - DNA, 522 bp, Klebsiella pneumoniae; identical to SEQ ID NO: 20380

SEQ ID NO: 242946 - DNA, 1035 bp, Klebsiella pneumoniae; identical to SEQ ID NO: 20379

SEQ ID NO: 242947 - DNA, 153 bp, Klebsiella pneumoniae; identical to SEQ ID NO: 20372

SEQ ID NO: 242948 - DNA, 309 bp, Klebsiella pneumoniae; identical to SEQ ID NO: 20368

SEQ ID NO: 242949 - DNA, 1350 bp, Klebsiella pneumoniae
atgaatagcagatgcgaacagaattcgccgacgcggcattatggtgctgaaattaacacggcggccaatgggcgaacgaaagcggaagtaccgttgacgatggaagcggtgataacccgagataacctgatgctggcgtatcagcgagtggttgaaaacaagggtgcagcaggggttgataacctgagtgcatcggcgttgaagccatggctgaaagcacactggccaagtgtcagagaagcactgataacgggtagctatctgccacggaggatacgcaaagtcgatattcccaagccaaatggcgggataaggacactgggcataccgaccgtagtagacagactcatccagcaagcgatagcgcaagtgctcacccctcacgttgagtccgggttctcagaatccagctatggcttcaggccaaaccgcaatgcatggcaagctgtgcgccaagcgcagcagtacatccatagcggcaaacgctgggttgtggacatggatttagagaagttctttgaccgggtagaccacgacatcctgatgtcgaggttagcccgaatcatcaaagatggccggttactcaaactcatccgccgatatctggaagcagagatggtagatgagcagggtgtgttaaaacgtgataagggaatgccacaaggcggaccgctgtcaccactgttatcaaatatcctgctggacgaactggacaaggagcttgaacggcgcggacacagcttctgccgctatgcggatgactgcaacatttatgttagtagtcaaaaggcaggcgagcaggtgctttgcagcatgagtgagttcttagagaaaacattgaagctgcaggtgaatgagcagaaaagtgcagtcgccaggccctgggagcgtaagttcctgggatatagcttcaccaagcaccaggtcgtgcgactgaaaattgcgccaagcagtgtagacaggctgaaagataaaatccgaagtctgacgacaggaaacggctcaaagtcagtggcaaaggttatcagtgaattaacaccggtgctgcgaggatggataagctacttccgtctgactgaagtcaaaggcgtgttggaagagttggatggttggatacggcgcaaactacgttgcttgttatggcgacagtggaagcgaccttacacccgagccagaaagctaatgaaagcgggtcttgatgaagtcagggcgtgggcgtcagcttgcaatcaacgcggagcgtggtggaactcgggagccagccatatgaatcaggcatataagaaaagtctgttccagaaagctggactagtatcactgctggattgccaccggcagttccagtgttaa

SEQ ID NO: 242950 - DNA, 633 bp, Klebsiella pneumoniae
atgaataatctgccgctgctaaatgatttacgcgtctttatgctggtcgctcgccgggccgggttcgccgccgccgccgaggagcttggcgtatcgccggcgttcgtcagcaagcgggtttcgctgctggagcaaaccctgaatgtgatgttactgcaccggaccacccgccgggtcaccattaccgaagagggggagcggatctatgaatgggcgcagcgcattttgcaggatgtcgatgagatgatggatgagctttccgacgtgcgccaggtgccgcagggaacgctgcgtattatcagtagcttcggctttggccgtcgggttgtcgccccggcgctgtcggcgctggctctccagtacccgcagctggagctgcgtttcgatgtccaggaccggctggtggatttagtcaatgaaggggtggatctcgatattcgcgtcggcgacgatatcgcaccgaatctgattgcccgccagctggcggccaatcaccgcgtactctgcgcctcgccgcagttccttgcccgccatgcgtcgccgaaacagctgagcgatctggccgcgttaccctgcctggtgattaaagagcgcgatcacccgttcggcgtctggcaattgcatagcaaatag

SEQ ID NO: 242951 - DNA, 318 bp, Klebsiella pneumoniae
atgatagccagcaaattcggtatcggccaacaggtccgccatacgctcttgggctacctgggcgtcatcgtcgatgtcgatcccgagtattcgctcgcggagccggaagaggatgaaattgccgccaatgacgaattgcgcgcggcgccctggtaccatgtggtgatggaagatgatgatggccagccgattcacacctatctggcagaagcgcagctgagcagcgaaacccgcgacgaacacccggaacagccgtcccttgacgaactggccaaaacgattcgtcagcagctgcaggctccgcgccttcgcaactaa

SEQ ID NO: 242952 - DNA, 423 bp, Klebsiella pneumoniae; identical to SEQ ID NO: 210239

SEQ ID NO: 242953 - DNA, 240 bp, Klebsiella pneumoniae
gtggcgtcgttaatggaagtccgcgatatgctggccctgcagggccgcatggaggcgaaacagctcagtgctcgcttgcagacacctcagccgctgattgacgccatgcttgagcgaatggaagccatgggtaaggtggtccggatcagcgaaacgagcgagggctgcctctccggcagctgtaaaagttgccctgaagggaaagcggcgtgccgacaggagtggtgggcgctgcgatga

SEQ ID NO: 242954 - DNA, 2319 bp, Klebsiella pneumoniae
atgcaaaaattaaccgttggtttaattggtaatcctaattccggcaagaccaccttatttaatcagctgaccggcgctcgccagcgcgtgggcaactgggctggggtgaccgttgagcgtaaagaggggattttcgccaccactgaccaccaggtcacgctggtcgacctcccgggaacctactccctgaccaccatctcctcgcagacctcgctggacgagcagattgcctgccactacatcctgagcggcgacgccgacatgctgattaacgtggtcgatgcctccaacctcgagcgcaacctctatctgacgctgcagctgctcgagctggggatcccctgcgtcgtcgcgctgaacatgctggatatcgccgaaaagcagcaggtgcggatcgatatcgacgccctcgccgcccgtctcggttgcccggtcattccgctggtatcgactcgcggacgggggatcgaagcgctgaagatcgccctcgaccgtcatcaggcgaacagcgatcttgagctggtccactatccgcagccgctgctgcgcgaagctgacctgctggcgcagcagatgtcagcgcagatcccgacccggcagcggcgctggctgggtctgcagatgctggagggcgatatctacagccgggcctatgccggcgacgccgccgataaactggatatcgccctggcgaatctcagcgacgagatcgacgacccggcgctgcacatcgctgacgcgcgctatcagaccatcgccgccatttgcgacgccgtcagcaataccctgaccgccgaaccaagccgcttcaccgccgcgatggacaaagtgatcctcaaccgcttcctcgggttgccgatttttctctttgtcatgtacttgatgttcctgctggcgatcaacatcggcggcgcgctgcagccgattttcgatgccggctcggtcgcgatctttgtgcatggcattcaatggctgggttacaccctgcacttcccggactggctgaccgtgttcctcgcccaggggatcggcgggggtatcaacaccgtgctgccgctggtgccgcagatcggcatgatgtatctgtttctctccttccttgaggactccggctacatggcgcgcgccgcctttgtgatggatcgcctgatgcaagccctcggcctgccggggaaatccttcgtcccgctgattgtcggttttggctgcaacgtgccgtcggtgatgggcgcccgcacccttgacgcgccgcgcgagcgtctgatgaccattatgatggcgccgtttatgtcctgcggcgcgcggctggcgatcttcgccgtcttcgcggccgccttctttgggcagaacggcgcgctggcggtcttctcgctctatgtgctgggcattgtgatggccatcctcaccggcctgatgctgaagcacaccattatgcgcggcgaagcctcgccgttcgtgatggagctgccggtgtaccacgtcccgcatatcaagagcctgattatccagacctggcagcgcctgaaaggctttgtgctgcgcgccgggaaggtgatcgtcatcgtcagcatcttcctcagcgcgctgaacagcttctcactgagcggtaaggtcgtcgacaacatcaacgactccgcgctggcctcggtgagccgggtcattacgccggtgtttaaaccgatcggcgtgcatgaagataactggcaggccaccgtcggcctgtttaccggcgcgatggcgaaagaggtggtagtgggtacgctgaacaccctctataccgccgaagatatccagaatgaggaattcaatccgcagaccttcagtctcggcgaagaactgctcgccgccgtcgatgagacatggcagggactgaaagacaccttcagcctcagcgtcctggccaaccccatcgaagccagcaaaggcgatggcgaaatggccaccggcgccatgggggtgatgggcagtaaatttggcagcgcggcggcggcatacagctacctgatcttcgtcctgctctatattccctgcatctcggtgatgggcgccatcgcccgcgaatcaagccgcggctggatgaccttctccatcctgtgggggctgaatatcgcctattcgctctcgacgctctattaccagaccgttagctttagcgatcacccgcgctacagtctggtgtgtatcctggcggtagtgttgttcaacgtggtgctcttcggcctgttgcgccgggcgcgcagccgggtggacgtctcgctgctggccacgcgaaaaacgccgccctcctgctgttccagcccggctggcgattgccactaa

SEQ ID NO: 242955 - DNA, 747 bp, Klebsiella pneumoniae
atgcagttagctgatccagaagggtttttctcccagctaggagaaagtgtaagtaagacgatggtgcagactgaaggaggccgatgggcagcaagtgctcgcgagaagtgcgttgaggatttgaaggcacttataattagatatttcaccccttctcaaaaacactatgagaatcatgcttggcaaactttaataagaaccattttaaacaactctaaaactgaacagccatcttatgattttaaacaaggtctatttaatctttcgggagaaaacaaggttgatgaaaacagcctaattaatattgtccaaacttgcgttgcaataaacaacattggcagatcatcaaggggctatatattagttggcatttccgaaacacaagccacttcggacagattagtaaggttatttaacatcaagccacaagagtttaatggcttttttataaatggattggatcatgaggcaaagattaactcaaaagatattgataattatttcttatttataaaacaaaaaattcaatcttataacttcaccaatgctttaaaacaacaaatattaaaagacattgagctttgctcttataacggcttgcatgttttgaaaattgaaatcaagagtgttggacaagtctgtcattttgaaaataaattttacataagacaaggatcttcaactgagtgtttagaagaaggcgatgaaataactgccttaaatgcttcttattattcaattagttaa

SEQ ID NO: 242956 - DNA, 1299 bp, Klebsiella pneumoniae
atggctgatttgtcgatttcggttatttcagaccaggcatctgagagcaatcaggcgggatggtggcacccccttgacagctttcagggagtggaatgttacgggctgtgtaaagagtacggcaccgccggttatcatcaggtcgaaatcgttcgccgtgatgccgatggtaccctcacgcggggaatgtgcaagaacgtcgacgggacggtcgcggaatttaacaatgacgtgggccataatcagccatctgtggttgtggacggtgcgggatatatccacgtgtttacgtcgatgcacgttaatctgctgcggtactttcgcagcgcgcgccctggcgacgtgtcgcaaatggtggatgcgaccctggactttccggatgtggactgggtctggacgtacccaatcaccggcagaggtccagatggtgatgtatattgcctgatgcgggtcgccagccggagcaccaccggggaaaataaacgcgggggtatcctttaccgctttgacgtcggcgctctgcgatggacccgttatgcgcatgtggctgaaacagccaaccgcgctatttacccggatgatatagccattaacgaggatggcgtccatcttctgtttcagtggtcggcctacccgtcgtctgccgtccgccatgtaggggaatatggcgtcattggtaccgatggactgatgagaacgataaataacacgcccctgccaatgccggtaacgcagggacagctggcgtataagccattgcagccgggagaaaacccggcgataagtgacgggctgaaaatggggattcagtctgcgaaatttgcgtttgatggcgaaggattgtcgcatatcacttaccgtttcagaaccgtggatgatccttccgggacctggttcagtaagttcggggtctacgttgcgacatgggctgggtctgcgtggagcgaacagcaaatcgcgtatgtcccgccggagagggggaacacttctgcagcactggcggcaaccgttcaggggggcaagcggagggtgtatttttcggtggaatacacgtcttccgggaatactgtcgctgtcattgtcctggcggaaaatgcaggttctggatgggtctactcggtacttggcaacagcgcccccacacttctgcgcctggggtctgcaccaggaaacggcggtgatgtgctttacgtctcagcaccatttgaggctaaggtgtatcgctattttgtgccggaagattattccccggctcagcaattcacgaattttgaagctcttctttcaacgttactttga

SEQ ID NO: 242957 - DNA, 690 bp, Klebsiella pneumoniae
gtggttccggagaatacagccaagccttacagcaatattgagttcacgccgaaaatcactcctgtgacaaccatcgcgcacatgttcaaggcatccaagcagattctggacgacttcgcccagttgcagtccatgattgatgcggaaatgcgttacggccttaagtacgtcgaagaacaggagattctgtttggtgatggcactggcgctcacctccatggcattgtgccgcaggccacggcttacagcgcggcatttgccgttgaacagcagaacggtattgacgatctgcgcctggcaatgcttcaggctcaacttgcccgattccctgcatccggtcacgtcctgcacttcatggactgggcgaaaatcgaactgactaaagacaccctggggcgctatatcctggcgaacccggctgcgttgacggggccgacgctgtgggggcttccggttgtcgccactgaagcagcagccttccagggcaagttcctgacaggtgcatttaatgctgcagcccagcttttcgaccgcgaagatgcaaacgttgtgatctcgacggaaaacagcgacgacttcgagaaaaacatgatctctattcgctgtgaagagcgtctggcgttagcagtaaaacgccctgaagcatttatttatggctcctttactgtaccggcttccggcggccagtaa

SEQ ID NO: 242958 - DNA, 168 bp, Klebsiella pneumoniae
atgagtacctgtacgcgctgttgcgcagcgaatatcagtgaagtgacgggcgagccgtcacttctggctatgctctgcaacacccaattcgactgtctcaagggaaatgagcatatagggggtaaagtcgacttcttttccatcgataagattgatcatcgaccctga

SEQ ID NO: 242959 - DNA, 324 bp, Klebsiella pneumoniae
atgtcaatcacaccacctcatgaatggggtctacaaagcgatatcaccccacgatttggcgcgagattagttcaggaaggcaatcgactgcattacctggctgacagggctggattgacggggagttttagcccgatacacctgcagaaactggatcaggctttcccgctgtttatagaacaactggaaaatatgttgcgcgttggcgaactaaatccacatcagcaatatcatgtgaccattcaacttgcgagtttaacctgtatagctgatacccgtggtagctgtggctacgtttacatttctatctatccaacccagtaa

SEQ ID NO: 242960 - DNA, 1143 bp, Klebsiella pneumoniae
atgatgactaaatccctttgctgcgccctgctgctcagcacctcctgctcggtattggctaccccgatgtcagaaaaacagctggctgaggtggtggaacggaccgttacgccgctgatgaaagcgcaggccattccgggtatggcggtggcggtgatttatgagggtcagccgcactacttcaccttcggtaaagccgatgttgcggcgaacaaacctgtcactccacaaaccttgttcgaactgggttctataagtaaaaccttcaccggcgtactcggtggcgatgccattgctcgcggtgaaatatcgctgggcgatccggtgacaaaatactggcctgagctgacaggcaagcagtggcaggggatccgcatgctggatctggcaacctataccgcaggaggtttgccgttacaggtaccggatgaggtcaaggataacgcctctctgttgcgcttttatcaaaactggcagccgcagtggaagccgggcaccacgcgtctttacgccaatgccagcatcggtctttttggcgcgctggcggtcaaaccttccggcatgagctatgagcaggccataacgacgcgggtctttaagccgctcaagctggaccatacgtggattaacgttccgaaagcggaagaggcgcattacgcctggggataccgcgacggtaaagcagtacacgtttcgccaggaatgctggacgctgaagcctatggcgtaaaaaccaacgtgcaggatatggcaagctgggtgatggtcaacatgaagccggactcccttcaggataattcactcaggaaaggccttaccctggcgcagtctcgctactggcgcgtgggggccatgtatcaggggttaggctgggaaatgcttaactggccggtcgatgccaaaaccgtggttgaaggtagcgacaataaggttgcactggcaccgctgcctgcgagagaagtgaatccaccagcgcccccggtcaacgcatcctgggtccataaaacaggctctaccggcgggtttggcagctacgtggcatttattcctgaaaagcagctcggtattgtgatgctggcaaataaaagctatccgaacccggcacgcgttgaggcggcataccgtattttgagcgcgctgtag

SEQ ID NO: 242961 - DNA, 882 bp, Klebsiella pneumoniae
atgacgcgcagctatctccctcttaattccctgcgggcgtttgaagcagccgccaggcatctcagttttactcatgccgctatcgagttgaatgtcacccattccgcgattagccagcacgtcaaggcgctggaacagcaccttaattgccagctgtttgtccgcgtttcgcgagggctgatgttgaccaccgaaggcgagaatttgctgccggtgctgaatgactcgttcgatcgcatcgccggaatgctggatcgttttgccagccagcgcgctcaggagaagctcaaaataggtgtggtagggacttttgccacgggtgttttattctcgctgctcgcggactttcgccgctgctatccgcatattgatcttcagctttccacccataacaatcgcgtcgatccagcggccgaagggcttgattacactattcgctacggtggcggcgcgtggcatggaaccgatgctgaattcctttgccctgcgccgctgtctccgctctgtacacccgagattgcctcagttctcaaaagcccggcagatatcctgaagtttaccctgctgcgctcctaccggcgcgacgagtgggctgcgtggatgcaggcagcgggcgaacactctccctcgccgacgcaccgggtgatggtgtttgattcgtccgtgaccatgctggaagccgcgcaggcaggcgtagggattgccattgcgcctgtcgacatgtttacccatttactcagcagcgagcgcatcgtgcagccgtttgcaacgcagattgatctcggcagctactggctgacaaggctacagtcacggtcacggtcagaaacgcccgcaatgcgcgaatttgcccagtggctggtggggaagatgcagaaataa

SEQ ID NO: 242962 - DNA, 360 bp, Klebsiella pneumoniae
gtgatcaatccaaatccaaaacgttctgacgagccggtcttctggggcctgtttggcgcaggcggcatgtggagtgccatcatcgcccccgtcatcattctgctggtcggcattatgctgccgctggggctgttcccgggcgatgcgctgagctacgaacgcgtactggcgttcgcgagcagctttatcggccgcgcgttcatcttcctgatgatcgtcctgccgctgtggtgtggcctgcaccgtattcaccatgcgatgcatgacctgaaaattcatgtaccgagcgggaaatgggtgttctacggtctggcgaccatcctgaccgtggtgacgctgattgccgtggtcaccatctga

SEQ ID NO: 242963 - DNA, 396 bp, Klebsiella pneumoniae
atgacgactaaacgcaaagcctatgtgcggcctgtgccgtccacctggtggaaaaacctgccgttttatcgcttctatatgctgcgtgaaggcacggcggtaccggcggtctggttcagccttgagctgatgtacggcgtttttgccctcaagcatggcccggaagcctgggccagctttgtcggtttcctgcaaaacccgatcgttgttgttctgaacctgatcgtgctcgcggccgcgctgcttcacaccaaaacctggtttgagctggcgccaaaagcggcgaacatcatcgtaaaagacgagaaaatggggccagagccggtgattaaagggctctgggcagtgacgattttggtcactgtggtcattctgtttgtcgcattgttctggtaa

SEQ ID NO: 242964 - DNA, 735 bp, Klebsiella pneumoniae
atggctgagatgcaaaaaatgaaagttgaagtggtgcgctacaatccggaagtggacgccgcaccgcacagcgctttctatgaagtcccttatgacgagcaaacctccctgctggatgcgctcggctatatcaaagacaacctggcgccagacctgagctaccgctggtcctgccgcatggcaatctgtggctcctgcggcatgatggtcaacagggtgccgaagctggcctgtaagaccttcctgcgcgagtacaccaaaggcattaaggtcgaagcgctgggcaacttcccgattgaacgcgatctggtggtcgatatgacccactttatcgaaagcctggaagccattaagccgtacatcatcggtaatccgcgcacgccggatcaggggccgaatacccagacgccggcgcagatggcgaaataccatcagttctccggctgcatcaactgcggcctgtgctacgccgcctgtccacagtttggcctgaacaaggagttcatcggcccggccgccattaccctggcgcaccgctataacgaagacagccgcgaccacggtaaaaaagaacgtatggcgcagcttaacagccagaacggcgtctggagctgtacctttgtgggttattgctccgaagtttgtccgaagcacgtcgacccggccgccgcaattcaacagggtaaagtggaaagctcgaaagactttcttatcgctaccctgaaaccacgctaa

SEQ ID NO: 242965 - DNA, 324 bp, Klebsiella pneumoniae
gtgcgcatcaccgatacctccagcgtattcaacaccgacctgctctacaccatcgagctgggccacggcctgaacgtcgcggaatgtatggcgcactctgcgctggcgcgtaaagagtcgcgtggggcccaccagcgtctggacgaaggctgtaccgaacgtgacgacgtcaatttcctgaaacacactctcgcctggcgcgatgcagatggcaccacacgtctggactacagcgacgtgaaaatcaccacgctgccgccggctaaacgcgtgtacggtgcagaagcagaagccgccgagaagaaggagaaggcgaatggctga

SEQ ID NO: 242966 - DNA, 1365 bp, Klebsiella pneumoniae
atgatgttgttctttgcccatggctttgcccgcgctcgctgcggcgactgtgggcacgactactttgtagccttctcctgcaaaggccggggagtctgcccctcgtgcaccacccggcgcatggtggagacagcagcgcacctgaacgaccacgccttcccccgcctgccggtgcgccagtgggtgctctccgtgcccaagaggttgcggtacttcatgcaacgcgacggagcggtgctgagcatggtgctgcgcatctttctgcgggtgattgcgcaaagcctgcaggcgcactgcattggcgcggccaatgcagacaaggaaagcctgcacatcggcgcagtggccttcatccacaggttcggctccagcctcaatgaacacgtccacttccacgtttgtgtggtggacggggtgtttgaggaagtggagggcgagggcgatgctgatgcgacccctcgaatctcatcgccgggtgtcatctttcacgcggccaccggcatcgatgcggctaccgtggccccagtgcagaccacactgcaaaaacgcatcctgcgcgccttcgttgctcggggcctgctggagaactgtgacgccaaagacatgctgggctacaaacacagcggcttctcggtggatgcgggggtgtgcatcgaagcccacgaccgcgctgcgctggagcggctgctgcgctattgcgcgcgtccaccgttttccatggagcgcctacgcaaagagggaagcaaactggtgtaccgctgtgccaaacagcgcagcgagcccaccagtgacaagcgtggtgccaaggcagatgagctgcacctcacaccgctggaactgatcgaccgcatcgccgcgctggtgccaccgccacgcacccaccggcaccgctactttggtgtgctggcaccaaactcgccgctgagagcggcggtaacggcgctggctcagcctgctgcgtcgcaaccagccacggtggagactgcacaacctggcgcgggcgtacctggggtggcggcgccgggcaacgcggccacacccacacccgaacctgaagcacgcccgaagcgagcggcgcattacttgtgggcggtgctgattgcccgcatctacgaggcatttccgctgctgtgccccatgtgcggtgggcagatgcgcatcattgccttcatcacccacagcgccgaaatccgccacatcctgaaccacatcggggtggagtctgcccccccgcacatcaccccggcacgcgggccaccgctgtgggagggctgcgacgcgccggtggatgatggtgcgcaaggcgagccggattgggatctggcagctcaacccgacgaggtagaccagcgcgtcaattggtga

SEQ ID NO: 242967 - DNA, 1533 bp, Klebsiella pneumoniae
atggcgaagaggttatccatgcgcaagattgccgaagtattgcggctgcaccacgaatgtgggcgcagccaacgagaaattgccgttgccgtcggagccagtccgacgacggtcggcgagtacctgcgtcgggccaagagtgccggcatcggctatccgctgccggcgggtattgatgagacggtcttgcaggccaagctgtttccaccgccgctgccgagcaaggtggcccggccggaaccggactgggccgtcgtgcatcgggaactggcgcgtaagcacgtcaccctggacctcctctggcaggagtacaaggccgagcatcctgacggctaccggtacagcgccttctgccagcgctaccgggaatggtccggcaagctgtccgtctccatgcgacagacccacccgcccggcgagaaactgttcgtcgattacgccggcacgaccttgtccgtcatcgaccccgacaccggcgagatccggacggcccaactgttcgtcgccgtgctcggggcctccaactacacctatgccgaagccacctggacgcaaagcctgccggactggctcggttctcatgtgcggacgctggaattcttcggcggtgcgcccgagatcgtcgttcccgacaatctgaagagcggcgtcaagaaaccgaactggtacgagcccgacatcaaccccagctatcaggaatgggcgagccactacggtgtggccgtcctgccggcacgggtgaggaaacccaaggacaaagccaaagccgaagtcggcgtccaggtcgccagccgctggatcatcgctgcactgagaaatcgccgctgcttcagcctcgacgaactcaaccgcgccatccgcgaactgctcgaacggctcaatacccgcgccttcaagaaactgcccggttgccggaagcaggcgttcgaggaactggatcgaccggcactgcgacccttgccggtcacccgctacagctatgccgactgggagcgccgccgcgtcggcatcgactaccacatcgatgtctccggccactactactcggtaccgtatcgcttcgcccgccaggaggtcgatgtgcgcatcgccgcccataccatcgaggtgttccacaagggcacacgcatcgccagccatgtcaggagccgcgacaagggccggcacaccacggtcgatgcccacatgacgccggcgcaccaggccgtggcgggctggaatgcgcccaggattctggagtgggccgccaagattggaccggagaccaccgtcttcgtcgagcatttgatgaattcccggccgcatccacagcaagcctatcgggcctgcctcggcgtcctgcgtctggcacgcgaggtcggacgggagcgactggaagcggcctgcgcccgggcacggtcgatcaatgcccgaacctacaagtcggtggcgtccattctcaagcatgggctggatcgccagcccgagccggcggcccagacttccttgcccctcgaccatgccaatgtgcggggttcccattactaccactga

SEQ ID NO: 242968 - DNA, 780 bp, Klebsiella pneumoniae
atgctgactcaccccacccacgataagctcaaccagttgcgcctcttcggcatggcccatgccctggtcgaacaatccacgatcgccgaaattgatgcgttgcccttcgccgaccggctcggcctgctgatcgaccgcgagatgaccgagcgcagcaatcgggctacgaccagccggctgcggcgggctcatctcaaactgtcggctaccgccgaggacatcgatttccgctcgccgcgcggcctcgaccgttccttgttccagtccttgctggccggcgactggatcgccagccaccagaatgtgctgctgaccggaccgaccggcgtcggcaagacgtatctggcctgtgcgctggcgaaccaggcgtgccgccagggggcgagtgcgctgtacttccgtttgccgcgcctgctgcaggatctggccatcgcgcggggtgatggccgttacacgaagctgctggcgcagttcgccaagacggatgtgctcgtcctcgatgactggggactggccagtttcacggatgagtcgcgccgcgacttgctggagctcttcgatgatcgtcacaacagccgctcgacgatcgtgaccagccagcttccggtcgagcactggcacgaggcgctgggcgatcccaccctggcggatgccatcctcgaccgcctggtgcatcacgcccaccgcatcgccctgaagggcgattccttgcggaaacgtaaagcaaccaccgccgcgtcaaacacgggttccccacaggcggccgcccgccagcgttag

SEQ ID NO: 242969 - DNA, 408 bp, Klebsiella pneumoniae
atgactctgatgactctgacggtactgatgactctgacggctctgatgactctgacggctctgatgactctgacggctctgatgactctgatgactctgatgactctgatgactctgatgactctgatgactctgatgactctgatgactctgatgactctgacggctctgacggctctgatgactctgacggctctgatgactctgatggctctgatggttctgatggctctgatggctctgatggctctgatggctctgatggctctgatggctctgatggctctgatggctctgatggctctgatggctctgatggctctgacggttctgatggctctgatgaccctgacggctctgacggttctgatggctctgatgactctgacgtctctgatggttctgtaa

SEQ ID NO: 242970 - DNA, 597 bp, Klebsiella pneumoniae
atgaatgagctgaactttttggaaaaatttctggatgggattgatgttgagtggatgtcgctgggaaatattggcagtttcatacgtggcaatgggctacagaaaaaagatttcgttgaaagtggttttccagcaatacattatggtcagatttatacaaggtatgggttatcagctgataaaacatttacttacgtgtcgccagaactagccaataagctgagaaaggcgcaaagaaatgacttattgctagcaacaacatcagaaaacgatgaggatgtcgtaaagcctttagcttggcttggtggtgaagctgctatttctggagatatgatgttatttcgccatgagcaaaacgttaaatatctcgctcactttttccagtccgaaatgtttcaaaagcaaaaaatgaaatatatttctggggctaaagtccgtcgggtttccagtggtgatttagctaaaattaaaatcccaattccctgccccaacaacccggaaaaatcccttgccatccagtctgaaatcgtccggattctggatacatttactgaacttaccgctgaacttaccgctgaacttaccgctgagctctga

SEQ ID NO: 242971 - DNA, 372 bp, Klebsiella pneumoniae
gtggctcgtccaaagagtgaagataaaaagcaagcgttactggaagctgccaccgcggctttcgcccagtccggcatagccgcctcgacgtcggccatcgcccgcagcgccggtgtggccgagggaacgctgtttcgctatttcgccaccaaggatgagttgctcaacgagctgtacctcgcgattaagctgcgcctggtgcgcacaatgatcgccgggctggatccggacgagaagcgcccgaaagagaacgcgcgcaatatctggaacagctatatcgactggggcgtgcgcaacccgatggagcacaaagcgatccgccggatggcgctcagcgctgagagatcccctcataatttccccaaagcgtaa

SEQ ID NO: 242972 - DNA, 141 bp, Klebsiella pneumoniae
atgaaagccagcgtttactacagtaaaaatgatatccggtatgaagatgttgaagtgccagaaattggcgacggcgacatgctcatcaaaatgcactcctgtggcctgtgcggtaccgacattcataaagctcagcactga

SEQ ID NO: 242973 - DNA, 612 bp, Klebsiella pneumoniae; identical to SEQ ID NO: 195815

SEQ ID NO: 242974 - DNA, 300 bp, Klebsiella pneumoniae; identical to SEQ ID NO: 32728

SEQ ID NO: 242975 - DNA, 306 bp, Klebsiella pneumoniae
atgggcgctctgacccggcgcgccgagggtggcggcagcggaagagtagagaataagatagcgtccgtcgtggttgcgcagggtttgcaacagctggcttgccgcctgcgcttttaccgcgaaaacggcagccaactggtggtcatcaagctcctgcaagggcgcgtcagccaatacgccagcggcatgaatcgctccggcaatgccgccgttggccgccagatcgtcaagaaccgtggccagttgcccggcatcgcccacatcacaacggcagacgcgcgtctgcccgccctccacgtcgcgtag

SEQ ID NO: 242976 - DNA, 621 bp, Klebsiella pneumoniae
atgcagacggtaatggcaatcgtcgatttcgctgaccaccagctcaaaaagaggccactggtcggcaggcaaaacgcgatagctcagttcatgccgccgtttttccagcgcgatgcgctgttcttccggggaaagcgcgcgcagatcgtcacgcgggatgtgatactccggcgttgtcgccaggattcgctgctgcccgtcggcatcaaccaccatacgcaacatatcgtggcgtgcgatgagctggttccatgctttctccagtatggcgagattgaactcatcgtggcgtttatcccactcaaacaggacgtgacaggcgacgccgccatagccaatgaggtgggttcgccccagccagtaggcgtgctgaatgggcgtcaaagggaagggcgcataacgctcgtcggcgtcgtgccgcaacacttccggctgcgaagcggcaggcgtcgcctctggcttagaacagataagctgcgtgagtccatgaggagacagatcctgccacgcccgttccgcattgatgcgtacgcccaggtagtgctgaatatcgctactgagttcaaggaagagcagcgagtccatgccgagttgcaacagatcctggtttggatgcagtga

SEQ ID NO: 242977 - DNA, 195 bp, Klebsiella pneumoniae
atgacctaccagtggtggatcggcgcctgtaacgaactggtctcagagaacctgagtccgataaccaaaacgccggagtacaagtactgcgcggtcaacgttgagcggattgccgatcagcgcgccgcggaacagtacgtgatcgacgagtacaacaagctgaaatcccgcctgcgcgaaagcgcgatgggttaa

SEQ ID NO: 242978 - DNA, 2679 bp, Klebsiella pneumoniae
atggttacgctttggggaaattatgaggggatctctcagtgctatgtattcacgcaaacgccgcaggtctggctggatcatcaggtcatggagagcgacggcgagttgatgtttagctggtactgcatggacaacgtgctggaacccggcgctgccgaggcgatgtttaatgactattgcgccatcctgcaagccgtcatcgccgcccctgaaagcctgaagactctcgccagcggcatcgccgggcacattccccgccgacgctggccgctgaacgcgcaggcggactacgacctgcgggatattgagcaggcgacgctcgaataccccggcatccggcaggccagagcggaaataaccgaacagggcgcgttgacgctggatatcgtgatggccgacgatccgtcgccatcagcggcgatgcctgatgagcacgaacttacccaactggcgctgccgttgcctgagcaggcgcagcttgatgagctggaggcgacctggcgctggctggaggcgcgtgcgctacaggggatcgcggctacgctaaatcgtcacggcctgtttaccacgccggagatcgcccatcgctttagcgcaatagtacaggcgctgtccgcgcaagcgtctcaccagcgtctgctgcgccagtggctacagtgtctgacggaaagagagtggttaatccgcgaaggtgaaagctggcgctgccgcattccgctcagcgagattcctgagcctcaggaagcgtgcccgcaaagccaatggagccaggcgctggcgcagtatctggaaacctgcatcgcccggcacgacgccctcttctccgggcggtgttctccgctggaattgctgttcaacgagcagcatcgcgttaccgacgcgctgtatcgcgacaaccccgccagcgcctgtctgaatcgctataccgcgcagattgccgccttgtgcagcgcagaacggattctggaggttggcgccggaaccgcagccactaccgcgccggtgctgaaggccacgcggaacacgcggcagtcgtaccacttcacggacgtctccgcgcagttcctcaatgacgccagagcccgtttccatgatgaatcgcaggtgtcttatgccttgttcgacatcaaccagccgctggatttcaccgcccacccggaggcgggttacgacctgatcgttgccgtcaatgtgctccacgacgccagccatgtcgtccagacgttgcgcagattaaaactgttgctgaaagccggcggacgtttgctgatcgttgaagcgacggagcgaaacagcgtattccagctggcgagcgtgggctttattgagggattaagcggataccgcgatttccgccgccgggatgagaaaccgatgctcacccgctccgcatggcaggaggttctcgttcaggccgggtttgcaaacgagctggcgtggcccgcgcaggaatcgtcgccgctgcgccagcatctgctggtggcgcgttcgcctggcgtaaatcgcccggataaaaaagccgtgagccgctatttacagcagcgctttggcaccggtctgcccattttacagatccggcaaagagaagcgttatttacgccgctgcatgccccgtctgatacgccgactgagccagccaaacccacgccagttgccggggggaatccggcgctggaaagacaggtggctgaactctggcaatcgctgctgtctcgccccgtggcaaggcatcacgactttttcgaactgggtggcgacagcctgatggcgacaaggatggtcgcgcagctaaaccggagagggattgccagggctaaccttcaggatctgttcagccattcgacgctgagcgacttctgcgcccatctacaggcggctacgtcaggagaggacaacccgatacccctttgccagggcgacggtgaggaaaccctgtttgtcttccacgcttcagacggcgatatcagcgcctggctgccgctcgctagcgcgttgaacaggcgcgttttcggcctgaaagcaaaatcgccgcagcgctttgccacgctcgaccagatgatcgatgagtatgtcgggtgcatccgtcgtcagcagcctcacggcccttatgtgctggcgggttggtcgtatggcgcgtttcttgcggcgggcgccgcacagcgcctgtacgccaaaggcgagcaggttcggatggtgttaatcgatcccgtgtgccgacaggatttctgttgcgaaaaccgggcggccctgctgcgcctgttagccgaaggacaaacgcctctggcactgcccgaacatttcgaccagcagacgcccgacagccagcttgccgactttatcagcctcgctaaaacggccggtatggtgtcgcaaaacctgacgctgcaagcggcagaaacgaggctcgacaacatcgcgcatctgctgcgtttactgactgagcatacgccgggcgaaagcgttccggtcccctgtctcatggtgtatgccgccgggagacccgcgcgctggacgccagcagaaaccgagtggcagggctggataaacaacgccgacgacgctgtgattgaagccagccactggcaaatcatgatggaagccccccacgttcaggcttgtgcgcaacacattacgcgctggctttgcgcaacctcaacgcaaccggagaacacgttatga

SEQ ID NO: 242979 - DNA, 276 bp, Klebsiella pneumoniae; identical to SEQ ID NO: 102277

SEQ ID NO: 242980 - DNA, 180 bp, Klebsiella pneumoniae
atgaccaaggcaaagaatattgaatttcgactgagcaaacttgagaaagggccagacgagaacgttctggccatcatggagataaggtcgagagctattgcaggtagcttgctgaagcagatttcctgccaggcgctgagagatcccctcataatttccccaaagcgtaaccatgtgtga

SEQ ID NO: 242981 - DNA, 2406 bp, Klebsiella pneumoniae; identical to SEQ ID NO: 95356

SEQ ID NO: 242982 - DNA, 861 bp, Klebsiella pneumoniae; identical to SEQ ID NO: 19455

SEQ ID NO: 242983 - DNA, 231 bp, Klebsiella pneumoniae; identical to SEQ ID NO: 134313

SEQ ID NO: 242984 - DNA, 195 bp, Klebsiella pneumoniae; identical to SEQ ID NO: 36234

SEQ ID NO: 242985 - DNA, 429 bp, Klebsiella pneumoniae
ttgttggggattaaaagggccttggatgatgctgttagctacgaatatggatttcttcctctcggtaaaaaggacgatttattcgacggaaagggcaactttaaggaagttaataaagctgttctacctaaatttgatcgtcagatcgataagactaacgggctggtgattaccgtccatgatacgtggtcgacgcatatcacgctcgagtcactggaggtgacgggcgacagctaccgggcgaaagtacactaccgggtacaggaccacttcgggcttgatgacgcggatatcctgaaccctgtttttcatcagggccgaattttccggatctggtttgtgcagcagcgctatgtgaaatacggctataggccgttcatcaccgagatgaatgcgaccgtggaaatcagcgggaggcggggtgaataa

SEQ ID NO: 242986 - DNA, 213 bp, Klebsiella pneumoniae; identical to SEQ ID NO: 25793

SEQ ID NO: 242987 - DNA, 159 bp, Klebsiella pneumoniae
atgatatttgaagacagacaatgtctctttgagtcttacgagaacaagatcatcagaggttgcgatagcctctggatcgacaataactatagcgccggagggagcttgagcgatgccagtccggcccttaattatataagcgcggaaatgttctggtag

SEQ ID NO: 242988 - DNA, 135 bp, Klebsiella pneumoniae
atggaatgtcatgagttgtatccgatttcaacggtcattgcagctggagccatcgcggtagcgttaaccaatctggcctggactctgatgatgcaggtcatcgtccacaaactaaaagaacgtttaacgaggtga

SEQ ID NO: 242989 - DNA, 723 bp, Klebsiella pneumoniae
atgaaagaacgcggaatgatttttaacggggaaatgacgcgagcaattctcgacggacggaagacgcagacccggcgcgaagtaaagctgaatctcgatatagcgcgcttggccacaacctatgactgggccacttccctcgcggccaatcattatcagggcctggcagaagaacaaattcagcagaaagctgaatctcttcgcggcgtgattcaccctgtaattttggataatgggcagatggtctcgattatctgtcctcatggcaagccaggcgatcgcatctgggtaagggagaccttttgcccggtagatgacactcagtatggcggggagaagtgggtggattaccgcgccacacctcgttatgaagccagccatcctgcaggctgggacagcgcgcctaatgacgctgaagccctcaaatggcgcccgtcaatccacatgccgcgctgggccagccgcattctactggaaatcaccgacgtgcgggttgagcggttgaacgctatcagcgaagaggatgcgcgagcagaaggcattattgacggtggctgtcttaattgcggggaacctgagccatgcggatgcgccaatccagagcctgacgctaccgatgcttttgcctacctttggcaatcgatctatgggcaggaaaactggaacgccaatccatgggtctgggttatcgagttcaagcgcgttgaaggcggtgcagcatga

SEQ ID NO: 242990 - DNA, 777 bp, Klebsiella pneumoniae
atgaccgctcagcttatgaccgcgatcagcaatcgcgatggtgatgcgctggccagaatggccgcaggtagcacggagccgcagaggcttctcgatttcgaagctgaaaggctggttgactctctgttccgtcagctgaagcagatcttcccggcgtcaacgcagaccaatctgcgcaccgacgccgaagagaagacagcgaagcgccagtggatagcagcttttgccgaaaacgggatccgcacccgcgagcagttatccgccggagtgcgacatgcgagagccagcgaatcgccgttctggccatcgccgggccagttcatcaagtggtgcaaggacagcggcaccgtgctgggagtgactcttgtcgacgtgatgaacgagttccaccgttacagccgtgaaaaagggctgcataccggcggtgctgagcgcttcccgtggtctcaccctgtcatgtactgggttgttaccgatacacggcgagcaatgtaccagcgccaactcagcgaggcagaaaccgagaaatatgccgctaaaaagctggaagactgggcgctgaaagtcgccgccggagaacaaataccgtcgccggtactggctctggagaacaaccaggaagctattccgacaaaccatgtcagccgtcagcagggttttcaccctgaaggcaaaagcttcggatgtatgccaagcgcggcatcgctcggtgcgttaactccggctcagtggctgcgggatgaatacctgcgcgggaaagagagagggcttatctga

SEQ ID NO: 242991 - DNA, 543 bp, Klebsiella pneumoniae
atgagcatcactatcgaaaaaatggatgttctgtcgttcaccattaccggcgctgaacgcttagaccctgtgcgggtgatgattgaaaactatgagccagggaagggaagaatcactgtcacctgctacgggcaggcatggactggcgcatggtttgcgatgggcggtgacactgttcaggagttcattaagggtgtcagcaatgactacctgatcgggtgtttagctccccggcttgaaagctcggttgacgacgacaacgaagcgaatctagcgttcgttaaggcccatatcattaagcttcgtcgcgaacgggaacttgatgctgagaaagctcgcgaaatgtggaatgaggctgaaaatgctgatgacgttaaggcatgttgctgcgactacggcattggtaacgaacttttggagctttttggcgacgacccatgttacgcaggatggccctctgtgcttaacccgaattatcaatacctcgatcgtatcctgaatgcggttcgtgtcgggctggtagaaatggagcgtgcagcatga

SEQ ID NO: 242992 - DNA, 870 bp, Klebsiella pneumoniae
atgaaaaagacagtactaataacagatcttgacaatacactttttgattggttcagtgtttggtacaatagttttaacgccatgttaaacaaagtggtggagatttcaggaattcctagagctgatttaattgaacaaatcagacccatccatcaaaaatatggaactgctgaatattcatttattcttgaaagcatcccgttgctacaggaaaaatatggcgaccgcgagtctattaaattagcgatggatgaggccatccacgcttttagaagtgcaagaaaaaaacatttaaagctgtacccaacagtattagaaacattgaaaacccttaaagggaaagggtgttttattgtcgcttacactgaatcaaagtcttactattctaatttcagacttactaagctagggcttgatggcatcattgatgttttattttcaccagaagatcatgaaataccagatggtgaggaaaaacaggtaaaatacaatcttgtaaatacaaaacaagaatatacacctcaagatgaaatcaagccaaaccctcaactgcttttagatattattgcgtccattggggctgttccagaagaatgtgtctacattggtgatagtgaaatgaaagacattgaaatggcgcagaatgccaatgttagcgatgtattcgccagttacgggactggtcattttgaggaaaataaagatggttatgaccttttacgtgctgtcacgcactggacagatgaagatgtagagagagaaagaaaaataaaagaaaatgcctctggtgctaaacctactcatactgtagaagtattctcagatatcttgtctatctttgaattttcagaatttaaaggaaataaatga

SEQ ID NO: 242993 - DNA, 648 bp, Klebsiella pneumoniae
atgatggcgatgaccgatgaggaaaaatttctagccacgattaaccttgaagaactaaaactcaaggttgacgtatggaaaacaattattgatgtgcaaaagcatttcaatgatctcgaaatgaaagttcgaaatttcggtatccttatattatcagcatttattggtgcaataggtgttagttttaactcaaactcaagtttagtcattttgggaggcagctactcagttgcgggaatgcttgcatttggagcggccattgtttggttgcttttctattttgttgacgtttactggtaccatcctttattgctaggcgctgtaaaaaagggattggccattgaaaaagagatcgctgcagatattgtaaatatagatcttactaaaacaatcggtgataatagccctcgagatattctcttttttaagaatgttcacagcaccaccaaagctaaaatattctattttggtgtattagctgttctattattcacaggggtttgcatgatgatctttagttctccgaaaaaaaccaacccttatgaacaaataaaaatagaagctcagtgcattaggaatacaaactataatggttatcagtgttctttcaactcactaccagaaggtgctaacaaaaaacaacattaa

SEQ ID NO: 242994 - DNA, 1110 bp, Klebsiella pneumoniae
atgagtcaaagaactataaacgctctcctttctagaggcatagatagtgagttagcagaaaatctttctgctaaagggtttactctgaagttcttaaaacaaatgaacgctgaaatgctttcacgaattggtttatctaagcttgatataaagcagcttcattcgggtgaacgacctcctatacctgaaagtacactgataaatttactttggcacaaccgcagaacttgttgtgtttgccgtaaacagcacaagtcaatcatcgttcaccatatagaggaatggtctgtttcacgagaccattctatagaaaatttggctgtactttgcttagattgtcatgatctagctcacacaaaaaagtctttaagtcaaaacctgaatccaaaagagcttagagaatataagaaaaggtgggagatgattgtcagaaaaaatgatatccagactcttttcaatctaaaaaccgcccgaagctctgctcgttgggattggataaattgccgtcgtgtttttgagctttttgaaaagttaggtttcactataggtgaccttggtgaattcaataatctaaaagaagacggatttattgatgatcgaggatttattacaaatgatttgaaatggaatattgataagagcagaagattttatttccttgattttggtggcgcatttcatattgcaagttatctcggctcaatccttgatattgtgttaaaaaacactccggttattgacataacaccaatactcaataaaaggaatgaccttagagcgctcgttgaaatgggaagtttcatttcaatacaagcacccttctacttttcgactatcgaaggtggtcttaatgatgttgacgaggtaaaaaaagcatattaccgaggttataatttaagagtggaattcacatttcaaccttggtattgcacgagttctagcgcgaagttcggagctatgactggacgtcatgttcagactgtgtttggatttgtccgcgacatctctacttacgatgatgaacttataatctctctctcttgtctgggcgcgggaacaggtttcaaaaggcatgaaaatagagtgaaatcaatctttgatatgtactaa

SEQ ID NO: 242995 - DNA, 255 bp, Klebsiella pneumoniae
atgctgcttgctcggctacttgagcaacactacggcctgacgttaaatgacacgccgttcagcgatgaagctgttattaagggacatatcgaagctggcatcacacttgtcgatgccgttaattttctggtggagaagtacgagttggtccgtgtcgaccaaaggggatttagctggcaggagcaagcgccttaccttacgattgttgatatcatgagggctcgtcgctatcttggtatcactaaccgtagctag

SEQ ID NO: 242996 - DNA, 657 bp, Klebsiella pneumoniae
gtgagaataaaaaaagtatttagcgtgtttctggtgatgattattattgggcttatgggacagcccgcgttcgccgcagagagttcatcaacatcgtcccgcacgctgattatctatttttcccaacccgaggaaatgaagcccgaagccgttgatggtttttccggggccagcgtattacaaaaaaacacgccggagaccggcagcacgcagtttgttgcgcagttgattcagaaacagactcacggtgacctgtttcgcattgaaaccgctaccccttatcctcgccagcatgatgcactgttacgcgttgccgaaaaggaacaacaaactaatgccaggccatcactaaaaacaccgctccccgatctcagcgattacgacaccatttacgttggctatcccatctggtggtataccatgccaatggtgatatatagcctcttcgagcaaaatgactttgctggtaaaacggtcattccctttactacccatggcggtagccggttagccgactcccttcgacagatagcccgcatgcagccgcaggccaggttagtcactcgtgcactctcgatctcgcgcactgatgtatccggccctgacgtacccgagcaggttgagcaatgggtaaaacaagtccagccacagcgttaa

SEQ ID NO: 242997 - DNA, 651 bp, Klebsiella pneumoniae
atgacgttacttctgctgatattgatggggtttcatcttcacggtgaaaccgtacatgaatgggcggggattatttttacgctactcatcttattgcatttataccttaatcgtcatcgattatggtcactatcgccaaatattccgttaacaatgcagatagtgaacaggatcattaacggagtgactttcgttgtgatcctgaccgctattgtctctggcatgatgctgtcccgacatattcttctggctatgccgttccacaacccggcgaactgggttagaaaagtacacatgacgtcggtccattggggaatgctcattctggcgctgcatatcgggttgcactggaaaatgttggcaacgtttttctgccggatcctgagcatatccggcaactcacaccttgcaaatatcattatgccaggtgttttttcgctcatcgcactactgggtttgtacggattactgagccacgactatatcgattatttgctgatgaaggtcgacttctcctttttcgattacgatgaatctgctctccttttttatttccgctacctgtccattattgttttatttgcattaacgacacgctttttgctttggctttttatatttagaaaatgcaaagcgatgccgccaaaatag

SEQ ID NO: 242998 - DNA, 1053 bp, Klebsiella pneumoniae
atgaccctgaatgttaagggatacgccgctttatcagccaaatcagatttagaaccacacaattttgttcgtcgcgatcctcgcgataatgatgttgtcattgagatcctttacagcggtgtttgtcactcggatatacataatgttaataatgactggggaggcgccaaataccccatggttcctggccatgaaattattggccgggtcattcatgttggtaaagcggtaacgaaattcgaaatcggagattatgccggggtggggtgtatggttgactcttgccagcattgtaaatcctgtgaaatggggcttgaacaatactgtgaagaaggcaataccttaacctataacgatattgatcgtcacgatggcatgccgactttcggaggctattcagataagattgttgtgactgaaaagtttgttattaaaataccagacatgatggatttaaaaggggcagctcctcttctttgtgctggcataacgacctggtcgccgcttcgtcactggaatgttggtcctgacagtaaagtggccgttgttggactgggtggtctgggtcacatggccataaaactggcaaaagcattgggggcagaggtgacgttatttagccgttcaccaaataaggaggctgatgcgcgtcgacttggtgcagaacatattattatttccactgatgaaaatcagatgaaggaagtctataaccaattcgatttgattattgatactgtaccttacgttcatgacctcaatccttatatcccaacgcttgggctcaatggaactctggtactggttggttacctgggaaatattgaaccaatgttgaacagcacacctctggttttaggacgtaaatctgttgcgggctccgttattggagggattgctgaaactcagcaaatgattgatttttgcgctgagcaccatattagcgcggatatagagcttattaatatacaggatattaacagcgcatgggtacgtatgttaaaaagtgacgtaaaataccggtttgtcatcgatatggcatcacttaaataa

SEQ ID NO: 242999 - DNA, 339 bp, Klebsiella pneumoniae
atgttcagaacagaagacatcatcgatgagataattcaatggattaattcaaacttacataaaccgctgaagatagaggatgttgctgcgcgggcaggatactccaggtggcatcttcagcggatttttgtacaggtgaaagaagttagccttgggaagtacataagagatacgaaacttagacttgcagcaaaagatcttattgatactaatgaatcaattatggagatcgcttataagtatggattcgattcccaacagacatttactagggtcttttccaaaatttatgaatgtccacctttgaaatatcgcaacaaaaataaattaatcagttag

SEQ ID NO: 243000 - DNA, 1752 bp, Klebsiella pneumoniae
atgtatttaggtagcctaaaaatttcgcggtttcgatcttgtgatgatgtgaccgttagcctccgcccagatttaactgtattggttggtgaaaataatggtggaaaatctaatgtcgtagacgcaatcagattgcttactttgccgttgagcggacgccgcgaacgatatccagaggatgaggatgtacgacgctattcgacagtcccaagttttcaaatcgaaggggctttccagggtctaagcgatactctcaaaggtctattgatatctgcagttcccgatcctaccaagagcgaggctacctacggctatcgatatgaatcgcgttctgaacatgctccccgtggtaagactaccgtgtgggctggacgtttcgacactaatggaccagagcttggttcttctgagttgatcagacacgtttatctccctcctttaagggacgcacatcaggtgctgggtactagcagcggcactagagtgatggcattgctgcgtaatttcttgccaaaagagcgggagcaggatttcctcgctggtgtcaggcgtgcggataatcggcctgagatcttaactacaatcaatacggatatcagtgctgctctcggactactcactaatggagtacgtccgcagatagcggcattggattttggcagcgaaaccttactcgatgtagctcgtgatttgagatttcgtatggccgatactggtttgatacccgaagatattcggtcttctggtctggggtactcaaatttactctacatggccactgtggttgtagagctgactaaggccaaagaggcagacctcactattttccttgttgaagaacctgaagcgcatttgcatccgcaattacaggtacttgtgcttgagttcctcttggatcaagcgcgccaatcagcatcacgtatcgtagagccaggaaagcctgaaggccgcatccaaattgttgtgacaacccattcccccaacctgaccgcatgggtttctccacgtcacctagtggtcatgcgttcgcggcatcgtgaacaagatggaatagccatctcagaatcagtgagtgtgcccattgccgaaatagggctaaagccaaagacattagataaaattagtcgatatcttgacgtgactcgttccgctttgctgtttggtaacagagctatcttggtggaagggatcgcggaagcactattgttgcctgtgttagcacaaaagcttgtgctagctgatgatttagatgggtggcttaggttcaagggggctgtaattgtgccgatcgaaggtgtggacttccgtccatatgtagaggtactgctacggccatatggtgatgcacgtattgctgataggctgatagtgatcactgatgcggacccaaccgtgttgggaaataggaaagttgatctggaaaatctggctgcaacgcatggagctccagatgctttgatcgttctaaccaatcagcacacattggagcacgaaatttttggcgctggaaacgaaagtttcctgaaaagtgtgtttcttcgtttgcatcgtaattcacgtagagactgggaagcgcagatagagggcattccagaacaagatcgtcccaatgcatttcttaaattaattgaggcgaaaaaaactcgcaaaggcgatttggcgcaagctatggcttcgcgcattgaggcgggtgaaccatttgttgttccgccttatcttattgatgcaattcgtggagcttcaggtatatga

SEQ ID NO: 243001 - DNA, 1776 bp, Klebsiella pneumoniae
atgactggcatccacaatctaaccccagagcaagagagttttgcttctcacgttggcggagccttcgttaatgcttgtcctggagccggaaaaacgcgcactatcattgctcggctagcgaggatcgccgctacgttgccttctcgtcagggcatagcgatactttcatttacaaactccgctgtagacgagttccgcgaacgatgcctggctgctgggctcgatactcttttaaagtatcctagtttcatgggaacacttgatgctttcgtcaggcatttcgttgtactgccaagttgtgcgatatcgagtcaaacacggccaattatcctagatagttgggatacgcttagtgtagaaattcgtttatcaggtcaatttgcctttcgaggtcaaccggtaagtctagatttgtttgatccagaaaccaacgttattgatcctgataggattcgacatgcaggtttgcaaaatcatgtacgtcaacatcagaatcgatatcaacaagtagcagcaaatcggcgacgatctttgctacaagctggctatatgagtgcaggggatgcacgtgctcaaacattgcggttgattagagataatgtaattggtgagtcacttgctcgcgcattggtggcacgttttcaagaagttatggttgatgaagggcaagattgcaatccactcgatctgcaaatactgacatggctcagagcacatggggtaaatgttacgttcgtttgtgatcctgaccaagcaatctacgaatttcgtaatggtaatcctcaaggaatacaggtatttaaggatacatatcctattgcggcgcaaaaggggttgacggggaattttcgtagtagtccagcaatttgccagctagcagccactctaaggcgagaaggtcagattgatcggtcgcttggtgaaagtgctgatgttgactatccagttttacttcttacttacggtggccgcggcccaacggcaattattggtcaggcattccttagaaggattagagaactggggctggagtcaaccaaggcgattattttggctcactcaggcaaagttgcgttgcaggcagctggcttcacttccagcatttcaaccggaaactcgcgaattgagttgctggctcgtaaagtgtcagagttctggtcacctgccgcaaccccaagaacgaaggagaatgtaatccagtcagtcgaaatattattgctggatttaatgggggtgcgtcaacgaaatgagcatctggttaaagtcatcgaacgtcttggattggaccggcgtgcccatcggagatgcgccctaagttttctcattaaccttccaaaaacgtgtagagactccgatgaagagcggcttgcctggatagcctgtgttcatgcggaaattgagaagctgcatctgccactccctgctggcgtaagcttacgtcgtttcttccaacagcctcctgatgcgcaatggtcaaagcatcttcaggtgcccgctgctctcagtttcgcatgtggcaacatacatgaagtgaaaggtcgtgagtacgatgcagtatgcgtcgtagtcccgccgaatcgagcccctgaaaacagaattgaagcactcttcgagtcatggcaagcgcgagtagatgcagaggcaaagcgcgtactctacgttggcctcacccgtgctcgtaattttgttgctcttgcgataccaaacgcctttgcagggcgttgtgttgatttgctggccacaggccaagtgccctacacaagagtggatttgtga

SEQ ID NO: 243002 - DNA, 1878 bp, Klebsiella pneumoniae
atgtggcatgataacgagacaactgtcgattatttgaattttggtgttgttgctgatgcatgtgcaagcctgctgaagcaggctaatggggaacctatttctataggagtttcaggtggctggggagcaggtaaatcttctctggtgaaaatgattgcatcacgcctagagagctcttcagttgaagagtcgttggtggaagagagaaatcaagaaaagcattcctttgtcgtactcactttcaatccttggctataccaagattttgagtccgccagaagtgcattgctacaaattgtgggggacgagattgttcggcttacagatgaaaataagactatcaccgacaaagtatctgaactgtggcgaaggataaatcttctccgagtcgctcaattaagtggcgaagctgcattgactttaactactggcattcctattggttctcttggaaaaaccgtttgtaaattggctggttggtttacgtcggatgacaaatcgagcaatgaatcatcagatacagatagtctcgagctaagtaccagcggtcttctaaaaccgagtgagccattctcgatgccagcccatattcaggcattcagggatactttagagagtattctagaagagttgaaaattacgttagtaatatttgtggatgatttagacagatgtttgccacaaacagcaatttcaacacttgagtcaattcgtttattactatttattcgccgtagcgctttcgttattgctgcagataatgactttataaaagctgcagtgaaggttcactttgatggcgcaggaataacgggtgatgttgcaactaactatttcgataaattaatacaggttccactccatgttcctcgccttggtttgaatgaggcgaaagcgtatctggtgcttttgctgcttgagcgagagaccaacgcaggccatttcagtaaggaaagattcgatcatgctcttagcgttatccctgagaagctgcgtaatagttggaaaggtgaaacgatcaatcaagagtttttatatgaactggtagaacatgttaatgcactcaaaagtttaatggatttagcccaaggacttgcggctcttcttcatagttctttagcagtaaacgctaatccccggctaatgaaaagatttttaaatactgtttatttgcgtgatgctctttctgcacctcagggaataacgttagatatagccgcactggcaaaatggcatctccttgaaaggtgcgacgaaagccttgctgaagaacttgctagtcgtgttcattcggataatgacggtcgagtacaagttttggcggatgctgaagctgctgcagcgggtgagagtagtttacctgagcctttcaagaatacgccatttactcagcaatggctccaactccagccagcattgggaaccgaggatctacgcccgcttctccacctgagtcgtgactctggaactcgtgacttcggtgatgacaatatgactcctgattctagaaaattgagagacgcactgaaagttgcaactaatggtcatgagtccttagttgaacttatgaggaaaataggaccttcacagacagagttggcgatgactaaggcctggcagagtaatagtgcctcacgtacctggaagagtagcaaagaaattgtaatgctgattgagtgctgtaaggtttacacggaaattggaaataaagcagtcagcttgttggatcaggctcctctgaaacttattggcccgggtttaatcccaactcttggtgctcagccatgggcacagcaaattttagaacgatggaaagatcttaacgaattaccaaaaacgactaggaatgcaattgtgaaccttgggaggaggcgctaa

SEQ ID NO: 243003 - DNA, 810 bp, Klebsiella pneumoniae
atgggaacatcaacttctagtgggggaggccgcgcaggttcaccgtttgatcctgaatggttaaaacctgaaagtaactcgacagcaggtggaggggattcgcctgattcaccatcggaggaaaacgatggaaatgtaattcctgatggtgcaatagcaccagaacgacggtttggacctgctcgttcgctacttgggggatatctgcaaaatggcagccacgataatttacgtggtgcgacaagaagcatggtctccaaaggaatgggaggtgcgagacgagctgctgctactatgcgaggtgttgccagcggtgtcggtagtcttggtgagttcctgacgtctgttagggatggaaacgaccagcgagtgattgattggcttactcacgttcgtcaagagaatctttcggcaacagatcttactcttgaaattttgaaagaggttattcctgggacaggaagcgttgatgacgaatcgctccgtaatgctggcgcggaggctatggcgcaactctatgaactttatccggacgtggacatatttaatctcacggatgcgcaaatagctgaagtcatggggttgaccattgcgaatgagatttgtaatcgaatagatctccaacttggacagacttacgaaaaattaaagtatgatcctttattaattcaggaacggcgttctgatattcgcgagtgggtcggtgctgaggttagggtggtaatggaaaaacaaactacaaaaaatacagaaccgaaaagcttggctcagtctattctcttgtctgccttagaggtattttcagaatga

SEQ ID NO: 243004 - DNA, 1266 bp, Klebsiella pneumoniae
atgattaaagttatgtgtgctaaagcagagctgattccagcgcaggttcctgctgatgagcgagtattctcctattttaaaggagctaagcgtgcaggtgtgggtacaattgcaaatcgatggcatggttcattaaaaaggggtgggtttcgaccttcaacagagatttgggattttgtacagttttgccttgcggtatgtagcgcggatctatcaagccctagaaaaacaagtgcagatggctggacccggaatattcagcttacggttggattgtgcaatccagataagtggctaccgctaaaatccgatcttgaagatatgctaaaagttctaactggtgattattggttattaaatttcaataatgcaggtatggaagctcctcaaggagatggcgcttttctcactaatgattgcatatctttattatcaggagggctagatagtctaataggtggaattgatttggtggctaaggggcgaaaaccactatttgtctctcaactcgcacataaagattctgagcggcagagggcatacgcatccatgctgatgggaaatggttcacattatcaatggagtcatggcatcagtttcaaaggatcacgcgagccttcgacacgtggtcgctcattagctttttatgcatttgcattacttgcctcaacgaaaataaacttaccaaaaccaacaatatttattcccgaaaatggggtgatctccataaatcctcctttggttccggggcgcgtatccagtttgagtactcgtacaactcatcctatgtttatcgatatgttgcaaagagttctggataatttgggcatccatgtgcagcttgagttgccgtaccgtttcaaaactaagggtgaaatgatgcgggaatgccttgaccaagatcttttgcaaaaatgggctgctgattctacgagttgtggccgttttcgaacctataatcgtcagcactgtggacgttgtgttccttgcttgatccgtcgggctgcattcattgcatggaaacctgagggggatactacgtcttaccgctttgaatctgttgttggcagtgacaagtctggtgcaccagatgatcctatggctgtagcacttgccatccttgatgtaaggaagagagggctagacagatttcttggtggttcgttggtttttgcaccgattaaagagcgacccatgtatcgtagagttttgcaacaaggtattaaagagctagaaactgtactcattcaggataaattactttga

SEQ ID NO: 243005 - DNA, 759 bp, Klebsiella pneumoniae
ttgattgattttcactgtcacgttgatttgtatcccgaggctagagatgtttatgccggtgcggttaagcgtaatgttttcacttggttagttactacgagcccaaaggctttccatgctacaagtcatgttttagaaaaacatgactctgtaatgatcagtcctggacttcatcctgaaattgtcgctgatcgtttccaggaattggaaatgcttctcgagttgattcaaaacgtagctgctgtaggtgaggttgggttggatggttcaaaacgatactccaccagttacgcgatgcagcttcgagtgttttccgatgtggttagaaagtgccacgatgttgggggacgagcaatgagcatccactcaagacaggccgttccggatgtgctagctacgttaaaagcgttcccctctcacggaattcctgttttacattggttcaccggaactattacggaattgaggaatgctacagcacaaggatgctggttcagtattggtccggcagctttcaactctgccacaggtaaagctcttgctactaagcttcctaaagacagggttgtgccagagagcgacgggccatttgctcaatttaacaatcgaactgtgatgccatgggatttcaatattacagttcgattgctaggcgaggcgtggtcaatgcctgaaaatgatgtaaagctacaattgttaaacaatacgaaaacgttgctaagacagatggggagcgatcgaattgctctcaacttttaa

SEQ ID NO: 243006 - DNA, 915 bp, Klebsiella pneumoniae
atggaatctgcacgtgataaacatacccgtgagattgtagaagcagaggatctgtggctacttgatagcgttgatactgaaggttacgtgtgctggggatgtggtataaccatgcatcctgctgcatgggaaaaagataaaaaagtcagagcctattttaaaaagaaacgccatattcagcatcatcctgaatgtgatgctgatgctgaaagcacagtaattcgccaaggccagaaggccagtgtccgcaacatactggacagtgctccggggttaatgccctcggggctaaagttgattgaaaaacgcccagttgttgaaccaagtttctctggtgatgaaagtaaatccagttcgacacgttcagcatcctcacaatctggtgaaggtaattcgcccgaacgacaatcccggcgtcaagtgaatgctattcgcaatatttgccgtgccttcatccgtttcccgcatgaccggggaatgtcgcttaacgttcccggaatcagtggtcaaatctacatgacggcatttaaaaagctccggaatgaggttcaaccttaccctgagccgaagatcttttatgcaccactgctctggaataaatttactgaaaatgatgaaaacctgatcattccgttgtctggtgaatggggaaaagatgaggaaggtaaacctaaacctacccgaagctaccagatctacatcgaatgggctagctggtctaaagccaagcgtaccgtggttcgtaaagagctggaagcagcccgtacagaggctatcgaagctaaaggtaaagggctgaaagataaagcctggatcttttttatcggcgagcaaaatgcagaaaatccggagatcttctacgttagcgattatcgactcatctgcgcgattgtagggcacatcacttatccctga

SEQ ID NO: 243007 - DNA, 2400 bp, Klebsiella pneumoniae; identical to SEQ ID NO: 219253

SEQ ID NO: 243008 - DNA, 825 bp, Klebsiella pneumoniae; identical to SEQ ID NO: 149450

SEQ ID NO: 243009 - DNA, 2160 bp, Klebsiella pneumoniae; identical to SEQ ID NO: 149449

SEQ ID NO: 243010 - DNA, 1452 bp, Klebsiella pneumoniae; identical to SEQ ID NO: 149448

SEQ ID NO: 243011 - DNA, 1398 bp, Klebsiella pneumoniae; identical to SEQ ID NO: 149447

SEQ ID NO: 243012 - DNA, 402 bp, Klebsiella pneumoniae; identical to SEQ ID NO: 149446

SEQ ID NO: 243013 - DNA, 639 bp, Klebsiella pneumoniae; identical to SEQ ID NO: 149445

SEQ ID NO: 243014 - DNA, 1512 bp, Klebsiella pneumoniae; identical to SEQ ID NO: 149444

SEQ ID NO: 243015 - DNA, 1188 bp, Klebsiella pneumoniae; identical to SEQ ID NO: 149443

SEQ ID NO: 243016 - DNA, 1380 bp, Klebsiella pneumoniae; identical to SEQ ID NO: 149442

SEQ ID NO: 243017 - DNA, 636 bp, Klebsiella pneumoniae; identical to SEQ ID NO: 149441

SEQ ID NO: 243018 - DNA, 3270 bp, Klebsiella pneumoniae; identical to SEQ ID NO: 149440

SEQ ID NO: 243019 - DNA, 777 bp, Klebsiella pneumoniae; identical to SEQ ID NO: 149439

SEQ ID NO: 243020 - DNA, 1254 bp, Klebsiella pneumoniae; identical to SEQ ID NO: 149438

SEQ ID NO: 243021 - DNA, 2682 bp, Klebsiella pneumoniae; identical to SEQ ID NO: 105740

SEQ ID NO: 243022 - DNA, 951 bp, Klebsiella pneumoniae; identical to SEQ ID NO: 118088

SEQ ID NO: 243023 - DNA, 858 bp, Klebsiella pneumoniae; identical to SEQ ID NO: 118087

SEQ ID NO: 243024 - DNA, 483 bp, Klebsiella pneumoniae; identical to SEQ ID NO: 105743

SEQ ID NO: 243025 - DNA, 1356 bp, Klebsiella pneumoniae; identical to SEQ ID NO: 118085

SEQ ID NO: 243026 - DNA, 222 bp, Klebsiella pneumoniae
atgattcatttcagctttatctatctggctcgttctagatatttcatgtttgtaattaggttccaaaacgttacttttgtgatagtcaaaagcattctcctcattaatattgccctctcctacaaatttatcaataagagttggatcgttcattattactgtctgaacgggaaaagcgttactgccatcttcgatactaatgggtgcgtccggaacgattaa

SEQ ID NO: 243027 - DNA, 1272 bp, Klebsiella pneumoniae; identical to SEQ ID NO: 118083

SEQ ID NO: 243028 - DNA, 789 bp, Klebsiella pneumoniae; identical to SEQ ID NO: 118082

SEQ ID NO: 243029 - DNA, 261 bp, Klebsiella pneumoniae; identical to SEQ ID NO: 31765

SEQ ID NO: 243030 - DNA, 354 bp, Klebsiella pneumoniae; identical to SEQ ID NO: 118080

SEQ ID NO: 243031 - DNA, 201 bp, Klebsiella pneumoniae; identical to SEQ ID NO: 31764

SEQ ID NO: 243032 - DNA, 876 bp, Klebsiella pneumoniae; identical to SEQ ID NO: 32315

SEQ ID NO: 243033 - DNA, 1053 bp, Klebsiella pneumoniae; identical to SEQ ID NO: 31750

SEQ ID NO: 243034 - DNA, 201 bp, Klebsiella pneumoniae; identical to SEQ ID NO: 31751

SEQ ID NO: 243035 - DNA, 717 bp, Klebsiella pneumoniae; identical to SEQ ID NO: 31752

SEQ ID NO: 243036 - DNA, 852 bp, Klebsiella pneumoniae; identical to SEQ ID NO: 118074

SEQ ID NO: 243037 - DNA, 774 bp, Klebsiella pneumoniae; identical to SEQ ID NO: 118073

SEQ ID NO: 243038 - DNA, 1164 bp, Klebsiella pneumoniae; identical to SEQ ID NO: 31753

SEQ ID NO: 243039 - DNA, 1692 bp, Klebsiella pneumoniae; identical to SEQ ID NO: 105684

SEQ ID NO: 243040 - DNA, 177 bp, Klebsiella pneumoniae; identical to SEQ ID NO: 105685

SEQ ID NO: 243041 - DNA, 282 bp, Klebsiella pneumoniae; identical to SEQ ID NO: 105686

SEQ ID NO: 243042 - DNA, 627 bp, Klebsiella pneumoniae; identical to SEQ ID NO: 105687

SEQ ID NO: 243043 - DNA, 2457 bp, Klebsiella pneumoniae; identical to SEQ ID NO: 105688

SEQ ID NO: 243044 - DNA, 1089 bp, Klebsiella pneumoniae; identical to SEQ ID NO: 105689

SEQ ID NO: 243045 - DNA, 657 bp, Klebsiella pneumoniae; identical to SEQ ID NO: 105690

SEQ ID NO: 243046 - DNA, 2421 bp, Klebsiella pneumoniae; identical to SEQ ID NO: 105691

SEQ ID NO: 243047 - DNA, 588 bp, Klebsiella pneumoniae; identical to SEQ ID NO: 105692

SEQ ID NO: 243048 - DNA, 264 bp, Klebsiella pneumoniae; identical to SEQ ID NO: 105693

SEQ ID NO: 243049 - DNA, 762 bp, Klebsiella pneumoniae; identical to SEQ ID NO: 105694

SEQ ID NO: 243050 - DNA, 765 bp, Klebsiella pneumoniae; identical to SEQ ID NO: 105695

SEQ ID NO: 243051 - DNA, 525 bp, Klebsiella pneumoniae; identical to SEQ ID NO: 105696

SEQ ID NO: 243052 - DNA, 432 bp, Klebsiella pneumoniae; identical to SEQ ID NO: 105697

SEQ ID NO: 243053 - DNA, 258 bp, Klebsiella pneumoniae; identical to SEQ ID NO: 105698

SEQ ID NO: 243054 - DNA, 189 bp, Klebsiella pneumoniae; identical to SEQ ID NO: 105699

SEQ ID NO: 243055 - DNA, 252 bp, Klebsiella pneumoniae; identical to SEQ ID NO: 31754

SEQ ID NO: 243056 - DNA, 2391 bp, Klebsiella pneumoniae; identical to SEQ ID NO: 105701

SEQ ID NO: 243057 - DNA, 471 bp, Klebsiella pneumoniae; identical to SEQ ID NO: 105702

SEQ ID NO: 243058 - DNA, 297 bp, Klebsiella pneumoniae; identical to SEQ ID NO: 105703

SEQ ID NO: 243059 - DNA, 1146 bp, Klebsiella pneumoniae; identical to SEQ ID NO: 118051

SEQ ID NO: 243060 - DNA, 378 bp, Klebsiella pneumoniae; identical to SEQ ID NO: 118050

SEQ ID NO: 243061 - DNA, 429 bp, Klebsiella pneumoniae; identical to SEQ ID NO: 31755

SEQ ID NO: 243062 - DNA, 258 bp, Klebsiella pneumoniae; identical to SEQ ID NO: 118048

SEQ ID NO: 243063 - DNA, 609 bp, Klebsiella pneumoniae; identical to SEQ ID NO: 118047

SEQ ID NO: 243064 - DNA, 1251 bp, Klebsiella pneumoniae; identical to SEQ ID NO: 118046

SEQ ID NO: 243065 - DNA, 321 bp, Klebsiella pneumoniae; identical to SEQ ID NO: 118045

SEQ ID NO: 243066 - DNA, 327 bp, Klebsiella pneumoniae; identical to SEQ ID NO: 118044

SEQ ID NO: 243067 - DNA, 258 bp, Klebsiella pneumoniae; identical to SEQ ID NO: 26624

SEQ ID NO: 243068 - DNA, 792 bp, Klebsiella pneumoniae; identical to SEQ ID NO: 118042

SEQ ID NO: 243069 - DNA, 201 bp, Klebsiella pneumoniae; identical to SEQ ID NO: 118041

SEQ ID NO: 243070 - DNA, 1242 bp, Klebsiella pneumoniae; identical to SEQ ID NO: 105539

SEQ ID NO: 243071 - DNA, 576 bp, Klebsiella pneumoniae; identical to SEQ ID NO: 105538

SEQ ID NO: 243072 - DNA, 579 bp, Klebsiella pneumoniae; identical to SEQ ID NO: 118151

SEQ ID NO: 243073 - DNA, 1041 bp, Klebsiella pneumoniae; identical to SEQ ID NO: 118150

SEQ ID NO: 243074 - DNA, 456 bp, Klebsiella pneumoniae; identical to SEQ ID NO: 118149

SEQ ID NO: 243075 - DNA, 1158 bp, Klebsiella pneumoniae; identical to SEQ ID NO: 105537

SEQ ID NO: 243076 - DNA, 582 bp, Klebsiella pneumoniae; identical to SEQ ID NO: 105536

SEQ ID NO: 243077 - DNA, 1059 bp, Klebsiella pneumoniae; identical to SEQ ID NO: 105535

SEQ ID NO: 243078 - DNA, 1143 bp, Klebsiella pneumoniae; identical to SEQ ID NO: 105534

SEQ ID NO: 243079 - DNA, 774 bp, Klebsiella pneumoniae; identical to SEQ ID NO: 105533

SEQ ID NO: 243080 - DNA, 1080 bp, Klebsiella pneumoniae; identical to SEQ ID NO: 105532

SEQ ID NO: 243081 - DNA, 957 bp, Klebsiella pneumoniae; identical to SEQ ID NO: 105531

SEQ ID NO: 243082 - DNA, 1209 bp, Klebsiella pneumoniae; identical to SEQ ID NO: 105530

SEQ ID NO: 243083 - DNA, 468 bp, Klebsiella pneumoniae; identical to SEQ ID NO: 105529

SEQ ID NO: 243084 - DNA, 162 bp, Klebsiella pneumoniae; identical to SEQ ID NO: 105528

SEQ ID NO: 243085 - DNA, 639 bp, Klebsiella pneumoniae; identical to SEQ ID NO: 105527

SEQ ID NO: 243086 - DNA, 642 bp, Klebsiella pneumoniae; identical to SEQ ID NO: 105526

SEQ ID NO: 243087 - DNA, 639 bp, Klebsiella pneumoniae; identical to SEQ ID NO: 105525

SEQ ID NO: 243088 - DNA, 1041 bp, Klebsiella pneumoniae; identical to SEQ ID NO: 105524

SEQ ID NO: 243089 - DNA, 1638 bp, Klebsiella pneumoniae; identical to SEQ ID NO: 105523

SEQ ID NO: 243090 - DNA, 1557 bp, Klebsiella pneumoniae; identical to SEQ ID NO: 105522

SEQ ID NO: 243091 - DNA, 1083 bp, Klebsiella pneumoniae; identical to SEQ ID NO: 105521

SEQ ID NO: 243092 - DNA, 213 bp, Klebsiella pneumoniae; identical to SEQ ID NO: 105520

SEQ ID NO: 243093 - DNA, 1176 bp, Klebsiella pneumoniae; identical to SEQ ID NO: 105519

SEQ ID NO: 243094 - DNA, 330 bp, Klebsiella pneumoniae; identical to SEQ ID NO: 105518

SEQ ID NO: 243095 - DNA, 906 bp, Klebsiella pneumoniae; identical to SEQ ID NO: 105517

SEQ ID NO: 243096 - DNA, 963 bp, Klebsiella pneumoniae; identical to SEQ ID NO: 105516

SEQ ID NO: 243097 - DNA, 447 bp, Klebsiella pneumoniae; identical to SEQ ID NO: 105515

SEQ ID NO: 243098 - DNA, 537 bp, Klebsiella pneumoniae; identical to SEQ ID NO: 105514

SEQ ID NO: 243099 - DNA, 258 bp, Klebsiella pneumoniae; identical to SEQ ID NO: 105513

SEQ ID NO: 243100 - DNA, 591 bp, Klebsiella pneumoniae; identical to SEQ ID NO: 105512

SEQ ID NO: 243101 - DNA, 276 bp, Klebsiella pneumoniae; identical to SEQ ID NO: 105511

SEQ ID NO: 243102 - DNA, 957 bp, Klebsiella pneumoniae; identical to SEQ ID NO: 105510

SEQ ID NO: 243103 - DNA, 852 bp, Klebsiella pneumoniae
atgtttaaagaatctgaccacgtggaatttgttagtgcctttctttatcaaaatttaggccttaatgttcccgctgacgatataaccgttcaattatctgatacttcgttcgacaaagtaacctttgattacgatgtagatatcgataatttaaattgtatgttggatctctacatatctgaactaataaagcacaacgcatcttactccggtaatactttaagcccagttaaagttattgatattgtttcaatgattattaatgactgtgaagagttatctaaagctaattcttctactgatgctataagaaatctttatctcgataaaatgaaggtggatgggaaagtgttagttgcgaaatttgcacttaaacagttttttcattccgactttggtgactttatctcatttgtcgagaaaagaattacagattgtcttaatgaaactttaaggattatcaaagctgttgaacatggctttgtacgtgttgggcagcataagattaatcgccgtattaatgatgacttaaagttatgcattgatttcaatactgatgattatccggcaaatatgccagatatatatattaagtttaacgatacatttgatgggaacggggcgttatattgtgacaatgatgccctcatatccctctataccgatgttgcttcaattatcaatgtgccggtgatgatggaagtaagattgatcaataaaagagggcgtgttgtctgtgattcttcgcattcaacttacgtatctctcgaaagtaatgaccgatacagagtaactgatcgcacattactaataactgaagcttttgacgattttcgtaacgcgtctcaatga

SEQ ID NO: 243104 - DNA, 921 bp, Klebsiella pneumoniae; identical to SEQ ID NO: 118119

SEQ ID NO: 243105 - DNA, 936 bp, Klebsiella pneumoniae; identical to SEQ ID NO: 118118

SEQ ID NO: 243106 - DNA, 879 bp, Klebsiella pneumoniae; identical to SEQ ID NO: 31774

SEQ ID NO: 243107 - DNA, 522 bp, Klebsiella pneumoniae; identical to SEQ ID NO: 118116

SEQ ID NO: 243108 - DNA, 1233 bp, Klebsiella pneumoniae; identical to SEQ ID NO: 31775

SEQ ID NO: 243109 - DNA, 222 bp, Klebsiella pneumoniae; identical to SEQ ID NO: 26755

SEQ ID NO: 243110 - DNA, 2007 bp, Klebsiella pneumoniae; identical to SEQ ID NO: 31776

SEQ ID NO: 243111 - DNA, 1128 bp, Klebsiella pneumoniae; identical to SEQ ID NO: 118112

SEQ ID NO: 243112 - DNA, 1059 bp, Klebsiella pneumoniae; identical to SEQ ID NO: 118111

SEQ ID NO: 243113 - DNA, 978 bp, Klebsiella pneumoniae; identical to SEQ ID NO: 118110

SEQ ID NO: 243114 - DNA, 378 bp, Klebsiella pneumoniae; identical to SEQ ID NO: 105745

SEQ ID NO: 243115 - DNA, 873 bp, Klebsiella pneumoniae; identical to SEQ ID NO: 31763

SEQ ID NO: 243116 - DNA, 1785 bp, Klebsiella pneumoniae; identical to SEQ ID NO: 105747

SEQ ID NO: 243117 - DNA, 873 bp, Klebsiella pneumoniae; identical to SEQ ID NO: 105748

SEQ ID NO: 243118 - DNA, 3189 bp, Klebsiella pneumoniae; identical to SEQ ID NO: 105749

SEQ ID NO: 243119 - DNA, 1059 bp, Klebsiella pneumoniae; identical to SEQ ID NO: 118104

SEQ ID NO: 243120 - DNA, 135 bp, Klebsiella pneumoniae; identical to SEQ ID NO: 197115

SEQ ID NO: 243121 - DNA, 1512 bp, Klebsiella pneumoniae; identical to SEQ ID NO: 118102

SEQ ID NO: 243122 - DNA, 513 bp, Klebsiella pneumoniae; identical to SEQ ID NO: 118101

SEQ ID NO: 243123 - DNA, 4305 bp, Klebsiella pneumoniae; identical to SEQ ID NO: 118100

SEQ ID NO: 243124 - DNA, 582 bp, Klebsiella pneumoniae; identical to SEQ ID NO: 105773

SEQ ID NO: 243125 - DNA, 291 bp, Klebsiella pneumoniae
atggcagaagataaagaattacaggttcgttacacccgagggggagaacagttcgaaaagtcattcgcctgggatggctgtgatcctgttggaagtacattagattgtttagttgaagaacataatctgaggatgttgatccctgctcaagagagggctgatttaggagggattagaaacattcgtaaaccaataaatcttctcgaacacggtattgatgatgtgttcttctatgatgaggaaatcaataagtggcaagagatctccactgattggcttacggatgcttaa

SEQ ID NO: 243126 - DNA, 663 bp, Klebsiella pneumoniae
atgattaacggtttaaaacctctcgaccgcaccctgcgctggggcatggtcggcggcggcagcagcagccagatcggctatattcaccgctctgcagcgctgcgcgataacaccttcacgctgctggccggcgcctttgatattgatggcgagcgcggacgccagttcggccaacagctgggggtggatcccgaccgctgttacgccgactatcaaagcctgttccgcggcgaggctgcccggcctgacggcattcaggcggtgtcagttgccacgccaaataacacccactatgccatctgccgggccgcgctggaggccgggctgcacgtggtgtgcgaaaagccgctgtgcttcagcagcgaggaagctgacgagctggtggcgctcagccagcggcggcgcaagattatcggggtgacctacggctatgccggccaccagctgatcctgcaggcccggcagatgatcgccgacgggctgctgggcgatatccgtatcgttaatatgcagtttgcccacggttttcacgcccgccggtggaacaggaaaatgccagtacccgctggcgggtcgatccccgcttcgtcggccccagctatgtgctgggcgacctggccacccatccgctgtttctggtcgaaaccatggccccgcagctga

SEQ ID NO: 243127 - DNA, 153 bp, Klebsiella pneumoniae
atgttatggctactgattaagtacgcgatcaccgccggaatggttgtttttatctctgaagttgccaagcgtagtgatcggcttggtggtcttgtcgccgcgcttcccctggacgcccttctaagagtcaagctgttatcgggatactgttga

SEQ ID NO: 243128 - DNA, 213 bp, Klebsiella pneumoniae; identical to SEQ ID NO: 151175

SEQ ID NO: 243129 - DNA, 192 bp, Klebsiella pneumoniae
atgggcaccgctcccgatgaacagcgcgattacaacggcactggtatcatccggcagtatattaaaaaaggcatcagcgatcaggaaaaccagacagtttgcctggatccccgttgctgttacagtatgagtatttttccgttcacagaaccaccctacaccttcccgtatctgagcatacgggaagggtga

SEQ ID NO: 243130 - DNA, 270 bp, Klebsiella pneumoniae
gtgtccctgacggatttgccggggggagaaagtctggaaatgacgcaacgaaggttgttgccttactggcaccacgtcattgtcctgcgcgtcgccagtggcgaaaccatgttgctggtcagtcatgctaatacactgcgtgcgctgaccatgtttattgagcagattgatgaaaataaggttcccgatctgcatgtcctgacgggaatccccgtactgtatgaaatgaatgaaaaacgggccatcaccgcacgttattcccttgaatga

SEQ ID NO: 243131 - DNA, 375 bp, Klebsiella pneumoniae
atgtacaaatcattattcgcggtggtgataggcggatcgatcggctgtgtgatccgctggatactgtccatgcgtctcaatgcacttttccccaatcttccacctggtaccctggtggttaatctggttggcggatttatcatcggtatggcactggccttttttgtccggcagcctcaccttgatcccgcctggaagttttttattaccaccggcatatgtggcggtatgacaaccttttccaccttttctgctgaggtggtggtgttacttcagaatggcaattatgcatgggctgtcatttccgtactgacgcacgtaactggctcgcttctgatgactgccactggtttctttgtgatgacactgctgtaa

SEQ ID NO: 243132 - DNA, 261 bp, Klebsiella pneumoniae; identical to SEQ ID NO: 185052

SEQ ID NO: 243133 - DNA, 3060 bp, Klebsiella pneumoniae; identical to SEQ ID NO: 185051

SEQ ID NO: 243134 - DNA, 1116 bp, Klebsiella pneumoniae; identical to SEQ ID NO: 185050

SEQ ID NO: 243135 - DNA, 1167 bp, Klebsiella pneumoniae; identical to SEQ ID NO: 185049

SEQ ID NO: 243136 - DNA, 696 bp, Klebsiella pneumoniae; identical to SEQ ID NO: 185048

SEQ ID NO: 243137 - DNA, 786 bp, Klebsiella pneumoniae; identical to SEQ ID NO: 185047

SEQ ID NO: 243138 - DNA, 279 bp, Klebsiella pneumoniae; identical to SEQ ID NO: 151174

SEQ ID NO: 243139 - DNA, 237 bp, Klebsiella pneumoniae; identical to SEQ ID NO: 185045

SEQ ID NO: 243140 - DNA, 1470 bp, Klebsiella pneumoniae; identical to SEQ ID NO: 185043

SEQ ID NO: 243141 - DNA, 3174 bp, Klebsiella pneumoniae
atgaaattcccacacttcttcatccagcggcctattttcgcgattgtgttatcggtgtttatgctgatagctggcgctctggctttctttcagcttccgctgagtgaatacccatcggtaacaccgcctaccgtgcaggtttcggcaagctaccctggtgctaaccctaaggtgattgctgacaccgttgctgctccactggaacaggcaatcaacgggatggaaggcatgttgtacatgagttcccagatgtctgccgacggtcgaatggtcttgacgatttcattccggcagggaaccgaccccgatattgcgcagattcaggtgcagaaccgggtttctcgggccttgccgcgcttgccgactgaggtgcagcagatcggtgtcgtgacggagaaaacgtcaccggatatcctcatggttgtgcatatatttgcacagggcgatcgctacgatccgctttatgtttccaactatgccatgttgaacgtgcgtgatgagctatcacgcttgccaggtattgccagcgtcacgcttgggggcgagggtgaatacgcgatgcgcgtctggctggatccgaccaaagtcgcttcccgcggtttgacggccagtgatgtgaccgcagcaattcgtgagcagaatgtccaggtcgcggccggttctgtcggtcaacagccgaacagctcctcagccttcgaagtcagtatcaatgcccaggggcgtctgaccaccgttgagcagtttggcgatatcgtgatcaaagctggcgctgacgggcaggttacccgcctgcgcgatgttgcgcgtctggaattgggatcggacaactattccctgcgcagcctgctggacgataaaaatgccgtgggtatgcacatcgttatgacgccaggcgccaatgcgctggacgtctctgcctcggttcgggcgacgatggcgaggctgcaggccaacttcccggaaggtatcgaataccgtatcgcttatgacccgacagtgtttgtcagcgcctcgttgaaatcagtggcaatgacgttgctggaggcgacggtgttggtggtactggtggtgatgctgttcctgcaaacctggcgggcttcgatcatccctctggtcgcggtacctatttcgttggtcggtactttcgccctcatgtatttgttcggcttttcgctcaacacgctgtcgttgtttggtctggtgttatcgattggtatcgttgtcgatgatgccattgtggtggttgaaaacgtcgaacggcatattgcacagggccgttctccgaaagaagcggcaagaagggccatggacgaggtgactggccctattttagccattacttccgttttggctgctgtgtttattccttctgcgttcctgtcaggattgcagggggagttctatcgccagttcgcgctgaccatcgccatttcgacgatcttgtctgcgatcaactcgttgacgttgtcgccggcgctggcatcggttctgcttagaccccatcaggatatggcgcaggccgacaggttgacgcgcatcatggatcgcgtattcggtggtttcttccgtcgctttaacgctttcttcgatagattgtcgaacaactacgttggcgcagtccgccgggccgtacgcggcagtatcatcgtgctggtgctgtatgccggtttcctgggcctgacactgttggggttccagcaggttcctaacggttttgtgcccgctcaggacaaatactatctggttgggattgctcaattgccttccggcgcctcgttggatcgcacggaagccgtagtgaaagagatgtcccgaattgcgctggcggaacctggagtggaaagcgtcgtggcgtttcctgggttgtcggtaaacggccctaacatgcctaactccgcattgatgtttaccatgctgaaacccttcagtgaacgtaaggatccttcgctgtctgccgaggctattgccggtagcctgatggggaaatttagccagatacctgacggttttgtcgggatcttcccgccaccaccggtaccggggctgggcagcatgggaggatttaaactccagatcgaagaccgggcagggcttggctttgaagagctgacccgtgttcaagggatggttatggcgaaggccatgcaggctcctgaactggcagggatgatggccagtttccagaccaacgcacctcagttgcaggttgatatcgaccgcgtcaaagccaagtctcagggcgtcgcactgaccgatatctttgatacgttgcaggtgaatctggggtcgctgtatgtaaatgactttaaccgcttcggtcgtacgtatcgggtgatcactcaggcggatgcgcaattccgtatgcagcctgaagatatcgggttgcttaaagtgcgtaatgccgcgggtgacatgatcccactgggaacgctggtgaacattacccgtacctctggaccagaccgtgttatgcgttacaacggttatccgtcggcggatattaccggtggcgcagcgcctggctactcctccggacaggcaacggcagctattgagaagatcgttagtgaaacgctgcctgagggaatgacatacgaatggaccgatctgacttaccaggagaagcagactggcaactcggcgctgtatatcttcccgttggcggtgttcctggcgttcctgatcctggccgcacaatacaacagctggtcgctgccgtttgcggtgctgttaattgccccaatggcattactttccgcgatcgccggggtttggctatcgaatggagataacaacatcttcacgcagattggttttgtggtgctggtgggactggcggcgaaaaacgcaatcctgatcgtcgagttcgctcgcgccagagagagtgaaggcgtcgatcctctggctgctgtgctggaggccgctcgcctgcgtctgcgcccgatactgatgacctcgttggcatttattgcgggggttgtgcctttggtgatcgcgagcggtgccggtgcggaaatgcgtcatgccatggggattgccgtgtttgccgggatgctgggggtgacgctgttcggactcttgttgacgccagtgttctatgtcgtggtccgtaagctggttattcgccgggaaatcaagcaggcacagcgggcaatcagtgattcacggccatga

SEQ ID NO: 243142 - DNA, 1215 bp, Klebsiella pneumoniae; identical to SEQ ID NO: 185041

SEQ ID NO: 243143 - DNA, 240 bp, Klebsiella pneumoniae; identical to SEQ ID NO: 185040

SEQ ID NO: 243144 - DNA, 129 bp, Klebsiella pneumoniae; identical to SEQ ID NO: 128856

SEQ ID NO: 243145 - DNA, 453 bp, Klebsiella pneumoniae; identical to SEQ ID NO: 185038

SEQ ID NO: 243146 - DNA, 177 bp, Klebsiella pneumoniae; identical to SEQ ID NO: 128855

SEQ ID NO: 243147 - DNA, 606 bp, Klebsiella pneumoniae; identical to SEQ ID NO: 185036

SEQ ID NO: 243148 - DNA, 567 bp, Klebsiella pneumoniae; identical to SEQ ID NO: 185035

SEQ ID NO: 243149 - DNA, 417 bp, Klebsiella pneumoniae; identical to SEQ ID NO: 128895

SEQ ID NO: 243150 - DNA, 420 bp, Klebsiella pneumoniae; identical to SEQ ID NO: 128896

SEQ ID NO: 243151 - DNA, 240 bp, Klebsiella pneumoniae; identical to SEQ ID NO: 128897

SEQ ID NO: 243152 - DNA, 570 bp, Klebsiella pneumoniae; identical to SEQ ID NO: 185031

SEQ ID NO: 243153 - DNA, 969 bp, Klebsiella pneumoniae; identical to SEQ ID NO: 151173

SEQ ID NO: 243154 - DNA, 297 bp, Klebsiella pneumoniae
atgcattgtccgaattgcggttcgcaaaacatacgactgcgccatgtgggtaaaaagacgggtggggtcattggcgcaacagccggaggcattgccgggcttgaaggagcctccaccggtgcgctgataggttcagtcattccggttgtcggtacgatagccggaggcctcattggttttctgtccggcgcctgtgctggtgcggtggcaggctctctggccggagaacaactggacggtaccgtctttgatgaatacggctgcacgcagtgcgagcatatcttcagtgcaccgtaa

SEQ ID NO: 243155 - DNA, 729 bp, Klebsiella pneumoniae; identical to SEQ ID NO: 185028

SEQ ID NO: 243156 - DNA, 267 bp, Klebsiella pneumoniae; identical to SEQ ID NO: 185027

SEQ ID NO: 243157 - DNA, 312 bp, Klebsiella pneumoniae; identical to SEQ ID NO: 185026

SEQ ID NO: 243158 - DNA, 471 bp, Klebsiella pneumoniae; identical to SEQ ID NO: 185025

SEQ ID NO: 243159 - DNA, 513 bp, Klebsiella pneumoniae; identical to SEQ ID NO: 185024

SEQ ID NO: 243160 - DNA, 222 bp, Klebsiella pneumoniae; identical to SEQ ID NO: 151172

SEQ ID NO: 243161 - DNA, 234 bp, Klebsiella pneumoniae; identical to SEQ ID NO: 151171

SEQ ID NO: 243162 - DNA, 819 bp, Klebsiella pneumoniae; identical to SEQ ID NO: 185021

SEQ ID NO: 243163 - DNA, 255 bp, Klebsiella pneumoniae; identical to SEQ ID NO: 151169

SEQ ID NO: 243164 - DNA, 474 bp, Klebsiella pneumoniae; identical to SEQ ID NO: 151168

SEQ ID NO: 243165 - DNA, 219 bp, Klebsiella pneumoniae; identical to SEQ ID NO: 151167

SEQ ID NO: 243166 - DNA, 483 bp, Klebsiella pneumoniae; identical to SEQ ID NO: 151166

SEQ ID NO: 243167 - DNA, 222 bp, Klebsiella pneumoniae
atgaaaatcatcagcaaacgccaggcgatggcgatataccgccagcatccgcagtcccggttgtttcgcttctgtgccggcaaatacacatggtccggcagcatctgccactacgcaggtcgggaagtgcaggatatcagcggcgtgctcgccgtcttcgcagaacaccgtcaggaccgcaacggcccgtacgtcgtattacgcagcgttacgctgaattaa

SEQ ID NO: 243168 - DNA, 360 bp, Klebsiella pneumoniae; identical to SEQ ID NO: 151165

SEQ ID NO: 243169 - DNA, 378 bp, Klebsiella pneumoniae; identical to SEQ ID NO: 151164

SEQ ID NO: 243170 - DNA, 492 bp, Klebsiella pneumoniae; identical to SEQ ID NO: 151163

SEQ ID NO: 243171 - DNA, 204 bp, Klebsiella pneumoniae; identical to SEQ ID NO: 151162

SEQ ID NO: 243172 - DNA, 189 bp, Klebsiella pneumoniae; identical to SEQ ID NO: 151161

SEQ ID NO: 243173 - DNA, 654 bp, Klebsiella pneumoniae; identical to SEQ ID NO: 151160

SEQ ID NO: 243174 - DNA, 228 bp, Klebsiella pneumoniae; identical to SEQ ID NO: 185010

SEQ ID NO: 243175 - DNA, 1032 bp, Klebsiella pneumoniae; identical to SEQ ID NO: 185009

SEQ ID NO: 243176 - DNA, 474 bp, Klebsiella pneumoniae; identical to SEQ ID NO: 185008

SEQ ID NO: 243177 - DNA, 1122 bp, Klebsiella pneumoniae
atggcaggaggacaaccttgccatacatcgtttcagtccaccaatgaagtggacgtaatttatagcgtgatggggtttcttatgagacggcttcccgtattctttgttctggactgttcagagtccatgattggtgaaaatctgaaaaggatgaatgatggcttacagatgatcgttaacgatctgcgtaaggacccccatgcactcgaaacagcctggatttcggttattgcatttgcgggtgtcgccagaactattgtaccccttcatgatattgtgtctttttatccccctcgccttcctgtcggaggagggacaagccttggggcagcgctacgggaacttacggtacaaatagattctcaggtgcgtaaaaccagcctcgaagaaaaaggagactggaaacctgtggtttacctgctcaccgatggacgtcctaccgatgatatttcgggtgaagtaaaacgctggaatgattattacgccaaaaaagtgaacctgatcgcggtaggtatggggaattcggtagaccttggtgtgcttcgccaactgactgaaaacgttttactgtttacggaaagccaggacggagatttcacgcgtttcatacagtggatcaccgcctccgtcacggcccacagcagaagcgtaggagaagatactcaaccgccactgaaacagaccgactatattgtcaaactcgccaaagatgaaatcaccagagcttacgatgataactgcgtggttttgaccgggcgttgcagcaaaacacgtcgaccctatctcatgaagtatgaacggccaccggctaaggtgtcaggacttgcatttgacctgaacctgaacaccttcaatattgcaggctgctatccgatcgatgaagactacttctcatggacggatatggtcgcatctggcgttcaggttaataccagtgaactccacggtgtacctggatgcccgcattgtggaaacagtagcgctttcgcgatgtgcagctgtgggaagcttctttgcatcgatgggcccgatgatgttatctgcccatggtgtgagaaaggactgtcttttcaggacgacggtggtcattccgatttcaacgttagcagaggacgcggctga

SEQ ID NO: 243178 - DNA, 1767 bp, Klebsiella pneumoniae; identical to SEQ ID NO: 190027

SEQ ID NO: 243179 - DNA, 648 bp, Klebsiella pneumoniae
atggcagataaaattagcgaaggaaaaatcatgcaggctctcaactgggcctacgataaagcactggatggaaccattccgggaacgaactcatcttacgagatggctgaaaactatctgaagggtgaaggggacttagcaaaaaaggtcaactctcttattagatggcaaaatacaaaatctgccactactggttttgtttccggacttggaggtattattactctacctgtagcaattccagcaagtatcgcgactgtgatgtatgtccaaattagtatgataacaacaattgctatcatgggcggttatgatgttaaggatgatcgtgtgaaagcgcttgtttattcgtgcctagctggtaatgctgcaaaagacattcttaagggcacagggattgtcattggttcaaaactgtccacgcagttaattaagaatatttcaagagaaacaatcacagctatcaataagcgtgtaggtttcagactgctcactaagtttggtgaaaaaggggcaattaacttaggtaaaatgatcccacttgtaggcggagttattggcgggacttttgatggggtttcaacaaatcttgtaggtaatatagccaggaagaccttcattgaaggcaatatcattaatgatatctaa

SEQ ID NO: 243180 - DNA, 756 bp, Klebsiella pneumoniae; identical to SEQ ID NO: 190026

SEQ ID NO: 243181 - DNA, 540 bp, Klebsiella pneumoniae
atgggtttgggaagtttgtttggtttgactaaaaatgagtttgtgattggcggtgttaaaacaaaattgcctgaaacagatgatgagacaatggacttagcggaactgctggcccgacagttgggaagtaagctccccaccgaacaggatgtttactggtttgttattgaattttacgatcgagcgtctgcatttaaccactcggctagggcggtgttgagtaacctaccttttcgtctgtttgagatggagtatgaaggtcgtagatccgaaatctcatatgtaggcaggaagaaccctggcgtcacttaccttcttgaagaagtagcgccttcgttcaaaaaagcggtatctcatcttggggctggccctgaacaggttatagtcgctattgtatatcttgttttttgcacagcacaggctgagatgattaaaaacttgcgtgttaaatatgcagtccactatcacaacaactgtatatctagcgggagtttcaacaacgcagaaaaatggggggaagtgatcgacagtctggaatga

SEQ ID NO: 243182 - DNA, 342 bp, Klebsiella pneumoniae; identical to SEQ ID NO: 190025

SEQ ID NO: 243183 - DNA, 435 bp, Klebsiella pneumoniae; identical to SEQ ID NO: 105725

SEQ ID NO: 243184 - DNA, 1260 bp, Klebsiella pneumoniae; identical to SEQ ID NO: 105726

SEQ ID NO: 243185 - DNA, 810 bp, Klebsiella pneumoniae; identical to SEQ ID NO: 105727

SEQ ID NO: 243186 - DNA, 612 bp, Klebsiella pneumoniae; identical to SEQ ID NO: 105728

SEQ ID NO: 243187 - DNA, 423 bp, Klebsiella pneumoniae; identical to SEQ ID NO: 105729

SEQ ID NO: 243188 - DNA, 393 bp, Klebsiella pneumoniae; identical to SEQ ID NO: 105730

SEQ ID NO: 243189 - DNA, 750 bp, Klebsiella pneumoniae; identical to SEQ ID NO: 105731

SEQ ID NO: 243190 - DNA, 540 bp, Klebsiella pneumoniae; identical to SEQ ID NO: 105732

SEQ ID NO: 243191 - DNA, 558 bp, Klebsiella pneumoniae; identical to SEQ ID NO: 105733

SEQ ID NO: 243192 - DNA, 1062 bp, Klebsiella pneumoniae; identical to SEQ ID NO: 105734

SEQ ID NO: 243193 - DNA, 507 bp, Klebsiella pneumoniae; identical to SEQ ID NO: 105735

SEQ ID NO: 243194 - DNA, 3951 bp, Klebsiella pneumoniae; identical to SEQ ID NO: 105736

SEQ ID NO: 243195 - DNA, 1416 bp, Klebsiella pneumoniae; identical to SEQ ID NO: 105737

SEQ ID NO: 243196 - DNA, 1047 bp, Klebsiella pneumoniae; identical to SEQ ID NO: 105738

SEQ ID NO: 243197 - DNA, 513 bp, Klebsiella pneumoniae; identical to SEQ ID NO: 31756

SEQ ID NO: 243198 - DNA, 801 bp, Klebsiella pneumoniae; identical to SEQ ID NO: 105635

SEQ ID NO: 243199 - DNA, 486 bp, Klebsiella pneumoniae; identical to SEQ ID NO: 105636

SEQ ID NO: 243200 - DNA, 738 bp, Klebsiella pneumoniae; identical to SEQ ID NO: 117462

SEQ ID NO: 243201 - DNA, 3147 bp, Klebsiella pneumoniae; identical to SEQ ID NO: 105638

SEQ ID NO: 243202 - DNA, 2085 bp, Klebsiella pneumoniae; identical to SEQ ID NO: 105639

SEQ ID NO: 243203 - DNA, 1110 bp, Klebsiella pneumoniae; identical to SEQ ID NO: 105640

SEQ ID NO: 243204 - DNA, 663 bp, Klebsiella pneumoniae; identical to SEQ ID NO: 105641

SEQ ID NO: 243205 - DNA, 1182 bp, Klebsiella pneumoniae; identical to SEQ ID NO: 105642

SEQ ID NO: 243206 - DNA, 732 bp, Klebsiella pneumoniae; identical to SEQ ID NO: 105643

SEQ ID NO: 243207 - DNA, 123 bp, Klebsiella pneumoniae; identical to SEQ ID NO: 31757

SEQ ID NO: 243208 - DNA, 354 bp, Klebsiella pneumoniae; identical to SEQ ID NO: 26525

SEQ ID NO: 243209 - DNA, 285 bp, Klebsiella pneumoniae; identical to SEQ ID NO: 105646

SEQ ID NO: 243210 - DNA, 369 bp, Klebsiella pneumoniae; identical to SEQ ID NO: 31758

SEQ ID NO: 243211 - DNA, 537 bp, Klebsiella pneumoniae; identical to SEQ ID NO: 105648

SEQ ID NO: 243212 - DNA, 438 bp, Klebsiella pneumoniae; identical to SEQ ID NO: 105649

SEQ ID NO: 243213 - DNA, 297 bp, Klebsiella pneumoniae; identical to SEQ ID NO: 31759

SEQ ID NO: 243214 - DNA, 702 bp, Klebsiella pneumoniae; identical to SEQ ID NO: 105651

SEQ ID NO: 243215 - DNA, 282 bp, Klebsiella pneumoniae; identical to SEQ ID NO: 105652

SEQ ID NO: 243216 - DNA, 1185 bp, Klebsiella pneumoniae; identical to SEQ ID NO: 105653

SEQ ID NO: 243217 - DNA, 945 bp, Klebsiella pneumoniae; identical to SEQ ID NO: 105655

SEQ ID NO: 243218 - DNA, 600 bp, Klebsiella pneumoniae; identical to SEQ ID NO: 117444

SEQ ID NO: 243219 - DNA, 357 bp, Klebsiella pneumoniae; identical to SEQ ID NO: 105657

SEQ ID NO: 243220 - DNA, 204 bp, Klebsiella pneumoniae; identical to SEQ ID NO: 105658

SEQ ID NO: 243221 - DNA, 321 bp, Klebsiella pneumoniae; identical to SEQ ID NO: 31761

SEQ ID NO: 243222 - DNA, 159 bp, Klebsiella pneumoniae; identical to SEQ ID NO: 105660

SEQ ID NO: 243223 - DNA, 1014 bp, Klebsiella pneumoniae
atggcgaaattaagtagatttatcgtccatcaatttactcgagacgcagggaagcatgcctctctaatacctcgttcggaagaaaacaacctcgatgaaataactgatgaagtaggtattacactgttaaacttatttaataaaacggggctaaaatctggtttttttgatcaggaaggtggaattacaaagtttgaacagactttagaaaaaaattatgatgggattaaagatttttctgactttcggacgatgacaatagaaatgtcttatctgcttttggatgaattaaatcaaggttcaggtaaggcagccaaaccagggtatattgtttttttcaattatgaaagtaattcaaatcaattcttgtcgatagtaactttacaagaaacacaaggaatgatattagaaaatctctcatttaaacatattgaacgactagatcttgatcgtttgcaccttggcgcgaggatcaatcttacttcatggtcagaaggcttagctcaacgttttatatcttttaggatcggacgaaattccgaaatgcgagattatttttctcgttttataggttgtaaggagtttactgcttctaaaattgaaacagctacgcttgttagtgccattaaaaaatgctgtgatgatctttatattgataatgtagatgctataaatgaaaaactgtctttggcaaactcttattgtaaagaaaacactaatgaagaaggtaaggttaacatagaacacttaggccgttttcttttccctgaaaatgaaggataccttcttgagatagttcaaaatgaaccgtttaatcttagttgtgaagttagtatagataaacgggaactaagagggctcgtccgctacaaaggtaaatcaaaaaagatgagtattagttttgatgcagacctccttgattctaaagttttttatagtgaaaagggtttgttgtttgcagaaattcctgcggaactgaaattggaattagacaaacgagaatcagcaaaataa

SEQ ID NO: 243224 - DNA, 222 bp, Klebsiella pneumoniae
atgaaaaaggaaatcaaccagaataatactgcagagtatttatctgtaaaacaggtgacaaagggtaaggatgattgcatttcaaatgattatattattgactgtgaaatggatattaatctgaatgggggggtaaaagaatcagttgaaataaacagtagctttaccaatgacgaaggcactgttttatttgcttataaattggatgtattggtgggatag

SEQ ID NO: 243225 - DNA, 861 bp, Klebsiella pneumoniae
atgaatagcgaattattaaaatggcttgttagtatcgttacatcagcagcatttatctctggagttggctacttatttagagatagtattggaaagtttcttacaaaatctattgaacacaagtttgatacaaaacttgaaaaatttaaatctgaagtgagagagggcgagaaagaactggagcaaataaggaattatctttccaatgtgagaacaagcagggattctgttctccagtcaaaaagattcgaatcagctgagaatttaattaagattcgtaaatacctaattggtttatctatggcggtgcaatatatgcagatgcttaatgtcaaagagataataaaaatgggagatgaccaaagacttaatgactttatggaagctatcacaaggccattaaaaataaatgaaaagttagaagagtataatggttttgataaggatactatgaaattatatttgagtaaaagcacacttaaatcttttgaaatatatgaatcaatatctttgtttgctctaatatctcttcgttttttgtcaatccccttagctagaaaacacaacattctaaatgaaggagagataagcaaaaaaataattgaggtgattcctgcttcaaaggaaggttttgataaatttggtgagatttatatttataattggcacaattacttttataccgatgtattaagtaagcttagaagtgagttgattggtgaaaacaatatgatcaatgatacaaaatctgcagaaaggcttgctttggattttcaaaaaacaaagggtagtataaaagaactgttagcaacctatgggttgtctcagggcttaataaatgaaggtgggatggaagaatag

SEQ ID NO: 243226 - DNA, 252 bp, Klebsiella pneumoniae
gtgaatgatattcagcggtatcgaatggggtattttggctggttaaagaacgctttttctatggctgccgctgctgttagcgatatgtgcgcggtggcgttctctgtagaaatggcgtgcgcattgctatggatagcaatcatcgtgacatttccggtttctatgccaatccttgcattggtacagatgatggtaacccggcgtaagctgcgtaagcggtacggccatgacgaattgatgagggacgactaa

SEQ ID NO: 243227 - DNA, 270 bp, Klebsiella pneumoniae
gtgataggtgttcttctcgatctgcatcagactgacctgcatggtccgccctgttccgacgtaggcgacatccggctctgccagcggatcgttaatcaggctgtatttaaccgagccgacagtattcccgcttcctttcacacacaacacacaccgggcgctgtcattgaaaccctggaagatgttggccctgacggcaagacggcccattttggttaccttctgattgcgtacgtcaaagtttgcgaacgcctgagcccctgcgcctaa

SEQ ID NO: 243228 - DNA, 2322 bp, Klebsiella pneumoniae
atggcagaagtaccgttaccaacaccaaccgataacccggtaccaagtactgatatccgggacgcagtttatgccggcgccatgctggataaggttgtcaccagtacagaactgacatacaccgatcgcctcggcggtgagcactacaccgtagatggcattaaggcggaaggggacaaggtcgttgaggaaactaggcagaacctgatccctctcagtcgacagtatatgacgctggcggcagctcaggctgatatagcgaatattccggaagggagcactacttattatcgcagccctgacgatagtgcgcttgctattgaagtaattaataacggcgggactctggagccgaccgggcgccagatgccatctcagcaggctattgagcaagttaagctgttaattaattatgattcagttgagatcctacagagcgcctatgatgaggagggtaatgtttatcttcttctcgatgaatttggtgagctctttatagcgagtctcggccctgtttcagttcaggaaaagttcagaaagctggatgcgctgattcataaagaccgcgctgctaacctgcatgagtttccggacaaaaatgcaaacgtacccgcttttattgatgaactgggtgatttgtatatcgctggcctgggccccttttctgttgcacaaaaaatcagagccatcgaatcttcaattgttaataacgatgaacatgacataacgcaccagtacgatttcaacgggcgtctgatttcctttcaggatgcttttggggaggtgtttatccccggtcttgataaatcagttcaggagtcgataaaggggatcagggagaactaccagcgtgatcgtgcgccgcatattcgccgcctgacggatgcgcagaaccgggcgcttgaatttactgatgaagatggaagttattatctgaaggggcttggtgggaaatcgctggaggagcattttaactcgctgaaaaagcgcgttaacacactgtataaggcgaaagcgatttttgatgcctggctggactttggtattgactggaacggtaacgaatccatctcactgcagatgcagaccgcagtcaactatgtgagcaagctgccatatggtggagaaatcgtttggcgccctggtgtgtatcgcctgcatacctatatcactgcaaaacctaacgtgacgatccgctgcgttccaggcgcggtattcatgccgatgctggcgaatgccgcgttttattaccgttcgccgcaggagatctacctcgaaaactttaacctgattgatgtcgagattgacgggtcggaacagcactcaccgtcttatgacgtgggagcaaagggaacatacctgcagtatttccgtcagtgcatgttcctgcgctgtaacgttcacgacaccggggccaccggtatcggtaatgattatcctgacaggtcttttgttctggactgccagacggataactgcggacgcctggcacctgacggcagcggcggtgcttccggtatcgggatcggcctgggtgccatgcaggacgaagccctgatagtggcacgcaccattaaccgaaacagcaaaaacttcggcattttctttgagcagcagcgcctgtcagggcccggtcagccttacgtttcccggcagattatcgtatccgatgccgtgtgtaccggaaacgggcatggcttcggcgactgtggcgcatccggactggtggtggtcaacggccagttcaatgacaacctcaaaaccggtatcagcattgacgctgggacgctggctaacaacggtatcgctccccgcccgggtaagaacgggctgatgctgaactgtcaggcggagcgtaacggggtgaccgggctccattatgactcgaccaaaattcaggcagatggcggctattcattctccgacatgcatatcaacgataacgcccaggatgcgattttaatcgaggctggcactaacaccctggcggatgttcgctttgacaatatggacatcaaaaataacggtcgttatccggtgaatgttgccagcggcacctttaccgacctcgatttcacgaatctccgcatactgcgaaatggcggcgataccgcgtttaagctggacggcaatatcacgcggggcacgattcatgattgtaagcttcgctcacagaatggcgccgcagcaattaccggcggaggtaatatcagcaatttcgacattgccgaaaaccagtacaccgacactaacagcaaccccatcaatcttaccggcacactgactaatgtcacttatggccgcaacccaggactggagtaa

SEQ ID NO: 243229 - DNA, 630 bp, Klebsiella pneumoniae
atggctaaaagaaatgacaattctggttatctttatcactggataaaagcagtaccttttatgaggaataatagcctcgattactcaactgcatttgaagtgctaatcaacatcataagagatggggcaatcagagcaggtctgacaatggaggcaggtggtcatgaatgcatctgttttacagaatcaaccaagtactcccttagagatgatacatctaaatatcaaccttttggatttgagttttctaagcgaagagtgtttactgccggagggcgaccggttatctactcaccaatagctgaaaaacaactcttagatccggttattcaatggcgtttcatgccgtttgatctggacgcaaggtcagaaagctcgccatttggcattgacttcacttgggagcgagagtggcgtctcaatgagcctgaattatccttagatgaagtaagtagaatatttgttccaaatgaacgttaccgggaattgcttatagacaggactaacgacatcgtaagtgagagcatcagtgaagatacttcagattactactatggatatccccaccctagcgtggaagattacattgattctatccacgaaaggattgatgttttaagaattgactga

SEQ ID NO: 243230 - DNA, 498 bp, Klebsiella pneumoniae
atgaaaaaaataatggcagtggctttgggggcggtgcttctatctggctgtgttgctccaagcgtggttagtcctaaaaaagcagatcttccggcgtttccgcagtcggaatatgcatctattaaagtggatggcagcgagacactttccggtcaggcattcttaactacaatgggcggtgatgtgaaggttgcggcagggcaagacattatgctaatgccaaagaccagttataccgacgcaatatacaattatcagactaccggagtggcctataataccccggattctcggtacgcaaaatacaccaaaatggtgcaggctgatgcccaagggaagtttacattcaccgacatagctcccggtaaatattacgttgagaccatgatcatgtggtacaggccaagtcagtttggcctcatgccggaaggcggtttggttataacgcctacggaagttgttaaaggtaaaaataacaccgtaatggttaccaggtaa

SEQ ID NO: 243231 - DNA, 270 bp, Klebsiella pneumoniae
gtgataggtgttcttctcgatctgcatcagactgacctgcatggtccgccctgttccgacgtaggcgacatccggctctgccagcggatcgttaatcaggctgtatttaaccgagccgacagtattcccgcttcctttcacacacaacacacaccgggcgctctcattgaatccctgaaagatgttggccctgacggcaagacggcccattttggttaccttctgattgcgtacgtcaaaattagcgaacgcctgagccccggcgcctaa

SEQ ID NO: 243232 - DNA, 2058 bp, Klebsiella pneumoniae; identical to SEQ ID NO: 32296

SEQ ID NO: 243233 - DNA, 381 bp, Klebsiella pneumoniae; identical to SEQ ID NO: 105558

SEQ ID NO: 243234 - DNA, 666 bp, Klebsiella pneumoniae; identical to SEQ ID NO: 105557

SEQ ID NO: 243235 - DNA, 405 bp, Klebsiella pneumoniae; identical to SEQ ID NO: 105556

SEQ ID NO: 243236 - DNA, 204 bp, Klebsiella pneumoniae; identical to SEQ ID NO: 105555

SEQ ID NO: 243237 - DNA, 858 bp, Klebsiella pneumoniae; identical to SEQ ID NO: 105554

SEQ ID NO: 243238 - DNA, 309 bp, Klebsiella pneumoniae; identical to SEQ ID NO: 105553

SEQ ID NO: 243239 - DNA, 360 bp, Klebsiella pneumoniae; identical to SEQ ID NO: 105552

SEQ ID NO: 243240 - DNA, 141 bp, Klebsiella pneumoniae; identical to SEQ ID NO: 151177

SEQ ID NO: 243241 - DNA, 267 bp, Klebsiella pneumoniae; identical to SEQ ID NO: 151178

SEQ ID NO: 243242 - DNA, 324 bp, Klebsiella pneumoniae; identical to SEQ ID NO: 151179

SEQ ID NO: 243243 - DNA, 330 bp, Klebsiella pneumoniae; identical to SEQ ID NO: 151180

SEQ ID NO: 243244 - DNA, 1137 bp, Klebsiella pneumoniae; identical to SEQ ID NO: 185063

SEQ ID NO: 243245 - DNA, 627 bp, Klebsiella pneumoniae; identical to SEQ ID NO: 185064

SEQ ID NO: 243246 - DNA, 585 bp, Klebsiella pneumoniae; identical to SEQ ID NO: 151154

SEQ ID NO: 243247 - DNA, 2139 bp, Klebsiella pneumoniae; identical to SEQ ID NO: 151155

SEQ ID NO: 243248 - DNA, 249 bp, Klebsiella pneumoniae; identical to SEQ ID NO: 151156

SEQ ID NO: 243249 - DNA, 1005 bp, Klebsiella pneumoniae; identical to SEQ ID NO: 185222

SEQ ID NO: 243250 - DNA, 2496 bp, Klebsiella pneumoniae; identical to SEQ ID NO: 185221

SEQ ID NO: 243251 - DNA, 465 bp, Klebsiella pneumoniae; identical to SEQ ID NO: 185220

SEQ ID NO: 243252 - DNA, 453 bp, Klebsiella pneumoniae; identical to SEQ ID NO: 185219

SEQ ID NO: 243253 - DNA, 2496 bp, Klebsiella pneumoniae; identical to SEQ ID NO: 185218

SEQ ID NO: 243254 - DNA, 264 bp, Klebsiella pneumoniae; identical to SEQ ID NO: 186008

SEQ ID NO: 243255 - DNA, 948 bp, Klebsiella pneumoniae; identical to SEQ ID NO: 185247

SEQ ID NO: 243256 - DNA, 1626 bp, Klebsiella pneumoniae
atgtcgggagaaagaaacctgtttaatcatgagtttgttcgaaactggactaatggtcctttgttggttcgaaatgataatggttattttcttcgggaaaaagatattaacccacttgccatcagtaatcgctatacagtttgggacgaacacaaccagcaagtcacatttatcgattccgagactcgaactgaagaaacgctgacgcctacagctgcacttgagggtaatgttgaagttgcaatagctgatggtgcaaaaatttcctgccaaacggcgttttcatcttttaaagatatgttggctaattatgacccagaaaacgtaagccgtatcaccggggtatctgttgcatcaattgaagccgctgcgagtttgattgccggggccaagaaaatcgcctaccacagttggtctggagtggcacaacacactaatgccacccaaacagaacgtgcgattgcgacactgtatgctttaaccggttgtttcgatcaggaaggatgtaatcgaatctatgccagccacccggtgaatgtggttaattcaccgacactgatgccaaaatcacaatgggataaagcattaggtcttgaagaaaggcctatcgggccgccttcacaaggttgggttcattctcaggatatctggcattcagtattagaaggtacaccctataaaattcgcgggttaattggctttggtgccaacatattactttcacaaagtgatacttctctcggacaacaggcgcttgaggcacttgagttttatgcccatgtagatttgtttgaaacgcctacatcaaagtatgctgatatccttctgccagtaaacactgcctgggagcgcgaaggcctaagaaccgggtttgaaagtagtgctgctgctcaggaccacattcagttgagaaaaaaaatggtctctccgcgcggtgaaagccgttccgaccttgagattgttttcgatcttgcatgccggttaggaatgaatgaagcgttcttcgacggcaatattgaggcagcctggaattatcaactagaaccattaggtttgactgttgagatgctcagaaataagccagaaggttacgatatcccgcttgagcataaagtcagaaaatatgctttcagagacccaaatagtggatatctggcaggtttcaatacagaaacaaaacgtgcagagttttactctgagatccttcatcgctatggttacaatcctttacctgagtatgtacagccgcaagaataccagcgcaacgatcctgattatccactaatgctgacatccgttaaaagcggattcttctgtcatagccaacatcgaagcctgactagcctacgaaaaaaagcaccttatccaacggtagacatttcggcagctctggctgacgaagaaggtatcaagacgggggattgggtagaaattgaaacgagagcaggtcttgctcgatttagagcaaaagtggaagccaaactctctcatgaaactgtaattgctgagtttgggtggtggcaggcttgtcctgattttggcaaaccttcatacccggttaaaggtgagtacagtagcaattacaatagcttaatcagcggtgatagctatgatcggctttgttga

SEQ ID NO: 243257 - DNA, 456 bp, Klebsiella pneumoniae
atgattaagaaaacattatgcagcttattgctggccgtactttgtggcggcatggttggccccgcagtgagtacggagaatgaccatcggtatattagtattcgtaatacggatagcagttgggtgcagggcgtgtgttctttggtattccggctggataacggcggtgatgggacattcaataacctgacagtcagcttacaattaactgataaatcgggagccgttctggaaaaaggaactcttgatgttcagccgtttggcgatagcagtgcaactcgctcaaccctttcggcaactgaattcagctgtgatgcggttgaaaatacagctaacatcgtgattaccgacgttgaggaaacgtcttcggatggttcagtccatgctctgccactgtcgatgtttgatccgcaatattatcaaccattaaaaatgagcgtacaaaaaagcggatag

SEQ ID NO: 243258 - DNA, 549 bp, Klebsiella pneumoniae
atggtcggtagaaagatgtttgcccaggtagagcgtgaagagtggaatcagtggcgctctgtttccgagcaaatctccgtcgggttgcgtgacgtgattggtaacactcccgttggcatggtggcgcaagacatcgtctaccgtcagattcgctacatgaagtctctgccattagaggcggctgggcgtgtcagggaaattcaggagcgtgcgatacaggctgtcattcatggtgagcgccccgatcagctttacgagatgatcatgcagtccggtgacgtggcggccagcagggcccggatgatagcccgcactgagatagggcgtgcaactggcgcattaactcaggctcgggcgttatccgttggctctgagggttactggtggcgtattgagggtgctggcacccggccctcacaccgcaaaatgaaagataaatttgtcaggtgggataacccgccaacgcttgacggtatgaccggacatgccggatgtctcccgaactgcaaatgctggtcggaagtgcatatcccggatccacagaaataa

SEQ ID NO: 243259 - DNA, 231 bp, Klebsiella pneumoniae
atggatgcttacacaaatcgaaaaggagcaaccgaagactgcaaggcttatgtttataaaggaataaaggagtggacagcgctatccagagataaatcagtaagcgaaactgcatggaagatgggtacgcagtacgcctttaactcccgcaatcccatagcgcatatgaatgtttgggattttaacggatgggcggctgggatccgtgtggctaaatctaaagggtattaa

SEQ ID NO: 243260 - DNA, 162 bp, Klebsiella pneumoniae
atggatgtttctgattttggcataaaaatatcaggcccttatgtagagaagcttaaaattgccttccgtctttttctgagtggtatttggcttgcaacaaatcacgatgtaaccgtggttttaagcaaggcacatatccaaggttgcaacaaagatcagtaa

SEQ ID NO: 243261 - DNA, 435 bp, Klebsiella pneumoniae; identical to SEQ ID NO: 31726

SEQ ID NO: 243262 - DNA, 1116 bp, Klebsiella pneumoniae; identical to SEQ ID NO: 31727

SEQ ID NO: 243263 - DNA, 273 bp, Klebsiella pneumoniae; identical to SEQ ID NO: 31728

SEQ ID NO: 243264 - DNA, 819 bp, Klebsiella pneumoniae; identical to SEQ ID NO: 105710

SEQ ID NO: 243265 - DNA, 1206 bp, Klebsiella pneumoniae; identical to SEQ ID NO: 105711

SEQ ID NO: 243266 - DNA, 204 bp, Klebsiella pneumoniae; identical to SEQ ID NO: 105712

SEQ ID NO: 243267 - DNA, 1320 bp, Klebsiella pneumoniae; identical to SEQ ID NO: 105713

SEQ ID NO: 243268 - DNA, 168 bp, Klebsiella pneumoniae; identical to SEQ ID NO: 105714

SEQ ID NO: 243269 - DNA, 1428 bp, Klebsiella pneumoniae; identical to SEQ ID NO: 105715

SEQ ID NO: 243270 - DNA, 981 bp, Klebsiella pneumoniae; identical to SEQ ID NO: 105716

SEQ ID NO: 243271 - DNA, 258 bp, Klebsiella pneumoniae; identical to SEQ ID NO: 105717

SEQ ID NO: 243272 - DNA, 255 bp, Klebsiella pneumoniae; identical to SEQ ID NO: 31731

SEQ ID NO: 243273 - DNA, 198 bp, Klebsiella pneumoniae; identical to SEQ ID NO: 31733

SEQ ID NO: 243274 - DNA, 1479 bp, Klebsiella pneumoniae; identical to SEQ ID NO: 118501

SEQ ID NO: 243275 - DNA, 828 bp, Klebsiella pneumoniae; identical to SEQ ID NO: 105721

SEQ ID NO: 243276 - DNA, 426 bp, Klebsiella pneumoniae; identical to SEQ ID NO: 23459

SEQ ID NO: 243277 - DNA, 1290 bp, Klebsiella pneumoniae; identical to SEQ ID NO: 105722

SEQ ID NO: 243278 - DNA, 321 bp, Klebsiella pneumoniae; identical to SEQ ID NO: 105723

SEQ ID NO: 243279 - DNA, 705 bp, Klebsiella pneumoniae; identical to SEQ ID NO: 105724

SEQ ID NO: 243280 - DNA, 1404 bp, Klebsiella pneumoniae; identical to SEQ ID NO: 118507

SEQ ID NO: 243281 - DNA, 1107 bp, Klebsiella pneumoniae
atgtctctaaaacaaatatggcaagcagcaaaccctaaaggacatctgctgaccgctatctcgtttctgatccccattgtctgtggttctgggtttattatcgccatcggcatggggcttggcggaacggtgcaggacacgttaactccgggacaatttgatgtatggcaggcgatggccaccctgggcgccaaggcgcttgggctgttgccggtggtgattgccgtgggaatatctggctcgatcgccggcaaaccaggcatcgcgccaggatttgtcgtcgggctggcggcgaataccataagcgcaggctttatcggtgggatgattggtggctatattgcggggtatattgcgctggcgatcattaaaaacgtcaaggtgcctgactgggcccgcgggttgatgccgacgctgatcgttcccttttttgcctccattatcagctgcctgattatggtctatatcatcggtacgcctatcggtatctttacggaagcgcttacgtctttcctgagaagcatgggcacgtcgtcgaatttggtgttaggcgcagtcataggcgcattgtgtattgttgactttggcggcccgctaaataagacatgctttgctttcgtgctgaccctgcaggcgcaggggataaatgaacccattaccgcacttcagttagttaacaccgctacgcctatcggatttggcctggctttctttattgccaaactgctgcgtaaaaatatctataaccgtgaagaagtggaaaccttaaaatcagcggttccgatggggattgtgaatatcgttgagggttctattccgatcgtcatgaatgatattgtgcgcggtatcgcggcggcggctatcggcggcgcgtgcggcggggcggtcaccatggtctatggtgcggatgcgacggttccttttggcggagtactgatgatccccacgatgtcacatccgatggcaggcatcatggccctgctggtgaatatcgttgttaccgccacggtctatgccgtcatcaaaaaagatatccctcgcgacgtgattgttgataatgattacgaagaagaggatatcgacctggatgatattaaagtgagctaa

SEQ ID NO: 243282 - DNA, 150 bp, Klebsiella pneumoniae
gtggcgctgcgcctcgccgggacgccgatcggcccgaacgacacggccattgccgggcacgctatcgcggccggcgccgtcctggtgacgaacaatgtgagagagtttgtgcgggtgcctggtctgacgctggaagactgggttatttag

SEQ ID NO: 243283 - DNA, 348 bp, Klebsiella pneumoniae
atgaaccgtctgaagagtgaattcaaagagtctgcccaacacttcacgtcgttgctgttttatcaccctgtccgttcctgtcagacacttctgaatgattttaagtttttcctgaatcgtatggtgcacatcgccgtcaagaacgcacatcacctttccaatattacggccagaaagcagaagtcccgcaagcacaacagcagagttttctgcagcaccaaagagctgaacgtccaccttatctgtcagtgcctcccgctccagaaggacattgatagccgtacgcgccagttcatcttcaacgaaaacactgaccatttcaggctgaacatcagtcaactgacgtaa

SEQ ID NO: 243284 - DNA, 309 bp, Klebsiella pneumoniae
atggagaagaacatcgagttcgtcaataagaagcaatccatttggcattatagaggggtcatgtgcagctttaagcacttcaaatacacgtttctcaccggctcccatggtgtgctcagtataggagataccatttttggtaaatttatagaatgtgtagcccttttgggtagtacagaccatcaaatcggagtaattagcctcaagaatccgacacatagaatcgagtattttttgtttgaggtgtacagggccgaaatcatggctaacgtactttgcatgacgggacgcagcgagatcatcagataa

SEQ ID NO: 243285 - DNA, 2244 bp, Klebsiella pneumoniae
atggaaccaatcaaatggacaggaagaaaacgcctccccgtcatccgtcagacagagtccgctgaatgcggactggcgtgtctggccatgatcgcttgctggcatggactgctgacggacgtacccgcgctccgtgaacgattcagtatcagtacacagggaatgaccttgcagcggctgatggagtgcgcgtcaggtatccggctggcctcacgtgcagtacggttagagccggaagacctgaaatcgctttctctcccgtgcattctgcactggaacataaatcatttcgttgttctccataaggtacaagggagcaaactggtcatccatgatccggataaaggaaaggtaactctcactctacaggatgccggaaaacacttcaccggcgttgcgctggagctgacaccagccggcgatttcacggtcagagatgaaagaaagaaaattcgactacgccagttgacaggtaagacacccggccttcaggcagctatgttgcgcattgtcattttcgccctggctctggaggttctgacgctggggagccctcttatcaatcagatggtgatcgatgaggttctggtcgcggcagaccggagtctgttgaccgtcattatcattgcactgctgctgctgtcactgacccagatgctgctgtctctggcccgccagtgggccagtattaccttgtccgtcaattttaatatgcagtggacggcccgggtgttccatcatcttgtacgtctccctctggcctggtttgacgcacgaagtaaagggagtatcaatgcccgctttgaggcagttgataccatccagcatgcgctgaccgcacagatactggaaggtattctggatgtgctgcttgtggtgaccacactatgcatgatgctgttgtacagtcctgaaatgacgctgatagccttgctggcagctattatctacggggtgctgagagcactgtggtatccctccctgcggcagtcagcagaagatgcctgggatgccggggccagggagtcagggtattttcttgaaaccctcaacgggatcctgagtctgagaataaacggggttactccataccgtgaggctgcctggctgaatctcaatgtcacccgaagaaatacgcagttgcgccagagccgtctgctgatgtgctatgacattgcccacactctgaccggcagcgtggtatcggcaatcattttgtggaaaggcgccggtgaagtgctgaacggcacctttaccgtcggcatgctggttgcctatttgtcttatcaaatgcgtttttcatccagtatcagcagtctgaccgataaatttttttcctggcgcatgctagatatctataacgaacgtctggctgacattgtgctgaccccgacagagggtcatcagcaacaacccgttcaggaagacaacagcgcgtcagttaccccaccaatatctcgtgggaccgtagccggagatgaccatccccctttatccctagagcacgttaccttcagccataagggcggtaacaaaccgatactccgcggagtatcgctgacgctgcatcctggtgaagtggttgccattaccggcaaatccgggtgcggtaagtcaacgctggtgaaacttatccttggggtccatattcctgacgaagggacaatcagaaccttttgcatactgcaaacccacccggattattttcaggtacgccggcggatcggtacagtgcttcaggatgatcagcttttcagcggctccattgcagataacatcatttttttcagcgaggatcgcaatcatgaacgaatggcccggtgcgctcagctggcgcttatcgacagcgatatcatggcaatgccgatgggatatcagacattaatcggtgaaaccggtggtgggctttccggagggcaaaagcaacgtgtacttctggcaagagcgttgtacaaaatgccggggtttttgttactggatgaagcaaccagtcaccttgatgttgagagtgagatccagataagccagacgcttcgccaactggggcttcctgtgctgctgattgcccatcgaccggaaacgatagcatctgctgaccgtgttctgtatctggctgatggtaaccttacggagctgaagcacccgttcactgtcgacgatggtgacgtaacgtgtgctcctgctgatgacagagtgggggatgttcgacaaaacgtcctcacacgttgtaatgccagtcagtga

SEQ ID NO: 243286 - DNA, 903 bp, Klebsiella pneumoniae; identical to SEQ ID NO: 202627

SEQ ID NO: 243287 - DNA, 1311 bp, Klebsiella pneumoniae
atgatcagattagagcgaatttatataaaaggttttaaacatccaaattcaaccttgaatttgatattctcgccgagtaatatatcggttatatatggtgacaatggctcaggcaaaacaactcttttaaaaatactacatgcaatatttgaaaaggatgagtccgtattaaagattaatgaagttgtaaccgttgatatgtattattccgaaaacgaaagttacgacagagttacaattaagaaaaaatacgagaccatcaagcgtgaacttattggcactgaagaaatagaacaatatgattggacaagttatgataaatctcccttatctaatctatcttcactattactaggagtagagcgcggagtcattactcaggctacaagaattgaccctagacttgtttttgattttttccgaacgaggaaactttttttaaacaaagaaagagaaatgttcagtatagctaatgagatggccacttacctaaaagctcactcaggcagatatacagcaagagcagagcctcataggtttgagtttttcaaaaaaaaccttaatcttcaatctgttaagatggagaatatcgagagcctaatagctgaaaaatacagacaggctcgtataacagcaacaaaaaggatacagagtgccttatttgataccctttcacttgctataagtttgaatgaaactgaaaacaacaatggtccagtacaacatgttcgaataccaaacgatttcgggcgattacttctagagaataaagaaagaattaaagaagcactagatgatggtgaggaaaataaattcaagaatacggtggttgaaattttatcgagtgaaaaccttgaaagcgaagttgaaaaatacaaacaacacccaattttgagtcaattgtttataaatatgatcaatgaacttaaattagaaaaacagatgttaagttctattaatttacttatagatacgtttaatagcttcctcattaatggtaaggaattattagtaaatgaaaaccaagttgttgttaaagctggttctgtaacccatggtataaatttattatccagtggtgaaagacatatactcacatttttatcaataatactatttgaaggtagggaacgcgatttccttattatagatgaacctgaaatatctctgaacattaaatggcaaagagagctaatgccgctactttctgagcttttaccaacaacacaaataatagtcgcatcacacagcccatccctggcaaataaaaacccacattttcttagagaacttgaattaaaattaggctaa

SEQ ID NO: 243288 - DNA, 456 bp, Klebsiella pneumoniae; identical to SEQ ID NO: 31745

SEQ ID NO: 243289 - DNA, 393 bp, Klebsiella pneumoniae; identical to SEQ ID NO: 105544

SEQ ID NO: 243290 - DNA, 657 bp, Klebsiella pneumoniae; identical to SEQ ID NO: 31747

SEQ ID NO: 243291 - DNA, 1389 bp, Klebsiella pneumoniae; identical to SEQ ID NO: 105547

SEQ ID NO: 243292 - DNA, 297 bp, Klebsiella pneumoniae; identical to SEQ ID NO: 105548

SEQ ID NO: 243293 - DNA, 1086 bp, Klebsiella pneumoniae; identical to SEQ ID NO: 118476

SEQ ID NO: 243294 - DNA, 207 bp, Klebsiella pneumoniae; identical to SEQ ID NO: 105550

SEQ ID NO: 243295 - DNA, 411 bp, Klebsiella pneumoniae; identical to SEQ ID NO: 105551

SEQ ID NO: 243296 - DNA, 249 bp, Klebsiella pneumoniae
atgagccatcctgaaattcacgtcaaagactggattgatgtgggcaacagtgagtgtgtggtgcaacggcttcttcccccggggtctccctccggcgtctgtattgttgtttttaataaaaccaaaccaaccacccggatcgtcggctgggacggcaaaaaatggtacttcatgcccagccgtgactatggaggttatgcagatgattatgatccctgtgtccgtgaactgaaacggggccgtagctga

SEQ ID NO: 243297 - DNA, 639 bp, Klebsiella pneumoniae; identical to SEQ ID NO: 31788

SEQ ID NO: 243298 - DNA, 1038 bp, Klebsiella pneumoniae; identical to SEQ ID NO: 105769

SEQ ID NO: 243299 - DNA, 948 bp, Klebsiella pneumoniae; identical to SEQ ID NO: 105770

SEQ ID NO: 243300 - DNA, 837 bp, Klebsiella pneumoniae; identical to SEQ ID NO: 31787

SEQ ID NO: 243301 - DNA, 522 bp, Klebsiella pneumoniae; identical to SEQ ID NO: 105772

SEQ ID NO: 243302 - DNA, 1005 bp, Klebsiella pneumoniae; identical to SEQ ID NO: 118091

SEQ ID NO: 243303 - DNA, 1179 bp, Klebsiella pneumoniae; identical to SEQ ID NO: 118090

SEQ ID NO: 243304 - DNA, 411 bp, Klebsiella pneumoniae
atgggcagaaaagaaagaaacgtattggcacgtattgaacgacaatccacagtattaccccccgctaaatccctagcctctcgcagtgcgtttaaagagatctccagaatagcaatggaatggaacagtgttgctggaaaatggcatacagaagtcattgagcacgatagccccccattatcagaggaggagcaggaagcattaaatgatattctatcctcctgtgatggtggtgtgtatttcaaacctcgtaaacgaaaaaaatacatcgtcgatagttcagatttgaagaagtggcagattttgttttttgaagattatgtatcgtactgcgggtatttatcgattaatggcctcaacaacctggtaaaagattttgacgcagtgtatgcagataaggagagcgaataa

SEQ ID NO: 243305 - DNA, 564 bp, Klebsiella pneumoniae
atggctctgacagatatcaaagtgcgctctgcaaaaccacaggaaaaggagtatacccttgtcgatggggatggcatgtttttgctcattcaccctaacggctcaaaatactggcggttccgctttcgctttggtggtaagcagcacctgatggcatttggggtttatcctgaaacatcgttagccgatgcgaggcagaagagggaagatgcaagaaagctggttgctgctggaatcgatcctcgcgagcagaagcgggctgtaaaagaagagcaggcgaaagagatcattacctttgagtctgttgctagagattggcatgcaactaataagaaatggtcagaggaacacagtcgacgggtgcttaagagtcttgaagataacctgttccatgcaatcggaaaacgtagtattgaggaactgagaactcgcgatctgcttgctcctatcaaagttgtagaagctactggccgttttgaagtcgcttctcgtcttcagcaacggacaactgccatcatgcgatatgccgtacaaagtggcttgattgattacaacccggcctag

SEQ ID NO: 243306 - DNA, 978 bp, Klebsiella pneumoniae
atgaaccgtgccagacaacagcacgccataagcgcagggcacattggtaacgccgcactcgagctttttaacgacaaactacctcacaagccgtacttctcggacgatgtgcactttggtgtgcgcatcgcgggaaaagaacgtgcgatactcgcgaagtatatccagtttaaccagccacacgccatgttctggtttggtttctacgtcgttcgtgtcggagctgccatcgactggagcgaccggaacgcgcctgcgcccacgctgactattaccaaccctgaaaacggacacgcacacctgctgtacgcattgaaaacctcaatacgtactgcgcctgacggaaaaatgaagccgttgaaatatgccgctgctgtggaaaacccgctgtgtaaaaaactggatgctgatgtgggttattcagggctaatttgcaagaatcctaatcacagtcactggaaaattgccgtatggcagcgtgaactctacacgctagactggttagccgaatcacttgacctgaacgccgcgaacgataaagaaattgtcgctgattacggtctgggccgaaactgcactttgttcgataaaactcgtaagtgggcataccgtgccatccgtcagggctggcctgagtacgaccagtggctgcaggcctgccatgagcgtgctagtgcctataacttgcaatttgcatcgcctttagatgtaaatgaggggaacgggattgctaaaagtattgctaaatggacttattataatcctactaaaaaaacattcgaattatttataaaaaacacacattcacaaaaaactcagtcaattagaggtaagaaaggtggtaggccatcattaagcagcccatgggtttctctgggagtgtctaggtctactttttttttagaaataagaaaaaaggtctttattcatagaggtgtttatggtcagcaaattaaaagtaggctatgtaagaaatga

SEQ ID NO: 243307 - DNA, 1185 bp, Klebsiella pneumoniae
atggtcagcaaattaaaagtaggctatgtaagaaatgattaccctgagaaaaggtgtgttattacaaacaatgacagatatgattacgtaatggtcggtcgcaataacttatataaatttcataggtatgtattaaaattaccagcagtccgccgatttgcccgcccatttatatataaggcatttctccctgattgtgttgacatgtaccacacattcaatgatatatgcataaccaataaaaaatgggtggttacttttgaaacgatgattccacggttcgttcatttgttgaatggtcactcacaaggcgatggtgaatataaacacagcaacaccatcaaatacttcctaaaaagactagcaatggataactgcactcgcattatcgctttatctaaatgcaccctagaaatacagagtgaaattcttaaattatacccagatatagagggagtaatcaaagcaaaaagtgtagttttatacccaccacagagaacacttatagatgagtcaatgatttcaagaaagagcgttgaatgtattaatttttgttttattggctctgagttctatagaaagggaggtggggaggttgttatggcattcaaaaaagtttttgaatcactcaatcaagaaaaaaagaatcaaatcaaattgactttgattggtgatttgggaaagaaaaccaactacgcacacaaatcgcacactgataaagatgatttctatgctggtgttgaaaatataattaacactaatgattttatcactcatcatgaaaggatgaataacgaagattttatttcctcattacagaaaacccatgttggactgctgccaacatgggctgatacttttggatattctgtcctagagttccaagcggcagggtgtcctgttataacaaccaatgttagagcgttgggtgaaataaataacaatgacattggctgggtttttaatattaataaaaataagcttggtgaggttgtcgttaattctgatacagatagaattgagtgcagaaaaaatattattaatgggatttttaattcggtaatggctataatggacaatccaagtcttattcatgagaaaggcacgatggcatataaaagaatagaaaaccaccatgaccctaaaacttataatgaaaagatcgcggagatatatggcaagtga

SEQ ID NO: 243308 - DNA, 606 bp, Klebsiella pneumoniae; identical to SEQ ID NO: 105661

SEQ ID NO: 243309 - DNA, 282 bp, Klebsiella pneumoniae; identical to SEQ ID NO: 31769

SEQ ID NO: 243310 - DNA, 177 bp, Klebsiella pneumoniae; identical to SEQ ID NO: 105663

SEQ ID NO: 243311 - DNA, 312 bp, Klebsiella pneumoniae; identical to SEQ ID NO: 105664

SEQ ID NO: 243312 - DNA, 201 bp, Klebsiella pneumoniae; identical to SEQ ID NO: 105665

SEQ ID NO: 243313 - DNA, 225 bp, Klebsiella pneumoniae; identical to SEQ ID NO: 105666

SEQ ID NO: 243314 - DNA, 204 bp, Klebsiella pneumoniae; identical to SEQ ID NO: 105667

SEQ ID NO: 243315 - DNA, 492 bp, Klebsiella pneumoniae; identical to SEQ ID NO: 105668

SEQ ID NO: 243316 - DNA, 312 bp, Klebsiella pneumoniae; identical to SEQ ID NO: 105669

SEQ ID NO: 243317 - DNA, 321 bp, Klebsiella pneumoniae; identical to SEQ ID NO: 31768

SEQ ID NO: 243318 - DNA, 228 bp, Klebsiella pneumoniae; identical to SEQ ID NO: 105671

SEQ ID NO: 243319 - DNA, 891 bp, Klebsiella pneumoniae; identical to SEQ ID NO: 105672

SEQ ID NO: 243320 - DNA, 219 bp, Klebsiella pneumoniae; identical to SEQ ID NO: 105673

SEQ ID NO: 243321 - DNA, 1047 bp, Klebsiella pneumoniae; identical to SEQ ID NO: 30071

SEQ ID NO: 243322 - DNA, 414 bp, Klebsiella pneumoniae; identical to SEQ ID NO: 30070

SEQ ID NO: 243323 - DNA, 810 bp, Klebsiella pneumoniae; identical to SEQ ID NO: 30069

SEQ ID NO: 243324 - DNA, 1356 bp, Klebsiella pneumoniae; identical to SEQ ID NO: 30068

SEQ ID NO: 243325 - DNA, 228 bp, Klebsiella pneumoniae; identical to SEQ ID NO: 105755

SEQ ID NO: 243326 - DNA, 582 bp, Klebsiella pneumoniae; identical to SEQ ID NO: 30066

SEQ ID NO: 243327 - DNA, 2370 bp, Klebsiella pneumoniae
atgcctgacattatcccgcaccaacaacagccggaacgtcttcataaatttcactccctcaagggagggcaatactggcgcgcaaaaaacgatattcctgagcaatgtattgaacaggatgaagtgttgctgattgagtcgctccgctgggttgataatgcactccatactgtgatcctccgcacccatccgtcaaaatacggcaaagactttgttttcaaatttaccgatgctgctggccgtagctgccgcaccacgaaatcgtttaaagagcatcgatttctgtttaatgactttctggataaatttgaatttgcagatgatgggcaggatatccggagccaggaactgcttgcagctcaaaaccgggttagccagctgactcagcaaatgaccgaaaccatgtctgatcctgaagctctgcgtacggaactcctcggcagggttgaagcaaagaaagccagttcatcgacgccaggcgatgacaaaaagcaacttcctatggttatggagctgtcttcatcaactgagatagcgtctcttggcacagctctgtcatcaggtatcgatgaagccaaaatagcacagctccagcaggctgttgagttcagacatgaaatcgcacaggcgcaaatcgactggattaaagaaaagaataatgcgatttcgagagccgtcatggctattactccctatctggaagagtctgctgccgcccagcttgccattgccgaagaaagtcgcgaaacgctgaataaactgatggacggtataaagtcccttgacctctacatcgggaaagatgtggtggtgaacactatcagggagggtgaatcagcaccgccacacattcccttgacgttcgtacagcgtaagctggccgtcgatgaggaaacggctgtttttctcgatataggagaatggtttgattttgaaaagttgccactttttttccatgcattaaacaaccatccagggctggtggagcagatcttcccgtcacagcgctgcgtggtatgtatgaccactacccgtcgctatattgattatcaggaccgttgggctaactgggagctcaatgcaaaaaaccagacagtctttctgatggttcgggacggcgaacggctgttccaggtttactctggagtagagtctcacctcggcgctcatacacttttcccaaccaccgatgaacagggaaatatctttcgaggcattgacggttcgcaggttacgttcaatgacgtgtcatacaccgacaagcttaaagcccatgagatggttgctctgcattattaccggtttcttatcctgtgctgcgggctcgaccaccggctaaagctgtttggtgagttctacgaccctcaggaccgcttaagtttcgtctctatggcgttccaggagaagtattgtcgattcatttatgatcatgatggtactggccttctggacgatcctgatgcgaaagtgcgcccctctattgaggagtatataacccaggccaatagccatttgcgctcaggttcaagagtgttttgcgagtggagaactgtttgtacaccaaatactgcgccgggtgttgtgaaagtcgatactagtaccagttaccgatcctattattttactgccgatttcatcaatgatgatggaatggcagtggcctttacccgcaacaatgagatttgcgtggaggttccggtcaaaaaagatatcttccgtcgcacccgggctaatgatgtacgtgaatttaatgcgaaagtatctctcactaattttcagcgtgatccgtgggatgacgcctgcagcgtgggattcctctgtctggacgcggttaaagccgatgatctggattattacatccacagccgttccagccgtaagaattttatgtactacataaagctcttcaaacgcctttcagctgtcctgagagtggaagaagagcaggagaagccctatcggcaaaagctcatcagagcgctggtggatggcaacataggcacaaaaactaatcgtgctgaaatcgtcgacaagacagtcatcacctggcgggcggacaaaaaaggtcagccgcttagtgaaggaattgacaacgagaaaagctggaaagcattacttggcatgatggacctgatcgcctggcgcggtttgagccatagagaggctgcagtggagatggccatctcccggggtagcaaaccgttacgtcttatagtcacgacaaatgccagactggctctgtatgttacccctacagccgaggaacgtgacgatcgcgtggaaaaacataagtgggccatgctgctgacctttaaaatgttagggaaggtgcgaataagcaggtcatttcttcccaagctgactcgctga

SEQ ID NO: 243328 - DNA, 828 bp, Klebsiella pneumoniae; identical to SEQ ID NO: 202631

SEQ ID NO: 243329 - DNA, 1071 bp, Klebsiella pneumoniae; identical to SEQ ID NO: 202632

SEQ ID NO: 243330 - DNA, 585 bp, Klebsiella pneumoniae; identical to SEQ ID NO: 32310

SEQ ID NO: 243331 - DNA, 1158 bp, Klebsiella pneumoniae; identical to SEQ ID NO: 32311

SEQ ID NO: 243332 - DNA, 894 bp, Klebsiella pneumoniae; identical to SEQ ID NO: 32312

SEQ ID NO: 243333 - DNA, 195 bp, Klebsiella pneumoniae; identical to SEQ ID NO: 118669

SEQ ID NO: 243334 - DNA, 312 bp, Klebsiella pneumoniae; identical to SEQ ID NO: 118668

SEQ ID NO: 243335 - DNA, 240 bp, Klebsiella pneumoniae; identical to SEQ ID NO: 118667

SEQ ID NO: 243336 - DNA, 1413 bp, Klebsiella pneumoniae; identical to SEQ ID NO: 118666

SEQ ID NO: 243337 - DNA, 318 bp, Klebsiella pneumoniae; identical to SEQ ID NO: 31740

SEQ ID NO: 243338 - DNA, 306 bp, Klebsiella pneumoniae; identical to SEQ ID NO: 105758

SEQ ID NO: 243339 - DNA, 672 bp, Klebsiella pneumoniae; identical to SEQ ID NO: 105759

SEQ ID NO: 243340 - DNA, 177 bp, Klebsiella pneumoniae; identical to SEQ ID NO: 31741

SEQ ID NO: 243341 - DNA, 408 bp, Klebsiella pneumoniae; identical to SEQ ID NO: 105761

SEQ ID NO: 243342 - DNA, 2469 bp, Klebsiella pneumoniae
gtgaagggatgtgaagccgggcttgatgtgctggccttcgagggcgatgaagccctgagccagccgttccgctaccgtattgaattcaccagcgcagaccatgccatcagcaaagagatgatgctgatgaaggcagcctccctgacgctgcaggcgccggtggctcagggcttcggcatcaatgttcagcaacccgtgcgggtgatccagggcgtggtgacggggtttgaacggctcagtacctccagggatgaaacgcactacgcgctgacgcttcagccgcgcctggcgctgcttaaccgctcgcaccagaacgccatttaccaggaccagtccgttccgcagattgtggaaaaaatcctccgcgagcgccacggcctgcgcggtcaggattttctgttctcgctgacaaaaacgtatccgcgccgcgagcaggtgatgcagtacggcgaggatgacctgcgctttatcacccggctgctgggtgaggtggggatctggtttcgctttaccgccgacacgcggctgcacatcgacgtcgctgagttctgcgacagtcagcagggctatgagaaggggctgacgttgccttcggttccgccgtcagggcagcagtcggccggggtggacgcggtgtgggagatggcatgccgccaccgcgtcgtggagcagcaggtcagtacccgcgactacaactaccgcgaggcgacggcggacatgaacgcgcaggtggatgtcacccgcggggagaccaccacctttggtgaggcttaccactggggagataactacctgaccgcggggaatgtccatgaccgccatccggcgccggagtccggggcgttttacgcccggcttcggcatgagcgttatcttaacggccagacccggatgcaggccaccaccagctgcccgacgctctgcccgggacaggtgctgaaggtcaccggcggagaggaggtggccggggagtttgctgatggcgtgctcgtcacggcgatgcacagccacgcccggcgcgatgccgactttgcggtggagtttgccggcataccggacagcccggacgtcggctacaggcctgagcccggcgcgcggccggtgatggccaggacgctgccggcccgcgtgaccagcacccgggaaaacgacacctacgggcatatcgacaaacacggacgctaccgggtgaatatgctgtttgaccgggcgcgctgggaaaccgggttcgagagcctgtgggtccgccagtcgcggccgtatgccggagacacctacggcctgcacctgccgctgctggccgggacggaggtggcgattggctttgaggatggtaaccctgaccggccgtatatcgcgggcgtcctccacgactcggcgcacggcgaccacgtcaccatccgcaatgacaaacgtaacgtcctgcgcaccccggccaacaacaaaatccgcctcgacgatgagcgcgggaaagaacatatcaaggtcagcacggagtacggcggtaaaagccagctgaacctggggcacctggtggacagtgacaggcagccgcgcggcgaaggctttgagctgagaaccgacagccggggagctatccgggcacagaaagggatatttatcagcgcggacggacaggtgcaggctcaggggcaggtgctggatatggagccggcggtcagcaatctggctgaagcccgggagcagatgatgtccatctccggtgacgcgcagaaggcgaccgcgaacccggccgatctccaggcgcaaattaccctgctggagcagcagctgacggacctcaaaaaatcggtgctgctggtcagcgcgccggaggggatagcgctgaccagcggggagcatctgcaggtctcagccgggcataacctgattgccacggccggaaagaatgcggatgtcagcgtggtgaaaaatctgttcatcggggtgggcagtgccctgagcgtgtttgcgcgaaagcttgggatcaggctgatagcgaaccagggaccggtacagatgcaggcgcagaatgacctgatggcgctgcttgcccggaaggaaatcagcattgtcagcacggaagacagtatcgaaattattgcgaaaaaacgggtcacgataaacggcgggggaagttatatcacgctcaatgccagtggcattgaatcagcgacggcaggtgagtacagaacaagggccgggtattacgtcaggcgggaaaaagcgcagcataagcctgacattgcacctttagctaatgcgataaatgacggcagccataatattcgctacctgtgtacagatgataatggggtgccgatgatgaatactccttacagggcctttctggctgatggctcggtattagagggtgtcagtgatggcgaggggtatacgaagttgtttacttctgcacagatacaggatgttctgctgcatatgataccggaggccatcaatgcctaa

SEQ ID NO: 243343 - DNA, 477 bp, Klebsiella pneumoniae; identical to SEQ ID NO: 32316

SEQ ID NO: 243344 - DNA, 1620 bp, Klebsiella pneumoniae; identical to SEQ ID NO: 105781

SEQ ID NO: 243345 - DNA, 285 bp, Klebsiella pneumoniae
gtgaatgttgccagcggcacctttaccgacctcgacttcacgaatcttcgcatgctgcgaaatggcggcgataccgcgtttaagctggacggcaatatcacgcggggctcgattcatggctgtaagctacgttcgcagaatggtgcggcagcgattaccggcgcagggactatcagccatttcgacatcgccgaaaaccagtacaccgataccaacagcaaccccatcaatctcaccggcacactgactaacgtcacctacggccgcaacccaggactggagtaa

SEQ ID NO: 243346 - DNA, 366 bp, Klebsiella pneumoniae
atgaatcaggacgacgataacgatgcaatgtttgatataaacttcggccataacattgagttaaacaaaaatactacaacagggaagaaaatattaaaagctgaaataattgaagggttaaaggcatcagaaaacaaagcaggatttaattacaacctgcctgaggaaatcgacccaagcaacttgactccagaacagataggcttaataaaagaaaaaataaatgaaggttctgatgatgaggttgaactaaagagctggttaactgaaactgctgagttagcgactttggcggccaacattaaaacatcaattatttgtggaattgtggtcgcagtaaaaagagggataaaatactttaaataa

SEQ ID NO: 243347 - DNA, 315 bp, Klebsiella pneumoniae
atgagaataaacatctccaatagcttaaaaattacgatagatggcgtagaaaccactggcataaatttagaaaatgtcaccgacaccgccattaaaaactgtattttttatgagaatggaaaagttcaaggcgaggctatttttgatctcatttgtgaaaacaacactcgactagattcatccaaaccattgtcactcactgacaaaaacacaaaagagccaaaaaaagactcaaagattaactttgtatttggcttttggaaatacacactggcatatctaaattcaaaaaactacaacccatatggtgattaa

SEQ ID NO: 243348 - DNA, 1866 bp, Klebsiella pneumoniae; identical to SEQ ID NO: 185265

SEQ ID NO: 243349 - DNA, 432 bp, Klebsiella pneumoniae
atgatagaaatcaaattaaataagcgaaggattttagctagtagctctaatacaaatgaggtgtattcttcaatagtattatttactatttattatgctttgaaaggaaagagcaaatccgtcaatttagaatacataagctttgcctttgacaacatcataaacaagacaaaaaacttagattacgattatgttcaactttggaatgtaaatacattaatcaagccaataatattgttattatactcttatgaattactcgacattgattataaaaacagaaatatggcagtaaaaataactgataatggaaatgcatatgttgaagaaatgattaatgaagaattatttaatgatattaatatatctgctagagaaataaccaaaaaacttacaattaaaaaactacaaaacaacaagctgctttggtaa

SEQ ID NO: 243350 - DNA, 687 bp, Klebsiella pneumoniae
atggaagactcttctggccgttggggggcaagcgctctacaaggaatatcgggagcaggtgtttttattaaaattcatcaacaattagtattagtaggtatcatatcctccatccctgatgatggtttatttggaaaagttagatgtagtaatgcctcttgttttattgagattcacgattcattaaaagcaaatagcagtaataattatgatttcggcagttcaatactaaaagaatctttgcttatgctaaaggacgaaaatatagattcagtcattcatgactgggaaagcttagaagagaataaaaaatacaacaacaatatagacagaaaaataaaaatattacacgttgcaagtaagattgatcaagaaaagaaaaaaataatcctaaacttactttctgggaataatttcgctcgagctaggatgattaactatccaaatattgaaactagctactcaaccgcgcacctggtattcggtggagaggatatgactttatatgttaacaatcgtgcagaggcaaataaaggttatcaacatattaagagtgattatctgaatattttatccgatagcctatcccctcacggattacaaaaagatgaaatactcttattgcgaaacaaagatattgctttttggctcgctaattgtgatttggactttttggaagaagactaa

SEQ ID NO: 243351 - DNA, 912 bp, Klebsiella pneumoniae
atgagcgattctgaagagatcgttacccgggcgtattcgctgacaggccctgcgtttgttcatgaccgtaaaacctattccatttctgtccgtcatcagaaagcgactgatgagaaaggtgaatatgtagaaggaataatgtcatcctacataaacacgcatttgcagataggcaaggatgttgaacttacgcctcctggggggaatttcattgtcccgctcaatgccgtccagcctgtcgtaatatttgctggcggtattggaattactccattcatttcctatctggagtctattaacccccaagcggaaggtccggaaatctggcttttctatgctaatcaaaatagtaggctacatgcgtttaagaaaagaattgcggagctaaatgcgtctattgacaggcttaaagtaattaatatctacaaccagcccctcgactgtgatattccaggattggattatgatagagctggttatgttggtgcgggagatgtcgaggcatatcttattgagaataatgctcgttattacatgtgtggtccgcagcctatgatggatgcgatatcccgagggcttcaggagagaggtgtacctgcatttgctattttctacgagatatttcgttctccgacaaaaataaataatgatccctcattacgtcataaagtaatttttgcaaaatcaggaagagaagagatctggaccacggataaaggtactctgctgaattttggagaaaaacttgggattaaaatgcctagtggttgtcgtgttggacaatgtgaaagctgttcaactaaggtgattgccgggaacgtgcagcatctgaatggtgtggaaccctctgatgagggtgcatgtttgacatgccagtgcattcctgccggtgatatcactattgatgcctga

SEQ ID NO: 243352 - DNA, 900 bp, Klebsiella pneumoniae; identical to SEQ ID NO: 177852

SEQ ID NO: 243353 - DNA, 270 bp, Klebsiella pneumoniae
gtgataggtgttcttctcgatctgcatcagactgacctgcatggtccgcccggttccgacgtaggcgacatccggctctgccagcggatcgttaatcaggctgtatttaaccgagccgacagtattcccgcttcctttcacacacaacacacaccgggcgctgtcattgaaaccctggaagatgttggccctgacggcaagacggcccattttggttaccttctgattgcgtacgtcaaagttagcgaacgcctgagccccggcgcctaa

SEQ ID NO: 243354 - DNA, 942 bp, Klebsiella pneumoniae
atgttcctgcgctgtaacgttcacgacaccggggccactggtatcggtaatgattatcctgacaggtcttttgttctggactgccagacggataactgcggacgtctggcacctgacggcagcggcggtgcttccggtatcggtatcggactgggtgccatgcaggacgagcccttgatagtggcgcgcacaattaaccgcaacagcaaaaacttcggcattttctttgagcagcagcgtctgtccggcccagggcagccctacgtttcccggcagattatcgtatccgatgccgtgtgtaccggaaacgggcatgggtttggcgactgtggcgcatccggactggtggtggtcaacggccagttcaatgacaacctcaaaaccggaatcagcattgacgcagggacgctggctaacaacggtatcgctccccgcccgggtaagaacggactgatgctgaactgtcaggctgagcgtaacggggtgaccgggctccattatgactcgaccaaaattcaggccgatggcggctattcattctccgacctgcacatcaacgataacgcccaggatgcgattttaatcgaggctggtgctaacaccctggcggatgttcgcttcgacaatatggatatcaaaaataacggtcgttatccggtgaatgttgccagcggcacctttaccgacctcgacttcacgaatcttcgcatgctgcgaaatggcggcgataccgcgtttaagctggacggcaatatcacgcggggctcgattcatggctgtaagctacgttcgcagaatggtgcggcagcgattaccggcgcagggactatcagccatttcgacatcgccgaaaaccagtacaccgataccaacagcaaccccatcaatctcaccggcacactgactaacgtcacctacggccgcaacccaggactggagtaa

SEQ ID NO: 243355 - DNA, 435 bp, Klebsiella pneumoniae
atgaaaaagatccttgtatcctttattgccatgatggctgtcgcttcatctgcctgggctgcagagacaatgaacatgcatgaccaggtaaataatgcccaggcgcctgcccatcagatgcaatcatccgctgaaaaaagtgcagttcagggggagagcatgaaaatgatggatatgagcggtcacgatcaggccgcaatgtcccatgaaatgatgcaaaacggcaattctgctgcccatcaggacatggctgaaatgcataaaaaaatgatgaaatccaagccagcagcttctaacgaaacagcaaaatcattttccgaaatgaacgagcatgagaaagccgctgttgtgcatgagaaggcgaataatggtctatcttccgttattcatcagcagcaggctgaaaagcatcgcagccagatcacccagaattaa

SEQ ID NO: 243356 - DNA, 1368 bp, Klebsiella pneumoniae
gtgatgtacggagaggagaagtcggactcgctcatagtagcggcgaagcaggcgaacaacccgaaaggagcggagtcagtggagcgaaggagcggggccaaggggaacgcggaacagccacacatgcgccggacacagagccgggaaagcatgtcacagaggctgtcacgcgtgcgggaagctgcgaagcagcggaagaaagaacggtttacagcattgttccacctgctgacagtcgaagcactggaagccgcattcctctccctgagcaggaaagcggccgccggagtggatggcatcaggtggatggactacgccggaaacatgaagaacaacataacagatctgcaccggaggctacatcagggcagctacagggcgcagcccggcaggcgtcactacatcccaaaagcggatggaaaacaacgcccgctcggcatcgcctcgctggaggacaagatcgtccagtatgcgctggtgaaaatcctgaacgcagtctatgaaaacgactttatggggttctcatacgggttcagacccgggcgaagccagcacgatgcactggacgcactggccacagggctggtacgcactaacgtaaactgggtactggatgccgacatcagtcagttcttcgacagggtgagccacgaatggctgatcaggttcacagagcatcggatcggcgaccggagggtaatcaggctcatacgtaagtggctcacagccgggacgtcggaggagggtcaatggcgagcaacggaggaaggcaccccacagggtgcggtcatctcaccgctgctggcaaacatatacctccactacgtcttcgatctgtgggcgcatcagtggcgacgtcgctatgccacaggcaatgtggtaatggtcagatacgccgatgacatcgtcatcgggttcgacaaacgatacgatgcccctgcgcttccgtatagccatgcagcgcagactgagggagttcggactcacggttcacccggagaaaacccgtctgatggagttcggccgcttcgctgccgaaaaccgtgccatcaggggaaaaggcaaaccagaaacgttcaacttcctcgggttcacgcacatcagcgggaaagatcgcaacggcaggttcatgctgatacgaaagacccgccgggatcggatgacggcaactctgaaagccatcaaagacggtctgcgaaggcgctggcattactcaatccccgaacagggaaaatggctcaggagagtggttcagggatacctgaactatcactcggtaccgggcaacttccccaccatgcagaagttcaggacacacgtaacaaacctctggcgccgggcgctcaggcgcaggagccagaaggatga

SEQ ID NO: 243357 - DNA, 204 bp, Klebsiella pneumoniae; identical to SEQ ID NO: 94232

SEQ ID NO: 243358 - DNA, 267 bp, Klebsiella pneumoniae
atgttttcacagtatggcgaatatgcactgatgatcaccctgaacaacggcgttctcaaggtctattccggtatgactgataacccggaaactctgctgactggatgtccggcatttgattacgtcatgctgggcagaaacagctcggtttctggctctacagtgtcaaactcaggtttctggggcggctggctgcagaaagctgtactgtttgattcggcgctgagtgacgcagatatgattgcgcagtttgatttattatcctga

SEQ ID NO: 243359 - DNA, 588 bp, Klebsiella pneumoniae
atgaataaatcaacctctataggtaaattagtaaagaaagcattaattgaccacaaacaaaacgatatgaactctgcactgataaatatcatgccagctatagattcaaccgccaataaagaatatggtggtggggtcggacatagaatacgatcatttataagaaaaaacgaagctctcattagcatcattgcgcttggacgctttgttatactccctaagttcaggtaccccggaaaaactaaatcggtagattttgctgatataatatacgataacatcagaacatatatagttcacgaaggagaagttggtgagatgatagagttcaaccatgaaaagaaacttgcaatatccctgaccaaatggagtttaaatgaaaactatgttctggcatttatcttatgcgtcattgtttccgataaaaatgctaatgagttcattgctgaagatgtaataataaatcttaattttggttgtttttcagttaatgatttatggggtaggcgtttggacttattgcatcacatagctaataattcaaacggacaatatagagtagaaaactcaaatatagtactcaactga

SEQ ID NO: 243360 - DNA, 270 bp, Klebsiella pneumoniae
atgacaaaaatgagcaccatttacagcagactttcatacggcaccgggaccgcactgacgggctgcggtgtctcagcaaaggcgtatgccggggcagtcaaggcagaggtatggattttggccgacaaaatagcggggatgaccctgagtgactgggcaattattgtcggtatcgcctgcaccattaccacctgtggggtgaactggtactaccggcggaaagaacgcgaggatcggctcaatggctatgacaccaaaactgaggaatag

SEQ ID NO: 243361 - DNA, 216 bp, Klebsiella pneumoniae
atggcggaaaatcgtgttgaggccaacgcccataatgcgggcggttgcccggcatccaacgccattcatggccatatcaatgattttctggtgcgtaccgggttgagaagcggtgtaagtgaactgcagttgccatgttttacggcagtgagagcagagatagcgctggtgtccggcagtgcttttgccgttacgcaccaccccgtcagtagctga

SEQ ID NO: 243362 - DNA, 492 bp, Klebsiella pneumoniae; identical to SEQ ID NO: 15993

SEQ ID NO: 243363 - DNA, 450 bp, Klebsiella pneumoniae
gtgaaacagcaattccacctcgtcaacgacgctatcaaacagaacgccatcaatttcattcgagaattgccagtggatgccaggcgcccgctgatcctcgatatcaaggagatgacgcgcactctcgaacaaaacaagaaaatgtggccactactgaaagacctgtcagatcaggttgtctggttcggtaacaaatacgactccgacgactggaaagacctcattactgccctggtggccaaatcgaaaaaacaagagcagcgcatggcccccgggctggatggtggcgttgtgatgttcggtcaacgtaccagtaaaatgacagtgcgtcagatggttgaagttatcgaggcgatctactggttcggcacccagcaggacgttaagttcagcgaaaagtcccgcattgaaatcgaatgggccaagcgctggggagaatcccatgcatag

SEQ ID NO: 243364 - DNA, 318 bp, Klebsiella pneumoniae
atggctaagttacgcgcaggaggtatggcattaatcattgacagctccacacctgaagagattgggaggtgtgttagcctcatcaagctaattcctgttcgcggctcattcacgtccccgcaagggcggcctacaaacaatgctggagaaaatccagcatggcttgtaactggcgacgttaaagcgcgcctgggaggtgactcacccatatgggccgggaatggctgggcactttacccgccgcattacctgatgccaatcgacggcgacgacttcagcaatgaagacgagcaagagaaggggcgggagcatgcctaa

SEQ ID NO: 243365 - DNA, 327 bp, Klebsiella pneumoniae
atgaccagcaaattaaccagagaagaacgcgtgcaggcgctctacgacctgaaggtggggcaagttctcagccaggctgatattgaaaacgtcaaaatgttgtcccgcatggcgctggccgcaatggacagcgagtcgataatggtaaccgatgacatggtctatgcattccatcatgcgctagtgcctgatgcatacgtgcgcgatgagcgcggaagaatgatgctcaatggcatatgcgagccgaaaattggctttggtacaggctggaacgcctgccgcgccgccatgctcgcagccgcccaacaggaggtgaaaggtgaataa

SEQ ID NO: 243366 - DNA, 168 bp, Klebsiella pneumoniae; identical to SEQ ID NO: 186163

SEQ ID NO: 243367 - DNA, 702 bp, Klebsiella pneumoniae
atgacaactgatatcaccgaactggcgcagagagagaaattcgaagcgtgggttatgactcaaatctgcatttcaaaatcaacactggagggattgcgtactgctgacggataccgcaacagcactttatccggaacgaattacaaccgcatgtgggattgctggaaagcagctggtgctgagctggtagacgcgctggagaaggcgcagcaggaaaacaccgacggcgtagccgggatggcggagagctacgaaaccaccatttctatgctgaggtctcgcatcgccgagctggagcgccaaaacagcgtattggcagatggggtgatccgagcggaacaatggctcctagagtcccgcaccgtcaccgactggatagagcatgacggaaaatggcgtcctgactcactgagtacagatgaactcgtttacctgaaaaccagaaaacaggagctgaaaattccgtacccggcaggaaaagttatgggatggatgcatgccggtggtgatatggacgttatggcgtacaagctggcatcaccacaagcccgcaccgtcaccgtgaagctgccagagctatgcgtgggggttgttcaagatgggcatgcggtaatggtgccatatccagcaggacactggtttaacaagacagcgattttggagatgctggccgacgctggcatcaaggtggaggctgagtga

SEQ ID NO: 243368 - DNA, 405 bp, Klebsiella pneumoniae
atgacatatagcgactgcgttgcaacaattgccatgattgtagccgccattgcagttcctgcaactggttatataagctactactttgccataaaaggtgaaaaaagaaaggagtggaatcaggtatcaataccgattagagagaaattgataagccatattgatgatatgcgtagaggagaattctctcatcctcaagtaaaacgaattgatatattgaggttttctgacattaggaaaaaaattgataacagtgatcttatgagtgcatttgatgagttcgaaagctcacacagaggggaagaggttctgataaaaaccaataaatatacttatatcgcaggagacttatcaaagccgatacgcgcttcagaaaagctgctctcccttataacaagaaaataa

SEQ ID NO: 243369 - DNA, 774 bp, Klebsiella pneumoniae
atggcagagcaaaaactgaaaattgttgaacttcataagagttatggttctcacgaagtactcaagggagtgtcactacaggcaaataaaggtgatgtgatatccattatcggttcttcagggtcagggaaaagcacttttttacgttgcattaattttcttgaaaaaccaagtgaaggatctattattattaataataaaaacatatccctggtgcgtgataaagacgggcaactcaaggtagcagataaacatcaacttcggttactacggacacgtcttacaatggtctttcagcactttaacctttggagtcatatgactgtcctggaaaatgtcattgaagcaccggtgcaggttttaggtttaaataagagagaagcgaaagagagagcggtaaagtaccttgcaaaagtagggatagatgaaagacagcttttaaaatacccagtacaactatccggtggacagcaacagcgcgtctctatcgccagggcccttgcaatggaacctgatgttttactatttgatgagccaacttcagcactcgaccctgaacttgttggcgaagttttacgtattatgcggcaacttgcagatgatggtaaaacaatggtagtggtaacacatgaaatggactttgcacgtcatgtatcttcacatgttatttttcttcatcagggaaaaattgaggaagaaggacatcctgatgatatttttaacaatcctaaaagcgtaaggctaaaacaatttgtcggaggtgctatagcgtaa

SEQ ID NO: 243370 - DNA, 960 bp, Klebsiella pneumoniae
atgatgaaaagtattaatgttccggtttatagtgcggaagacatcgatattatccttagccaaattgatgttgtggagacgatgcgtcaggcgtttctcaatctggctcatggtcaggcagcgcagcctgaccagaaagttataatgttccccaaccagggaggggattgtattggttatttcggaatcgatacttcctcgaaagttctcggtgttaagatgtctccatacatcataaccaatgaaaaacccctggtcacagcatggacgttgttactgtctaccgaaaacggtcagccgctaatgttgtgtgattcgcagcgtttaaccatcgagcgtacagctgctactaccgttctggccgtcgatgagctagctcgcaaggacgcccgtgttttgacggtgatcggaaccggggagatcgggttggcacatgttcgccatgcgttggatatccgtcagtgggagcatatccggatttacagcagaaaagcgggggttgcgcgggatttgattcgtgcacttccagcggatgatcgaattagcatcgtttcctcgctggaaatcgctacagccgataccgatgtgctaatgctgtgtacttcatcagccactccggttattgagccagatatgctgaaaaaaaactgcctgattacttctatcactagcaatgtagagcaggcgcatgaagttccaccgtcttttctgtcgcagatggatgtctattgcgattaccgccatactactccacaacatgcagcagagatgtgtctcgccagacagcatcacggatggacagacgacgcgatcaagggtgatttgccagaactggtcgtcaggcgttgcaaaaaacccgactaccaacggcatgtatttttccgttcacttggattaggtatagaggatatagccatcgccagccaactgttttcacttatgaatgcactaacgccgtaa

SEQ ID NO: 243371 - DNA, 531 bp, Klebsiella pneumoniae
atgcgcacaatgaaagtcaacaccgccactcgtgaatcagacgaacagtttaaaacagataaatatctgcgcagtgccgtaaccaatggtaaagctcgcctggattttatcccggagctcttttttacgccgttagccgataccatggcctcgaactggttacgccagcattctgaatacgacggcggttcctggtcttactgggttattccacagggtgtcggcgggaatattgcacccaacagcatccagttcattaccacgcagaccggatatatcgcacctgaaggtgagcagcgttacaggatgtgcatcccgggaaattattttgaaggtgaggtcagcgctgatgcagcaggcattattgccacgctgatgattatgaacaggttgtcctggcacgtggctgaaatggggccgcaatatgaccagatctgcaggcgtctggtttcacggcaggatgcactgaaggattatatcagcattattcatcatcccgaacggcatttaatatggcgggcaattgattaa

SEQ ID NO: 243372 - DNA, 240 bp, Klebsiella pneumoniae
atggcgacatcattattgtcggaaacgcagcaattacgcaggacagttgttgcgcatgtcttcggtgaacacactatggccacgctggagcgctttctgagcctgctgtcggcctttgatgtggtgatatggatgacggacggctggccgctgtatgaatcacgcctgaagggaaagctgcacgttatcagcaagcgatatacgggggctgatgctcagtcgaacgaaaactcacgttag

SEQ ID NO: 243373 - DNA, 960 bp, Klebsiella pneumoniae
atggtaatatttattgatgatggctctacaaatgtaaaacttcagtggaatgaagctgggaaggtgcatcaacatattagtccgaacagttttaagcgtgaatgggcggtgtcattcggtgacaatgaagtgttcaactacacacttaatggcgaacactacagctttgatcctataagccctgatgctgtggtaacaacgaacgtggcctggcagtacagtgacctgaatgttgtttcagtacagcatgcactgcagacaagtggtttatctgctggagaaatagacattgtatgcacactccctctcactgaatattatggcagggacaatcaacctaacgctgagaacattgaacgaaaaaaaaataacttaaagagaggaattactctcaatgacggtgttgtatttaccattaaagatgtgaaggtgatgcctgaatcaatcccggcagggtatgaagtacttcagcagttgaacgaactagactcacttctcattatcgatctgggcgggacaactttagatgtatctcaggtgatgggtaaactatctgggatcagtaaaatccagggagatccttctcttggtgtttcaatcgttacgtcagcagtaaaagatgccttgtctgtagcaaggacaaagggaagcagcttccttgcagatgaaatcatcattcacagaagagatcaggactatttaaaaaagagaattaatgacgaatataaaatcccgatggtcctcaatgctatgaatgatgaaataaaaaaacttataaatcgggtgcttaacgtcatagactcatttactggttatacacatgtcatggtgataggtggtggtgctgaacttatcagtgacgctgttcaaaaacacacaaatataagaaaagaccgtttttttaaaactgaaacatctcagtttgatctggttaacggcatgtacctcatagggaactga

SEQ ID NO: 243374 - DNA, 1275 bp, Klebsiella pneumoniae
atgtttgctctggcggacgtcaacagtttctatgcttcctgtgaaaaagtgttccgccctgacctgcgggataaaccggtcattgttctgagcaacaatgacggttgcgtcatagcccgcagccccgaagcgaaagcgctgggcattccgatggcagagccgtggtttaagctgagggagatggcagaaaaaaacggcatcgtggtgttctccagcaactattcgctgtaccactccatgtcggaacgcgtcatgcgctgtcttgaggacctgtcgccacgtgtggagcagtacagcattgatgagatgttcctcgacgttggcggtatcgacaactgcatcgcctttgaggacttcggtcgacaggtacgtgcgcacgtgcataaacatactgcgctgaccgtcggcgtcgggatggggccaaccaaaacgctggccaagagcgctcagtgggcctcaaaacagtggaaacagttcggaggtgtgctcgcactgaccaccggaaacccgcaacgaactgaaaaattgctctcccttcagcctgtcggggaaatatggggcgtggggcggaaactgacccggacgttaaacacgatgggtattaacacggccctggagctcgcacggacgcatcccgcatttatacgcaagaatttcagcgtggtactggagagaacggttcgggaactgaacggggaaagctgtatcagtcttgaggatgcgcccccggtaaagcagcagattgtctgcagccggagttttggtgaacgcatcactgaatttgaggaaatgcgtcaggccgtctgccagtacgcagagcgtgcagctgaaaagttgcgaggtgaaggtcagcactgccggcagataagtgtcttcatcaagacctcgccgtttgccggtaatgagccgtactatggaaacctcgccagcgaaaaactgcccgttgcctcccgggactcccgggacatcatcagtacggctgttcgactgctggcgcgcatctgggtgcccggtcatcggtatgcgaaagccggcgtgatgctgaatgacttcacaccgcagacggtatctcagttaaacctctttgatgaataccagccccgggcagacagtgaagcgctgatgggactacttgactccatcaaccactcgggtctcgggaagatctggtttgccggcagaggaacagataccggctggcagatgaaacgagagatgttaagtccttcctacatgactcgctgggactctattccttcagctatgatcaactga

SEQ ID NO: 243375 - DNA, 462 bp, Klebsiella pneumoniae
atggttacccgaatgactcacgagacgccgttttttcgccgggaagatgtcttcacgctcactgaaagccccacggctttacagcttccgctttttgccgaagctgttcctgccggttttccaagcccggcaggtgattacatagagcaggagctggatttaaataccctttgcatccggcacccctccgccacctattttctgcgggccagcggcgagagcatgcgggacctgggtctgtatgacggggacatcctggttgtggaccgggccgaaactgctctggacggcgacgtggtcatcgcagaggtcgatggaggatttacagtaaaacgcctgcgactgcacccgcgcccggcgcttgagcccatgaatcccgcgttcccgacgctttaccctgaaaccctgacgctgttcggtgtcgtcatgcacttcatacacaacacccgcacgcggctgtaa

SEQ ID NO: 243376 - DNA, 246 bp, Klebsiella pneumoniae
atgctgcagataaccgtcagattttctccggaacaggtcaaagcaatgcgctcaggaacgtttgctgcactgcaacaggaaatagaacaccggctggccactcattaccccgaactgtggctgagtatcggaaaaagtacccggagtgaactgagtgtgaccggcgcgcgtaatgacagagaaaaagacgccatcatggaaacactggaagctatctggcaggacgatgcatggttacccgaatga

SEQ ID NO: 243377 - DNA, 222 bp, Klebsiella pneumoniae
atgtcgccaaagaacaggtcagtactcagggcgttaagtgtgcccgttgacagcggtgaagtggtgcgcaggcgtttcggcagtcggctgattgccctcgtcacgttgctgctgctcccgctactggtttttgatgtaccgcagtggctcttcattgcctctcaggtggtctggggcggtggtgtctgggttgggctgtctgtagccacagataagccctga

SEQ ID NO: 243378 - DNA, 936 bp, Klebsiella pneumoniae
atgccgaactggtgcgcgaaccgactgaccttcagtggaatacatcacgtcgatgaactcaaatcatgggtgcgtggcgagcaatcgtccctgcccggacgggcaaaacgcgaaggaatacagctatttctggctggttgtgccggtcttttgcgacccgatgccattctgccttatccaccctgtccggcgctgaccgcgcacggtgcggtggcagaaagctcgcccgtctcgcgggcattcactcgctggctggcgctgtttgtagcaggcgcagagctggacactgacacctgcctgaccctgcaccagtactggctggattcgggtatccgcgatgcccgctggcagatgctggatgagtacgaaacgtcggtgattgaacgcctgtaccgccagaagaactgcgactggggcaatagttttcgtccgcaagatccggagtcctggtggaacacgctatgcgatggcactgacggtgacgctgccggtgaaccgatggattttcgtcttgtgctgccgacccgcctggatatcgaggtgaatgggttcaacggcggtctgctggacggtatcccgtcctcgtacagccactacatcagccgctacggctgcaaatggccggtcggctgtgacatgaatatttgcttcgacggcgacaccacgctgacagtcgattttgatacgccgtggagtccggttagtcaaaacgtgctggcggcactgagtgcgcggtatggggcacaggtagagcactggtatgccgaacagggatgcgatttctgcggttacggacgctacagcaatggcgaaatcaacggacaagtcagcgacagccttgaatggggagaacccgacccggaagacgaatacgactgcccggatgtaatcggcccggactggatcatcaacaatatcgcgcactttggtggctga

SEQ ID NO: 243379 - DNA, 267 bp, Klebsiella pneumoniae
atgaggcgggcgggaaaccgcccgaatgaaaaaatgcaaaaacggatgaccgtaaaagcgtttatcgctcgtctggcgcagtacccggaggacgcgctgtgctgcggcacgttctggctggctgatgattttctctcactggacgactcgctcacggaagacgacattgatgccgcgatggagctggcccaggacagccatgacgctggtatcgggtttaaccgggattctctgcaggccgcaattgacgaggtgaaacgcgtatga

SEQ ID NO: 243380 - DNA, 336 bp, Klebsiella pneumoniae
atgaatacctggcttgtcggaatgagtgtcgatgtcgatgacgtcgaaatgatggtgaattttctcgtctccgcggccgatctggcgcatgccgaagcgggtattcaggcaatggggcgtacctggtggccatcattaagccgggaggatgacggacaccgctggctgtacccgcagggtgtcgtctggctcaactgcatcattctgctcgatgacgtggaaaacatcatcctgcgcggccttaaatttcttgatgtgtgggtgatttccggcaaacccgatgcgccggtcatcacggatgaatacggcaatgactggcgcgatatcacacgctga

SEQ ID NO: 243381 - DNA, 822 bp, Klebsiella pneumoniae
atgcttggtgcatccttccagcaattcacaacagaggcattactggcaagcgcttcgctacgtggaggattaacggctctaaataagtgcaagtatcacgataaaggaagcttttataacgctttcttccaactatcaacggggctggagcgattctttaaaattatatatgtagtgcagtttatgattgaaaatgaatttcataaaccatcatataagcaactgagggagaaaggtcatgatatattggccttacatgagacggccgtggctattgctgaaaattataataatagaaacaacaatgaatggaaactcaacgatgagcaggaattaattctgacaatgctatcagagtttggtaaggaaaccagatactacaaccttaacacgattgttgaagataaaaaaaagataaataatccgcttgaacagtggaacgagatactcaatgcctgctactggaaacacatatcagcaaacaagagggaaaaacttcaaactgaaattattgaatgggctgataaaaataggctttatggatacacctatgattttggactagacggacatattatgactcatattgatcagcgtatgctaaactggaaaattataaaagtttcaccctgcattgcgtctgaaataatatgtatgttgcagccgtactattttttattggtatctctcagggatgctgtggaactcagagagattcaaaatggtatcaatgaaccgcaagttccatactttcacgaaatattcccgtacttccttctagacgcctccagagcaaaaaagcgtagaaactggatggattaa

SEQ ID NO: 243382 - DNA, 1245 bp, Klebsiella pneumoniae
atgattaacgataatgatgttaaagtctttgcaaaagaaaaggaagaaatgctgatcagcaagctttcttctggcagagagcattctccgtcgagtgcagatacaaggcaaagaaacgaatttgagcgagactatgcgcgcattctttactcttcttcgttccggcggttacagggaaagatgcagctgtttgaagtcgatcctcaaaaatttaaccgtaacagactgactcatagcctggaagtcgcccagattgcccgaagcatcgcatccgaacttgaacttgaacatcacgttgtagccgaactggctgcgcttgcgcacgatattggcaaccctccgttcggccactccggcgaaaaacaacttaacaagattgctaaggacttcggcggctacgagggcaatgcgcaggcactcagaatactcagaagtcttgagataaagcatccatattgccccggcctcaacctcacccaccgcgccattctctctgtggttaaatatccctttaaaaatgaaaatggcaacaaaaaatttctttatgataatgactacaaatacttcacagacttagtaaataaatatgaattagatttgcagccaggtgaaaaaactattgatgcgcagataatggatctgtcagacgaaattgcatatgccgcgcatgaccttgaagatgcactaagccgtagtatggtcagcattgaggatatcgtttatgagtttggaagatccgattacaaagattcaattggtttattaaatgaaatcattgaaaaatcaaaagccacagcttcgaaagcattcagactaaattcatccgaagagttcgccattatattcagaaaagaattgacatccaatattgttaatgtgcttgttaatgatattactgtcactcagggtgaaaatagcttcaggcaacttgggtttggcactaaagaaaatctgtcttccggtcttaaagatatcgtatttaaagtcatcatgcgcaaaagagacattaaaagctatgagcacaaagggaacatgattatcacagatttatttaatttctataattctgacaataacatagaatttatatcaccccaactgtatcggacgcttccggaagaaaaaattaacaatgaaataaatcctctttatcaaaaagataaagaacgggcaattgtcgactacatctctggcatgatggacacgtttgccatccgcgagtgggaaacgcattgcagaaaatga

SEQ ID NO: 243383 - DNA, 324 bp, Klebsiella pneumoniae
atgaatgggtattttattacaatcattattgcattcatttttggtcccattctggcgttaccggtaatgatcttcggtttgtttaatatgatggattttgcgctgttttcattccccatatttttcttttgtattatgggttacaggcaagagaagaaggttaaggatgcttttaaggcattaataccgggcctaattgtatctctgatgctgacgacttttgttctgtttgttaaagaacagagcgactgtacgaataaatatgacacaggaagcctgtctgctgctgtttgtgagacacaaaaggggcctggatttagataa

SEQ ID NO: 243384 - DNA, 216 bp, Klebsiella pneumoniae
atgggcatattaggcaagcgataccactacgttattgcgcaggatggttatcccccggtgtgggatggcgagcataccgaaacgtttcgtaacccggtatcgacgggcgaccatatcatgcccgtgcgcatgggcgaaaaggtgcgtaaggtgctgcgcattgagcattaccgacagggttcggtgctctatgtgcaggaggtcagcgggaactga

SEQ ID NO: 243385 - DNA, 519 bp, Klebsiella pneumoniae
atggtgacatggctcgcggcctgcgtccgccgccttacggggcggtcaggcggtaaacccgtggcgtctgtttgcctggtgcgctgcgaaaacccggtagtggcgtggaagtacgccctgtcggtggccttcgccagccaggggcggctctgcctcagcccgatgacggacggggaacgcctggtgctgttcccggaagtgctgttgcctgaaaaaccggtgatgcatgaccgtctgccgtaccacacctgtgggcatcggccggagaagcgcggcgtggtggcgcggctgtaccggcaggacgtcgccgcccgggcggctgtcgccatcggctccgcgtcaccacacaccctgcggggcgcggtgaagcactggcagcacaaaatctcatcagatgaccttgcggagatgctctcacagtggcaggagcggcagccggggctggcagatatcaccgtgatgcgatgggcgaagcatgtcatacccgcatcccggcaacatctgcgtgatgtggcataa

SEQ ID NO: 243386 - DNA, 435 bp, Klebsiella pneumoniae
gtgaacacacagtattctgctgacatgattaacaaactgaccccggatgaactggaagacatacgcgagcgcggtctgccggaacgccagcgtctgacggattttgtgattgccgacctcgatattcccgacggctggcatattgccggagagtggcaaagcgagtatggcggtatttttcctgtgcattgccgcctgacccctgacctcgataagcccctgacgctcagtttatgcagtcccggcgatgtcagtccattgtgggtgctggttattcaggcgcaccccgcacagcgggtgcgggtgctgcacgccgccgctgaatttgaccctgacaggttgtcttacctgcttgaacaggtggataccctgctgcgtaacaggcgcagcgctcacgccatcgccgatgaaatcggggaggccgggacatggtga

SEQ ID NO: 243387 - DNA, 2055 bp, Klebsiella pneumoniae
atgaagaccacagtcaacgtcagcgataccgtcaaaaaccgcaaatccacgaaaaccagcaaaaaggccagcaccgccgaagcgatgctgaaagccgcccttgatgccgcacaggtggaatacccgccgctgtcgcaactggtgaaatccccgaaaaacgtccgcaccctgccgtacacgaaagaaagtgtgcgcgaacttgccgactccctgctgaaagcgggactgttgcagaacctgattgttcaccggatgccagatggcttgctcggcgtggccgcaggggggcggcgtatgaccgccctgcaactgctggcagaagaggggcatattcacgccgattatccggtggcggtgaaagtggtggacgatgaactggcggtggtggcctcgattatcgagaacgaacagcgtcgcgccatgcaccccgccgagcagattattggctttcgcacccttgccagtgagggcaaaacgccggagcaaatcggggatttgctcggctatacctcacgccacgtccagcgcggattacgtctggcttcgctcgcccctgaactgctggacggactggcaaaggacgaactcacccttgagcagtgtcaggcgctggcgctggaaaccgacccgcagcggcaggtgacagtctggcagagtgccagtgagaacttcggctcaggcgtgagtgcggagaagctgcgccgcctgatcaccgaaagcgaggtgtccacgcaggataaccgcatgtgggatgtcgtcggggaggccgattatgtcgctgccggaggtgaggtacgccgcgacctgttcagccagaacgagggcggcttcgtcgataaagtcctgctggagcaggtactggtgcagaagctggacgggatcgccgcacgggtggcgcaggatgagggctggcgctggagcgcgggacgactgacgcctgtcgggctttatggggaggatgccgccgaatacactctgctgcccgtgccggaagaagactacaccgacgaggaaagcgcccgactggacgtgctggcagacgcactggatgcgctctgtgtcgatgatggcgaggaagcggcaaaaataagcgatgaaatcgcgcagattcaggccattgccacggcgcggggctggtcagccgatgcgcgggagctggctggcgtggtggtatccttcgggcgcggcggggtcaatatccgtcgcggggtggtgcgtaacagcgacctgccggatgcgccgcaggatgaagacgataacgatgatacaccggattctacaggctcgcaggaggcagacagcgtggaaaacgccagcctgaacgatacgcttccggcctcgctcattcgcagcatgaccagtgaacgtacctttgccgtacaggcggcgctggcacagcagccgcgcgtggcgctggcgctcatgacatggacgctctgcctcggcgtgttctccagctacggcagcaacagtccggtgcgggttcacaccgatgcccgacactatctgctgaccgaccacgccctcagcggtcaggacgggaaagcgtatcaggcactgatggcgcagcgggacgcgctggcggcgaccctgccggagcactggaaagccgacttcacctggctgctggcgcgtagtgatgccgacattcacgccctgctggcgtactgcacggcccacgcccttgacgggctggaggaaaaaatcagcgccagaggccaccgtctcgattgcgtggaagccgcgatggactttgacctgcgcgaatggtggacaccgaccgctgacagctatttccgcaagctgaacaaaaagcaactttctgcgacactggcagaaatgggaaatgacgcagcggcgcgggaggtactggatatgaagaaagataccgccgccgcccgtaccgaacgggaagcagccgccctgaactggctgcctgactggatggtgcgccgtgaggcaatcaccgcgacggcggaaagcgcccccgacgccgccgaagccgccaatgatacagccgtcagtgatgccccgaatgctgaacaggccgcctga

SEQ ID NO: 243388 - DNA, 219 bp, Klebsiella pneumoniae
atgcatgcatttatttttctggtgctgatgacaccgagtagtggcggtggtatttgggatattactcccatgcctaatactgatgtctgcataaaaatgctacgggtactcgaagaacgtggaggcagaggttacggaagtaatacaggagagtgcattgaaattaaaacccgcgagcctttgagcagcgtgatggaaacattgagtgagggtgggtaa

SEQ ID NO: 243389 - DNA, 393 bp, Klebsiella pneumoniae
atgatgctgtttcttcgaaagtacggatttttgtttatccctccagtctactggctcatctatctgggcgcccggttgacttacaatggactgacaggagagttttctgctgatttccttcagggtattcgacatgaaggcgtctatattatctgtagtctgtgtgtattttattttttctgcttagaggtggaagttggtgatggggagttctcagcgaacattctgttcctgattgttttctttcatgtggttttattatttatcactctgcttgtttgtctgtggcaaggggaggtgttgttggattcgatctttatgggtcagattattgcctccatgtgtttattgttttttattccagtgctttccattataagaaggagtttctag

SEQ ID NO: 243390 - DNA, 432 bp, Klebsiella pneumoniae
atgttacacgcgcaatctgctaccaccgcgacccctgttcgtccatctgcattgtttgattttcttcctacgcttttcggcgcggactacgtgaaggccgaagcctgcatttatgcctacgccgcaaaatatatccgcgattacagcggcggcgaatggacgtttaaccagttaccggacggggcaggctatcttgcgccggaagaagaacgggtatttgtcagcaatcccgataacgggtttgagggggaaatgtccggcgatgcagcagggatttttatcaccgcaatggtgctcaatcaccgcgcctggatgcacagccaccatgaccagcaggaagccagcagccactacgtgaaccgctacgaacaactgatggcccttgtcccgacccaccgcgaggccagcgccatttaccgcgccctcgactga

SEQ ID NO: 243391 - DNA, 396 bp, Klebsiella pneumoniae
atgtacggaaccgtcagtgaaatctgcattgaattgctgaaaaaacacgaaaaccacgaaagaatggccgttattacctggattgtcgaagatgtttatgaaatgggcgcggaatacaacccgaccgcagccgatgtggcgaacgtgctccaggctatcggggaggctgactgcgatatcatgtatcgctacggcatcggccaggaatttgtagcaggggaactgcgccagattgccgccgaacgagcgccgcgccatatcggtatccccgaaaacgaactccgcgccctgcttccggctatccgctcagggctggactacatcgacgatgaaagcggcgcggcgaaagcgtcactggaaaccctgcaacgggtgctcgattctccctctgcgtaa

SEQ ID NO: 243392 - DNA, 1146 bp, Klebsiella pneumoniae; identical to SEQ ID NO: 211555

SEQ ID NO: 243393 - DNA, 924 bp, Klebsiella pneumoniae
gtgaaaaccctgacgcttttcctgagtgccctgatgttgtgggggtacagcctcagtgcggctgctgacccctcctgtgagggccggtttgttaacccgatcaccgatgtgtgctggcgctgcatcttccctctgtcgctcggcagcgtgcaggttggtaaaggcgatctgcctgataccagcaatcccggtaatcccctgcagctgtgtccggcgccgccaccgctttttgttcgccccggtctggccatcgggtactgggagccgatggccatgacggacgtcagccgttcgccaggttgcatggtcaatctggggggcttcagtatcaatctcggcaagaccggcatgggaaccgcgagaaaggacgataagcaggtgaacggcgccttctatcacgttcactggtacaagtacccgctgacgtactggctgaacatcatcacgtcggcaggctgtctggaaggcggagacatggatattgcctatctgtccgagattgacccgacctgggtggacagcagcctcaccaccatcctgaatccggaagccatcctgtttgccaaccccatcgcgcagggcgcctgcgcagcggatgcgctggccagtgcattccatatgccgctggatgtgctcttctggtgtggtggaagccacggctcactttacccgtttaacggccaggtcagtaatgaatccagcccgctgcagtcgtcggtactggtcagtgaacgtatggccttcaagcttcaccggcagggacaaattatggagagtatcgggaaggacaaggcggtctgttacgaatatccctccccgatcatcccgaaagaacgctggcgctatcagatggtgaacatgtatccggacagtggtcagtgccatccgcttggacgcagcgtgatgggggtcggttccggctga

SEQ ID NO: 243394 - DNA, 294 bp, Klebsiella pneumoniae; identical to SEQ ID NO: 102300

SEQ ID NO: 243395 - DNA, 294 bp, Klebsiella pneumoniae; identical to SEQ ID NO: 102307

SEQ ID NO: 243396 - DNA, 285 bp, Klebsiella pneumoniae
atgattatcggtctctttattaggcagcatggtttattgcgcggattgctgactcatgatttccttaattcgttctctggtcttattggtgagcacatcgttttccggtattttttgatttttcatcaagtcgtccataaagttggtgaaatccagcttgttaaaatcaatcccctggagttccgcgacggtaatgccccgacagtcaggactgctggcgccgccaaaaccgatatgcagctgaccgtttcttccctgctgctgaacgatctgcgccagttttga

SEQ ID NO: 243397 - DNA, 939 bp, Klebsiella pneumoniae; identical to SEQ ID NO: 138765

SEQ ID NO: 243398 - DNA, 1128 bp, Klebsiella pneumoniae
atgacgcgtggtctggaattactgattgcccaaacgatattgcagggatttgacgcgcagtatgggcgttttcttgaagtcacttccggcgcgcagcagcgctttgaacaggctgactggcacgccgtgcagcaggcgatgaagcagcggatccatctctacgatcaccacgtgggcctggtagtagagcagctgcgctgcatcaccgaagggaaaagcaccgacgtcgattttcttctgcgggtgaaacagcagtacacccaacttttaccggattaccctcgctttgaaattgctgagagctttttcaattcggtctactgccgcctgtttgaccaccgctcgctgacccccgagcggctctttattttcagctcgcagcccgagcgaccctttcgtaccctcccgcgaccgctggcgaaagatttctttccggaacgcggttggtcgcacctgctgggtaaagtactgtccgatctgccgctgcggctaccgtggcaaaacaaagcgcgggatatcggctatatcattgccagtctgcaggaggcgctgggggaggaactgctcgccacctgtcatctgcaggtcgccaatgagctgttctaccgcaataaagccgcctggctggtgggcaaactggtcatgccgatggcgacgctgccttttttgctgccgatccaccgcagcgaagagggtgagctgtttgttgacacctgcctcacaacccatgccgaagcgagtatcgtttttggcttcgcgcgttcctattttatggtttatgcgccgttgcccggcgccctggtggaatggctgcgcgagatcttgccgggtaaaacgacggccgagctgtacatggcgattggctgtcagaagcatgccaaaaccgaaagctatcgcgaatatctacactacattactcgctgcgatgagcagtttattgaagcgccgggtattcgcgggatggtgatgctggtgtttaccctgccgggctttgaccgggtgtttaaggtgatcaaggaccgcttcgcgccgcagaaagagatgaccgccgcccatgtgcgggcttgctatcagctggtaaaggagcatgaccgcgtcgggcggatggcggacacccaggagttttaa

SEQ ID NO: 243399 - DNA, 1536 bp, Klebsiella pneumoniae
atgcagctggcccatcagcagcgggttatcgcgataatccaccgggatggccactaccgccgggccgtcgacgtccatcgccgcgcgcagggtcggctccagcgcctcggcgctttccacggcaaaccctttcgcgccgaaggattcggcataggctttaaaatccatcggcccgaactcgacgccggacaggcgctgatattttttctcttcctggatagcgaccatgttgtagccgttatcgacccagataagatgcagcacgttggctttcaggcggacggcggtctccagctccatgctcgactgcaggaagccgccgtcgccggagacggagaccactttgcgctcaggattgaccagccaggcgccgatggcccagggcagggcgacgcccatggtctgctggccgttggagatcatcacctggcgggcgcggaagctgtacaggtagcgggcaatccagatatggaagctgcccatgtccacggtcaacgtgacgtcgctgttgacgatgtcctgcatggcgcgaacgatgcgcaggggatgcagggcaaactggttgagctgcgcgccgcggcggtccagcagctcgcgctggtgctggcggtcgcggaggatctccgccgcctgcggggagagcaccagccgatgatcgatattttgcgccagcttgttgagagtgccggcgatatcgcccaccagctcgacatccggggtgtagttgcgctcttcataggcgggcagcacgtcgatgtgcaccagcgtcgcgttgccgctgttccacatcgccggttcgtattccaccgggctgtagccgatgcagatcaccaggtcggcgagctgcagcagacggtccccggcctggttgttaaacagcccaacccggccggcgaagcgagagaagttatcctgattcaccgctccggcggcctgataggtgctggtgactggaatatggctggtctccagcaaacggcgcagcgcggcgctgttttccggctggctggccatcaggccgagcaggaagatcgggttcttcgcctgggcgataagcttcgccacctggtcgatggcatcatccggcgcggcgcccatctgcggggccccgctggccggcagcactttgccgctgaccgggccatcgaccacatcctgcggcaggctaacgaacgcgctgcccggccggccctgctcggcggcgcggaaggcgttggagaccacttccgccagcgcatccggcgccgtcacctcgacggcgtatttggtgaccgggctgaacatcgccaccgtatccatactctgatggacctgtttggctttatcggcgcgttttaccgcgccgcccagggccaccaccgggtcgccttcgctgttcgcggtggccatgccggtgatcaggttagaacaacccggaccggaggtgaccagcgccacgcccgctttgccggtaatacgtccgacggcggcggccataaacgcggcgttggcttcgtggcgcaccggaataatgcgaatcgaggaatccagcagtga

SEQ ID NO: 243400 - DNA, 246 bp, Klebsiella pneumoniae; identical to SEQ ID NO: 135189

SEQ ID NO: 243401 - DNA, 1383 bp, Klebsiella pneumoniae; identical to SEQ ID NO: 74989

SEQ ID NO: 243402 - DNA, 348 bp, Klebsiella pneumoniae; identical to SEQ ID NO: 136986

SEQ ID NO: 243403 - DNA, 651 bp, Klebsiella pneumoniae; identical to SEQ ID NO: 102213

SEQ ID NO: 243404 - DNA, 198 bp, Klebsiella pneumoniae
atggcaacgcacgactacaaacgcttcacaatagcagttgctatctcacatcagttctgggtgaaaagcggatctttgcaattgctcttattattgatgatggctcaattaaaaccgagtagtcttataaactggcaactaattatagttttaaattttaaagttataaccaaggtattaactatagatatggtataa

SEQ ID NO: 243405 - DNA, 870 bp, Klebsiella pneumoniae; identical to SEQ ID NO: 226539

SEQ ID NO: 243406 - DNA, 1266 bp, Klebsiella pneumoniae
atgtttgcgctgattgatgtcaatggcatgtacgccagctgtgagcaggcatttaggccagatctggcaaaccgagcagtggccgttttatccaacaatgacggcaacattgtggcccgtaattacctggcgaagaaagcgggcctgaaaatgggcgatccgtacttcaaagtcagacccataatcgagcgtcataacatcgctatttttagctctaattacactctctatgcctccatgtcggcccggttcgcggccgtagttgagtcccttgcaagccacgtcgaacagtattcaatcgacgagctttttgttgactgcaaagggataacggccgccatgagccttgacgctttcgggcgccaactgcgcgaggaagtcaggcgacacacaacgctggtatgcggggtcggtattgcccgtactaagacgctggcgaagctgtgtaaccacgctgcaaaaacatggcccgctactggcggggtggttgctctggacgatggcgccagattgaagaaattaatgagcatcctgccggttgcggaagtctggggcgtcggccatcgtacagagaaagcactcgccacaatggggatcaaaacggtgctggatttagccagggcagatacgcgcctaatccgtaaaacgttcggcgttgtgcttgaaagaacggtacgggagttgcgcggcgaggcttgcttcagcctggaagaaaaccctcctgcgaagcagcagattgttgtgtcgcgctcattcggccaacgcgtagaaaccctgacggacatgcagcaggctgtcaccggatttgcagcgcgcgcagctgaaaaactgcgtaatgagaggcaatactgccgcgtcataagcgtctttatccgtaccagtccttattcagtgcgtgatacacagtatgccaatcaggcaaccgaaaaactgacggtggcaacccaggacagccgcacgataattcaggcagcacaagccgcgctggcgcggatctggcgggaagatattgcgtatgcaaaagcaggggtcatgctggcagattttagcgggaaggagacccagcttgatttattcgattctgctacgccttcagctggcagcgaggctttaatggctgttcttgatggtataaaccggcgtggaaagagccagcttttttttgcaggccagggcatcgataactcctttgccatgcgtcgtcagatgttgtcacctgattacacgacagactggcgctcaataccaatagccaccatcaaataa

SEQ ID NO: 243407 - DNA, 1278 bp, Klebsiella pneumoniae
atgagtgagctgagctatctggagaagctgctggatggggctgaggttgagtggttggctctcggtcagattgcaaaaaagatttattctggcggcactcccgatacaaaaaaaaatgaatactgggaaaatggtaatattccgtggatgagttctggcgaagtgaacttaaagatagtatatgaaacagaaaagtttattactgagacaggactaaaaaactccagtgcaaaatttgtacccaaaaactccattgttatggcattggcggggcaaggcaaaactcgcggaaaagttgcaagaacaaggatagacttaaccacaaatcaatctcttgcagcaataactttagatgaaaaaactagttgctcagactatatattccactttttagaaactcagtatgaggcattacgtcaattatcatcaggaaacagtggtcgtggtgggttgaacttacaaatgatttcggcatacaaggtccccattccttgccccaaaaacccagaaaaatcgctggctattcaggctgaaatcgtgcggattctggataaatttaccgcccttaccgctgagcttaccgctgagcttaccgaacgtaaaaaacagtacaactactatcgtgaccagttgctgagttttgaagaaggtgacgttgagtggaagacgctaggggatgtaacaaaaaaatggtactcaggcggaacacctacagcaggcaaagctgagtattatgaaaatggtgagattccttggctaaggactcaagaggttaagttctccgatatcaacagtactgaaataaaaataactcaagctgcgttaaagaattctgcagcaaaatggattccagaaaattgtgtaattattgctatttcaggagcaacggcgggacggtctgccataaataaaatccctttaacaaccaaccagcactgtggttgtttagaaattgacgacacaaaggcgttatatcgttatgtcttccattgggtaagcttcaattatgaaaacataaagtcgctgggacaaggtgccagaggtgacatcaactcaaccattataaaaaatttcaaacttcctataccttatgcaaccgcccctgataaatcacttgaagaacaagctcgcattgttgaaattttggataaattcgacacgctgaccaactccatcactgaaggccttccccgcgaaatcgaactgcgccagaaacagtacgaatattaccgtgatttactttttagcttccctaaacctgattccgtaacgaactga

SEQ ID NO: 243408 - DNA, 1191 bp, Klebsiella pneumoniae
atggccccggatttctggcgttatcaggtggtatcgaagatttccggctttgacttggagagcgccaatatcagccatgaaaacattgcctgttggttaatgcgagaagctcttaatttaggatatcccggttataaccactgcgcgctcaattatgatcgccatatcgggagtcagtatggctcgggacggggtagaaaagggtatgctgaccgactcggtaaaaaatattactggatcgccttacatcgactactgggcattctggccagtaatgttcccgcactggaagacccatattccgactacgaacctacaagtgatcatctatggtcagtcgacgtccgtaaagtcgacctgaccgatgtacgcgacatcaccgcagaaagtgtctatccagtactgatggaagaaacaaattatgcattccctgaccgcaattcagatatcaaaggttgggttcggaccgatgatttgtcaccttatgaagcttgtctgattcgaactgacaaggaaggggaacagtgggtagcgctttcacacagctattgggacgaggataaagcggcgaatgaaaatagctggaattcaccttacctggcagtgcgtgcttattattcaagcgcactcataaatgaaagcatccagaacttcaaacagaaaagtgcgcgcgatattttccaatataatcaggggaatagctgttatcgcggttatcttgctgaatatcctgacagcccagtgtataaacaacttcttaataatgaggaagatagtgaagcatttaattttacagaagtcagtttactacgcggaagcgaatgggaatatgactactcatataccacgcccgagcgccaggataacctcattgcgccatgccagggaatcattcaaaaactcgaacttttatgggattgtcaaagcggttgggttgatcgttctggcaaacttatcgccttccaccataaaggtgtaagacaaagcggacttttcattcatcgttcggcgttgaacgcctacctgttcataacaggtgaagaacttatatatcgccgttttgctaacaggggatattttgatttagctggccgtaacggctcgcaaatagacctgaaaacttggatccagtaccgggcagacaaggcgccagtagttttacgagaagaggaactgccgtttaactgctga

SEQ ID NO: 243409 - DNA, 2007 bp, Klebsiella pneumoniae; identical to SEQ ID NO: 223157

SEQ ID NO: 243410 - DNA, 339 bp, Klebsiella pneumoniae
ttgcaacagtgccagaaaatcctcggtcgttttgaaaacccgtatctgaaagatgacgttgagcgtgtaggccgtcagccgctgcgtaaactgagcgcgggcgaccgtctgattaaaccgctgctgggcacgctggagtacggtttgccgcacgttaacctggtgaaaggtatcgccgcagcgatgcatttccgcagtgaagacgatccgcaggcgcaggaactggccgcgctgattgatgaaaaaggcccgcaggccgcgctggcgcagatctctggtctggacgcaaacagcgacgtggtgaaagccgccgtcgccctctataacgccagcaaatga

SEQ ID NO: 243411 - DNA, 1212 bp, Klebsiella pneumoniae; identical to SEQ ID NO: 138800

SEQ ID NO: 243412 - DNA, 723 bp, Klebsiella pneumoniae; identical to SEQ ID NO: 139625

SEQ ID NO: 243413 - DNA, 627 bp, Klebsiella pneumoniae; identical to SEQ ID NO: 207927

SEQ ID NO: 243414 - DNA, 465 bp, Klebsiella pneumoniae
gtggccggcctgagaacaggcgttgatgattttcccgccgtgaccctctttcttaaaggcctcaaccgccgcctggatgccccagatcacccctttgacgttgatattgtagactttgtcgacaatctccggggtaatggactcgatcggcgtggatggcgccacgccggcgttgttgacgatgacgtcgaagccgcccagcgttttgcgcgcctgttcgacggcggcaaacacctgatcgcggtcggagacatccactttcaccgccatggcgcggccgccggcctggttgatttcggaggcgaccgctttggcggtggcgtcgttataatcggcaatggccacggcaaatccatccttcaccagacgaagggcgatagctttaccaatcccctggccggcgccggtaacaagtgcgacttttttcattttcctttccttattgtgatgacttacagaatctga

SEQ ID NO: 243415 - DNA, 252 bp, Klebsiella pneumoniae; identical to SEQ ID NO: 30842

SEQ ID NO: 243416 - DNA, 204 bp, Klebsiella pneumoniae; identical to SEQ ID NO: 92423

SEQ ID NO: 243417 - DNA, 198 bp, Klebsiella pneumoniae; identical to SEQ ID NO: 226861

SEQ ID NO: 243418 - DNA, 363 bp, Klebsiella pneumoniae
atgctgagcgcatttcaactggaaaacaatcgtttaacgcgcctggaagccgatgagatcaaacacctcgccagctcggtgtgggtcgatctggtcgagcctgacgacgatgagcgaagccgcgtgcagacggaactgggtcaaaacctggcgacgcgcccggaactggaagatatcgaagcctccgcgcgtttctttgaagatgaagacgggttacacatccactcgttcttcttttttgaagatgccgacgatcacgccggcaactctaccgtggcgttttaccatccgcgaaggccgcctgttcacgctgcgcgagcgcgaactacccgctttccgcctctaccgtatgcgcgtgcgtaa

SEQ ID NO: 243419 - DNA, 504 bp, Klebsiella pneumoniae; identical to SEQ ID NO: 136293

SEQ ID NO: 243420 - DNA, 2751 bp, Klebsiella pneumoniae; identical to SEQ ID NO: 137994

SEQ ID NO: 243421 - DNA, 618 bp, Klebsiella pneumoniae
gtggatatttatcaagaagatatagaaacattacaaattaaaatcctaggtaaaattgacgatagttacattaccttctatatgcccaggaaatatcttcgtgcgaatgaaaatatcgacgcgttactcaacaatgaaataaccatctggctggaacatgccggaggcacagagtgtcatttatctatcgacgatgctttaggtaagcaaaaacaaactccgcgcggtaaagtcagcatcctctcttgcacccgtgcagaccagaccgatttacctgaagagacagattttattgttgaaaacattgatgcgcgagaggatgcacatatccagctatatatttactcacaaaagaagaaatggcagatgtctttatttgttagcgattctcaacgcaactattttattaatatttatgccactgaatcgaagctctctctgaaacggcgaattgatagaaaaaatgacatcatgcatttgtatgttaaaaatagatgtattggctattacaaaatgctgatccctgacgccaattcaactttgaaagaagtcgtttcaaaccatatatcgcaagatacacaattaggaatagcgtttcgcaacgcattgaaaatataa

SEQ ID NO: 243422 - DNA, 141 bp, Klebsiella pneumoniae
atgagcaaagtgctgcacatgtcggagataatatatcatcgcctcgtaacgttgccggtgagcagtatggtaatgcatatcaggcaaattcagctgagattgaccagcgtggccgagatgccggtattcgccatgatgtga

SEQ ID NO: 243423 - DNA, 267 bp, Klebsiella pneumoniae
gtgaagcaggatgttactcgccatgttgataccactcagaagaatatggatgacactgaagatgtggtgaatattgacaaaaaccagatgacaaaaggcaagggtgtaagcgaaactggttataataatgccaattcggatttccgggaaaagcatgcaggagcaaaaacgcatcaggatacagggtttgacggcaaaaacgtgcttaatagcttgacttacaaggactatacaagacagttggaacagaaactgaaaaatgaataa

SEQ ID NO: 243424 - DNA, 204 bp, Klebsiella pneumoniae; identical to SEQ ID NO: 104460

SEQ ID NO: 243425 - DNA, 3831 bp, Klebsiella pneumoniae
atgacacaactcacccctaagcgtatgtctgacgtattttctgttaaagcgatatctgccaagcaattttgtgatgctttagaaaaaacagatgccagttaccttattttatactcctctgccgctgcaactataggctctgaaggacaagcagctcattccctcgcttgtggatatttagatggattagctgaatatgcacgtcgcaatatcaagggattaaccgtcatttctatcgcttggggggcatggcaaagtgttggctttgtggcagaaaaacaactccatgataaattacaacacaaaggtatgagtacgcttactactgaggaaggactggcacatttagatgcttgtctgctagataatacctcttgtcgccttgcaatgcgtttagcgactccacctttaatgacacaaaaaacgcctttatttcatcagactaatcataatgatcattatgataaccatgaaattaatcacactcgccagctttgtgaaaccccaactcaaacggatcaaacagagccggtaagccctaacagggttgattatcgcgttggtgataacttagaacagtggctaacagcatgcatcaaacaactgttgcgtcttggtgatgaacatattgatactcacattgaactattccaattaggactagattctctctctttcctcgatctcagtgcggaaattaagaaacagtttgcggtcaatattgacgctgaacaatcttatgatgatatgactattgctggtttagcctcagttattcgaaccgcagcacctgagaaatttactgtgacagaagcactccataatcaagacaacatttcccacacaatggagtcagaacgatatgccccatttccattaacaccaattcaacacgcctattggatcggacgtaaaaacctctttaactacggaggcgttgcttgccatgcaatttttgaatgggattgtcaacgccatatatgggagccggcctcacttgaaaaagcttggaataaagttattcagcgtcatgatatgttgagaatgatcatagatgatgatggacaacaacgtatcttaaaagaagttccttattttcattttattcaacatgacctaacaaatttaacccaacaagagcaacaagagagcctaacacagataagggaagccctttcttatcgggtattaccgactgagtcatggccattatttgaagttgaaatttcttggctaaataacgattgttacagattacatatcaatctagatttactgcagtttgataccatgagctttaaaattctgtttgatgatctatttaacgcctattcaggacaagaattaataccacaaacatttaccttccgcgactactgcttaaaaaatcaaacaaatcgtaacagtgatgagtggaaaatggcatggtgttactggcaggatctattatctgatttaccttctgccccatatttaccgataaagaattcatccattactgaacaacctcgttttacgactttccaacatcatgtttctatagcgcaatgggacaaattaaaacagaggtggaaaaagcatggtattacaccatcagcagggcttttaacactttttgctttagttttaggtcgctggacaaaatacccagcctttacactaaacttaactttctttaatcgtcaaccatggcacccagatgttacacaacttattggtgattttacctctgtactccctatagatatttatctagataacgactgtacattaaatgagtcaatggcaaaaatacagcgcagactttggcaacatttaagtaagtcccaagtaaatggtgtagagattttacgtgaatggggacgctataaaggggatagtagccaatctctgttacctattgtatttactagcatgttaggtatgacactagatggtgacaatattgatgaagcattaaatcagcttttcggccaacccgtatatagcttcgcgcaaacacctcaagtttggttagatcaccaagtaatggaaggaaaagaggggctaacattaaattggttctgcattgctgacggtttattaacaatgatgttctctgattatcaaagcttgatcactcaattatgccaagatgaagataataatcaatcagttgataagattattgcgcaacttccttcatatcaacatttagcaatagataatcacctccaatcacgctatcaacaactcgagcaaacattggaaaatcatccgcaaatcaaacgtgctcatgctatggtaatggtaaaagacgatacgaaagtagagcctcctctacaattactgtttgaagcctcttctgatattccactatccgttattaaacagcccaattggttacctaatttactttcgccatcagcttcactcagtgacattattgaaaagagttggcaacgatttgaggaacgagcacggtatggcatatgtcacacactgtatcgaaatgctctttttaccgagctaaacacaccaatcaccctagctgaaatagtggctcgtttaaaagcaaagcctcagtatgagaggctacttagtcagtggctagatttattatgcctgcatcacttattaaccaaagagggtgatcagttttatgccacaacacagtttattaacttatgtttatctgccccagtatttcaacaacctgttaatgattgggaatatgtactttgggattaccttgaacaatcactaacccaacatgaattactctttagtggtaaggtttctcctctttcactactttttaattcagatgaaattaccacagcactatacgccaaacaccctgcactaaattatttaaatcaatgtgcaaaagatattgttagtgcaatggttggtgcaacatcttcactcaatattttagaaataggggcaggtacaggagctaccactcaaggtatagtcgcagtacttaagaatacgcattactcatacacctttactgatatatcacattacttccttgataaagcgcgaaaaaaattcactgctgtaggagaaatgcgctatcaactctttgatattaatgcaccaatacaattttctcatcatccagataatggctatgatctgatcattgcatctaatgtattacatgatgcatcacatatcggccacgcactaaaacggattagaagcctgttaaaacctcaaggctatttattatttatcgaagcaaccgagtgtcaaagtgctatgcaaatggcgactgttggctttattgagggattaagtgcatatcaagataagcgtatattgacgaataaagcgatgcttgatagtgaaagttggcatgatattttaatcaatactggttttgaaactattggtcaatggccccaaacagattcctcatctttgcgacaaacactctttttagcctctcccactcgtggaggaaaaccttatttaggtaaattacgtgattatttatctcattctcttgatcagaatatcgactcttttgagttgttccaatgtgaaaatattgaagcaacccttaatggcatagcaacatcatccgctcaagagctaaatgaacagatacaacctgttgcaatacctgatgtaccaaccaatatgattaatgaaatcattgcattatggtctgagttattaggtcgtgaggtcaatagtacaaatgatttcttccgttctggaggagatagtttgattgcaaccaaaatgatcagccaattacatcaacggggatatccagcaacattacaacagatttttacctatccatgcttagccgattgtactcctctttga

SEQ ID NO: 243426 - DNA, 165 bp, Klebsiella pneumoniae; identical to SEQ ID NO: 33404

SEQ ID NO: 243427 - DNA, 204 bp, Klebsiella pneumoniae; identical to SEQ ID NO: 239786

SEQ ID NO: 243428 - DNA, 129 bp, Klebsiella pneumoniae
atgaaacagtggttcatcaagctccatcgtggcaggagattgatacatggcttttttactatcttggtgatgatgaatataaagcgcattattccattctactggcccataacttccagcgagagttaa

SEQ ID NO: 243429 - DNA, 534 bp, Klebsiella pneumoniae; identical to SEQ ID NO: 138741

SEQ ID NO: 243430 - DNA, 900 bp, Klebsiella pneumoniae
gtgggcggtctgtttccacggacccaggtggcgcagcaaaaggtctgccaggacattgccggcgagagcaacatttttgcggactgggcggcttcccgtcagggctgttcggtgggggggcagatggacaaagtgcaggataaagccagcgataaggacaaggagcgtgtgatgaagaacatcaacattatgtgggatgccctgtccaaaaaccggctctttgacggcaataaggagctgaaggagtttgtgatgaccctgaccgggacgctgatttttggtgagaacagtgagatcacgccgctgccagcacgcaccactgaccaggacctgattaaagccatgatggagggcggcacggctaaaatctaccactgcaatgattcggataagtgtcttaaggtcgttgctgatgcgaccgtgaccatcacctccagtaaggcgctgaaaagccagatttccgctttgttaagcagtatccagaataaagcagtggctgatgaaaaactgacggatcaggagaaagggtttatctccagcaccaccatcccggtgttcaaatacctggtcgacccgcagatgctcggggtgtctaactcacttatttaccagctgacagactatatcggctacgacatcctgctgcagtacattcaggaacttatccagcaggcccgggcgatgatctcaaccggtaattatccccagtcgacaatggatatgatcatggaaaacctcaaccaggcgagtgtgcagattgccgctttccagtcccgtgttcaggtccagcaggacgccttgctcgtggtggacagacaaatgagttacatgcgccagcaggtctccgcccgcatgatgacccgctaccagaataactatcatttcggagggagcctctga

SEQ ID NO: 243431 - DNA, 2310 bp, Klebsiella pneumoniae; identical to SEQ ID NO: 138481

SEQ ID NO: 243432 - DNA, 2001 bp, Klebsiella pneumoniae; identical to SEQ ID NO: 136894

SEQ ID NO: 243433 - DNA, 219 bp, Klebsiella pneumoniae; identical to SEQ ID NO: 139472

SEQ ID NO: 243434 - DNA, 291 bp, Klebsiella pneumoniae; identical to SEQ ID NO: 139383

SEQ ID NO: 243435 - DNA, 123 bp, Klebsiella pneumoniae; identical to SEQ ID NO: 139687

SEQ ID NO: 243436 - DNA, 123 bp, Klebsiella pneumoniae; identical to SEQ ID NO: 139695

SEQ ID NO: 243437 - DNA, 1455 bp, Klebsiella pneumoniae; identical to SEQ ID NO: 227913

SEQ ID NO: 243438 - DNA, 3711 bp, Klebsiella pneumoniae; identical to SEQ ID NO: 235899

SEQ ID NO: 243439 - DNA, 777 bp, Klebsiella pneumoniae; identical to SEQ ID NO: 121845

SEQ ID NO: 243440 - DNA, 1503 bp, Klebsiella pneumoniae
  misc_feature (1487)..(1496): n is a, c, g, or t
atggtatccccgcgctggcatattattactggtggttttggaggcttaggtcgaattacagcaagttggttagtaaggcaaggtgctaaacgtatcgctattttggcaccacgagctgatagcagcgcattagattggatgaataacttacagaaatctaaccagctagaaataaaatggctaacatgtgattgtcgtgataacgctcaatgtcatgcagcactcactcagcttgaaaatgaaggtggcattgaggggcttatacacagtgcaggtattttggatgatgcacttatgacacaactcacccctaagcgtatgtctgacgtattttctgttaaagcgatatctgccaagcaattttgtgatgctttagaaaaaacagatgccagttaccttattttatactcctctgccgctgcaactataggctctgaaggacaagcagctcattccctcgcttgtggatatttagatggattagctgaatatgcacgtcgcaatatcaagggattaaccgtcatttctatcgcttggggggcatggcaaagtgttggctttgtggcagaaaaacaactccatgataaattacaacacaaaggtatgagtacgcttactactgaggaaggactggcacatttagatgcttgtctgctagataatacctcttgtcgccttgcaatgcgtttagcgactccacctttaatgacacaaaaaacgcctttatttcatcagactaatcataatgatcattatgataaccatgaaattaatcacactcgccagctttgtgaaaccccaactcaaacggatcaaacagagccggtaagccctaacagggttgattatcgcgttggtgataacttagaacagtggctaacagcatgcatcaaacaactgttgcgtcttggtgatgaacatattgatactcacattgaactattccaattaggactagattctctctctttcctcgatctcagtgcggaaattaagaaacagtttgcggtcaatattgacgctgaacaatcttatgatgatatgactattgctggtttagcctcagttattcgaaccgcagcacctgagaaatttactgtgacagaagcactccataatcaagacaacatttcccacacaatggagtcagaacgatatgccccatttccattaacaccaattcaacacgcctattggatcggacgtaaaaacctctttaactacggaggcgttgcttgccatgcaatttttgaatgggattgtcaacgccatatatgggagccggcctcacttgaaaaagcttggaataaagttattcagcgtcatgatatgttgagaatgatcatagatgatgatggacaacaacgtatcttaaaagaagttccttattttcattttattcaacatgacctaacaaatttaacccaacaagagcaacaagagagcctaacacagataagggaagccctttcttatcgggtattacnnnnnnnnnncgactga

SEQ ID NO: 243441 - DNA, 210 bp, Klebsiella pneumoniae; identical to SEQ ID NO: 226503

SEQ ID NO: 243442 - DNA, 612 bp, Klebsiella pneumoniae; identical to SEQ ID NO: 239127

SEQ ID NO: 243443 - DNA, 480 bp, Klebsiella pneumoniae
atggcaaaaatacagcgcagactttggcaacatttaagtaagtcccaagtaaatggtgtagagattttacgtgaatggggacgctataaaggggatagtagccaatctctgttacctattgtatttactagcatgttaggtatgacactagatggtgacaatattgatgaagcattaaatcagcttttcggccaacccgtatatagcttcgcgcaaacacctcaagtttggttagatcaccaagtaatggaaggaaaagaggggctaacattaaattggttctgcatggatgacatctttgctgacggtttattaacaatgatgttctctgattatcaaagcttgatcactcaattatgccaagatgaagataataatcaatcagttgataagattattgcgcaacttccttcatatcaacatttagcaatagataatcacctccaatcaagtagagcctcctctacaattactgtttga

SEQ ID NO: 243444 - DNA, 423 bp, Klebsiella pneumoniae
atgaaactttcggtaattaattttataattatgcatcgtaactcgattggattggtattgtgtctatgcctaatacttacgggggttatttcaattatttacgatcgcatttcgaaaaataaattcattactctctgttcgctatttgttgaaaaatttggcgcaagaccagtagaggctttaatttatcaggatggggggttctttttctcgtttatgcgtgatgcattttttattaaagcattatactttaaagaaaactcatttcatacgcgaggaatggataatgaacaaattcgattcattaaagaacttcctaatcagtataccgattggttacgtgtaaaagtacgattttccgtggtcggtattatttttctattcatgatgttatcagttttctatttaccatcattcatttaa

SEQ ID NO: 243445 - DNA, 201 bp, Klebsiella pneumoniae
atgggtgtgctgtacgtgaggatggggcctgggcgttatgtcaatacccaggcagaagataagcagattgtttacttatttaattccggtatgaagacttggacgataggtccaactacagaagagagatcagatactggcgctaaagggaccctcacgtcatccactgaaagatacccattaccatcaccaccgatatga

SEQ ID NO: 243446 - DNA, 354 bp, Klebsiella pneumoniae
atgcaggcgatacacgccagggcgaaaaacgatttcgccaccatatggcaacttgcttacctggttgactgcggtctgcagctgcagggagacggattcgttaccgttccagtcaataccaaagtccagccaggcatcaaaaatcgctttcgccttatacagtgtgttaacgcgctttttcagcgagttaaaatgctcctccagcgatttcccaccaagccccttcagataataacttccatcctcatcagtaaattcaagcgcccggttctgtgcatccgtcaggcggcgaatctgtggcgcaccgtcacgctggtagttctccctgatcccctttatcgactcctgaactga

SEQ ID NO: 243447 - DNA, 354 bp, Klebsiella pneumoniae
atgcaggcgatacacgccagggcgaaaaacgatttcgccaccatatggcaacttgcttacctggttgactgcggtctgcagctgcagggagacggattcgttaccgttccagtcaataccaaagtccagccaggcatcaaaaatcgctttcgccttatacagtgtgttaacgcgctttttcagcgagttaaaatgctcctccagcgattttccaccaagccccttcagataataacttccatcttcatcagtaaattcaagcgcccggttctgtgcatccgtcaggcggcgaatctgtggcgcaccgtcacgctggtagttctccctgatcccctttatcgactcctgaactga

SEQ ID NO: 243448 - DNA, 1356 bp, Klebsiella pneumoniae
atgacacaaatactgggaaccggagagggaaaaacatcatcagccgcaaaagagccggttgttgaacgtaaacccgcacaggtgttttttgaatcaatggcgctggctgcctcaatgagtggttattatgcagggccaacagccacaacgctgggaaattcgctttcattgggggcggggactgcggcaggtgtcggagaaggcgtcgcgggcgcacgggtgctggctgcgcctaatcccctcaccgttgctctgctggctatcttctattctccgtcactgaatgaaggtgagacggaaacgctacaaaatatacgtggcgaccagctctatcagaatctgatccatggccagatgatggtgggcgcttttacccgtgtaaattcaacggtcattgagggggattatgtcccggaatatgaactccgggaaatagcccgacaaaacggcacagtgcgcacgagggtacgctttcgtattgaagaagatcctgagtcaggggaactggtttcccgcagctatgaggtgggggaaaaaagcgggttggatcgggtccgggtgcggtttgcaaaacagctggataaagagacatggggttttgaagatccttcaattaaaggcacatttgtctggtcccggtctgccgggcagggaaaatttgagtggggttccagccagacgactgttcatgacgggagcgctggcggctctaccacaccgcctacacccattccggaaccgcggagcatctgggggttgcctaacccggccccggcatcgttaccgcccgtaccgggaacgccgatcccggaggaacagggaccaaatattgaaacattgcccatcgaagaccgggatttcaatgactttattattgttgacccgatgggggttgtcccggcaatctatgtgtattttaagaaagcccctgtggaagagtatgaggttgactattatgaaaattttgaaggccgttcaaggcagggaaaatatcaagtcgatcatattccatctagagatgcggttcgtgtatatttagaggatttatatcctgatgagggaagtaaatatatagataagatggttgataaggttgcttcagttgctattccaatagctgttcatcaaaaatgtagtgaaacctatggcgggcgtaataatcgtaaggtagagacagaatgcggcgagatgataactaaaaaagagctagatgctcgtgacttagaagctgccgtcaatgccaactgggatgcgaatgctgaatgccttaagaatgaatatggtatgagtaacgagaaaatcgaagagatcagagcaaaactacataagttaaaccgaaatgtggggttatattaa

SEQ ID NO: 243449 - DNA, 588 bp, Klebsiella pneumoniae
atgactcgtctggccgttgagcttacgttgctaattttcatccggtctagtgagctgcgctttgctcgatggtcagagatcgattttgaaacagcaatgtggatgataccggcggaacgagaaattatcgaaggggtaaagcattcacagcgtggctcgaaaatgcgtacaccacatttggtgcccttatctcggcaggcactgggcatcctcaaacaggttcacaagctcagtggaaatcgagattttgttttcgttggcgatcataaccctcgtaagcccatgagtgaaaacacggttaacaaggcgctacgggttatgggatatgacactaaggttgaggtttgtggacatggcttcagaactatggcgtgtagctcgctaattgaatctggattgtggtcaagagatgcggttgaacggcagatgagccatatggaacgtaactctgtgcgggcggcttatattcataaggcagaacatttggatgagcgacgattgatgttgcaatggtgggcggattatctggatgtgaatcgggagaaggggattagtccgtttgattatgggcataggcatcatacataa

SEQ ID NO: 243450 - DNA, 492 bp, Klebsiella pneumoniae; identical to SEQ ID NO: 142394

SEQ ID NO: 243451 - DNA, 651 bp, Klebsiella pneumoniae
atgtcgactgtagtcgctggtagtgtcaacgctggcgtgttaacggggtcggtggaggggaatcattctcaacgctggcgggtaaacggatccgctaccggtgctcatcctcaacgctggcgggcaaacagggccgctgccggtgctcatcctcaacgctggcgggtaaacgtggccgctgacggtagctatcctcaacgctggcgggtatgcgtggccgctgacggtggctatcctcaacgctggcgggtaagcggggccgctgcaggtgctcatcctcaacgctggcgggcaaacggggccgctgacggtggctatcctcaacgctggcgggtaagaggggccgctgccggtgctcatcctcaacgctggcgggcaaacggggccgctgacggtggctatcctcaacgctggcgggtaaacgtggccgctgacggtggctatcctcaacgctggcgggtaagcggggccgctgccggtagtcatcctcaacgctggcgggtaaacgggaccgctgccggtagtcatcctcaacgctggcgggtaagcggggccgctgccggtgctcatcctcaacgctggcgggcaaacggggctgctgcaggtgctcatcctcaacgctggcgggtaaacagggtgctgctggtgtaa

SEQ ID NO: 243452 - DNA, 1398 bp, Klebsiella pneumoniae
atgcttacttttactcacagggctagagcaaatgctaatgcctctttaatatcgatggtgcaacggttttctgatattacaatattatttgtaagcttatatatcgtttgcgcatacaatgaattaacatttgattataaatatagtttgttggctttggctgtattggttgtttttcaaatgatcggtgggattacagatttttacagatcgtggcgcggagtgaaaatatcagcggaattaatactgataatcaagaactggactttgagtttacttttcacagttggtttgttttcttttgtacctgattttatttacccttttaaaatatttctggaatggtatttgttggttacttttggatttgtgttatgtcgaacaggtatacgtttaagcgctggccttctaaggaagttaggatataacactcgagttgtagccgtagcaggttcaactccagctggtgttggattgttaaagggatttattgaagagccttggttaggttttgtcgtgaagggtatttatgatgacactgttcgagagcatactgatgaaataccttattgcggtgattttgaaaagctaatttctgatgccaaagatgggaaaattgatcgtgtttatatagccctgaatatgaaagatgaagctattattaaggcagttgttagtcaattaactgatacaacttgttctgtccttcttattcctgatatatttacatttaatatactgcagtcacgcacggaagagattaatggtgttcctgtcgttccattgtttgacacacccttaaatggtataaatatgatattcaaaaggttagaggatattatagtttcattaattattctaaccgtgatttcacctgttttattattgatcgcatgcgttgtaaagtttacttcccctggccctgttatttttcgtcaaattagatatggtatggatggcaaacctataagggtttggaagtttagaacaatgaaggtaatggaaaatgatgataaagtaattcaagctaaaaaagatgatgtcagagttacaagggttggtaaatttcttcgtagcacatcacttgatgaattaccgcaatttttcaatgtgttattcggacaaatgtcagttgttggtccgcgtcctcatgctgtcgctcataatgaacaatacagatcccttattcaaggatatatgttgagacacaaggttaagcccggaattacaggtctcgctcaaatcaatggttggcgcggtgaaaccgatacgctcgaaaaaatggaaaagcggattgaatatgacctgttatacataagaggatggagtgtttggcttgacttgaaaataatatttctcacgatctttaaaggttttgtcaataagtctgcgtattag

SEQ ID NO: 243453 - DNA, 1761 bp, Klebsiella pneumoniae
gtgcgggcgatagctgacggtaccgtcgtttcactccgcaaaagctcagacaagcgcgatctagcaccattcaacatcaacgccgataaatccaatacaaaggggagtaatgatggttatgtgctcataaagcatgaaaccgagatcggtagcggtgatgaaggaaaagtggctttctattccttatacatgcatctgaagtcgctggctgaaactgttaaagccggtgataaagtttaccgtaaggatcctataggccttccaggcatggttgatggagtgaatgctttccatttccagattttctgcgatgatgacaacatcagcaagctaacgggcaggaaaacaggagagctggatatttcgaagaatggccgcaccgatgcggtttatggtgatattcacttttatctgccaccgcagacaaagttttatgacaaggctccagcagataacagcatttctaccaccggactttctgaactatataccagcaatgtgcctctgtatgccagcatgactctggcccaaggcaagtgcacgatggttactcgtcagaaaaatacgcagactgacggaaaatatgatctgctgggtgaaccactggttaatgcagatggtgatgactacgaatacaatctctataaaaccgcgatgcggaattataaggagagcccaagtgccgggtttgaattacttcgctttgggcgagtgatcaacacggaccatgaaacactggtaccggcagacgcaccattatggatgacagtcaattacccgggtggtaaaggggtgatcaaccttgctgattccagtattaaaaagtttagtgacgctgatttccctcactggacgggctggcagatggtagatgacgatagtgatagcaacagccagtgtaattcagctattatcaagaaacttcacgaagttggtgacttcgataaccagtgcgggaagctaatctgtcatttcccatttgaatgggaaaaaagtacgatcgacatccgtttttcgtggctgaaaacgggaaatgaagagcatgaaccgatgacggaaaccgattatgcaaagtttaaatcccatgcggaagcactatgctttgattctggagcgttgagttctgaccggttgtggcattttgagccaaaatcatttattcgacatttcaggaaatgtagttggctcgactctgaagtaattgaaaaagtaatgacggcgaatgctagtaaaaaaaataaaaatgcacttgaaggtattaaaaatattacattagagtactatgcggacataaatacaatcatgcgaaagtataacttatctgatgcaaatagaatttgtcattttttagggcagggtgcagttgaatcaggttatttattgtccatgcaagaaactagccagcaacaaattattgttgatggtgttcagcaaggtggtgtgattgttgaagcatcaacatttaatgaaactactaagttaggtcattggtacggagctcttaaagccgagaaggataactatttctccgggaaaaaatacaattcccgtggagggtatatcacaggatcctatagctggattaacggtaactgtggagatgtagatgcacaaaaattcagaggtagagggtttaaaatgctaactggacttaacacatattcaagctactgggtatatcgaggttggttgtcaaaaaatgactttgataaatattggtgggatgacccggagtacaagaaaaaaattcagccggtatga

SEQ ID NO: 243454 - DNA, 261 bp, Klebsiella pneumoniae
atgaagaaaaaaccaccaaaaataggaaaccctcagaaagtgacagaaaatgcatataactgtattgatacaggtggtttttttatagtttgttttaagtctaaagttctcaaaattatggatgaggacaaaattgggaaatctgatgatgacagcattattttgaaagtaactaaaaatataaatggtgcagataaaggaattgcagaaaggaaaatagctactaaaaaagcaaaagagatgattgatgatgaagtttaa

SEQ ID NO: 243455 - DNA, 444 bp, Klebsiella pneumoniae; identical to SEQ ID NO: 23265

SEQ ID NO: 243456 - DNA, 972 bp, Klebsiella pneumoniae
ttgttttctgtgctttcctcgcctgcgaaaaagatgtacacacttggtgaaatggcatcagggcaagcatattctaaaaataagcgtgaaaatgtttgttattttgagacaaaggcgcagacaaaaccggttaatgataagggtgaggataatatacatactgtgcagattacctgtcagaaaagagcgtttattgcaaaagagtatcctgtaggtagtcctgatgatcccttcgataaaaataagatagaacatcagatcctttcgaggatgaatcgcagtagttatccaaatcaaggggatactagtttgtgtgggccagcatcatttttttattgcctgttaatggatagacctgatatttataaacaagcagttaatgagctttggttgtatgggaaaactaaaataggtgcgttaaatatagttccaagcaatagttgtcggcatcctatgggggctttctatgatgcttatggagaacgagtgaaggggatcgattggataaccctcgcttctttaagggactccgaaaattccattatgagttatgacgaaattgatgaccaggcttcagggataacattatggggagcgcttactgaatggtttgtaagtgctggttatcaaaaagagtttagtaatgtcgggctatcgcacgtaaatctgaaagaactaagtaccctcaatgagtatattagaaaaggttgtcgagttgttactttgatatcagctggtatacttgatggatttgactccactgtcacggctaagaatcattggattgtttgggatggacctataaccacacagtatggtgaggtcatttcattaacgactaaggaaaatgagttagttcaattgaaattattctcttggggtaaggtaaaaaatcagattaagaggcatcttgctctttcagatgtaatgggaagcatttttggaggggtggtgtttaaatcactagaatag

SEQ ID NO: 243457 - DNA, 273 bp, Klebsiella pneumoniae
atgaaagaacgaaaactcgtaattgaaattgatgacaacgccattgattcagtcatcgaaaaggtgcgcctgctcaaagaagaactgagaagccttaacctgccgatcaacatctctgttgcagtgccggcagcattaaagccggaagaggaaaggaacacgcaggatgccagaagcgtattccttagcaaccttgatgccgaaattactcaggcttggtcatcattgacagagcttttgaatatacgtcgcgacgcgacctcctccgactag

SEQ ID NO: 243458 - DNA, 201 bp, Klebsiella pneumoniae
atgtctaatgccgctatgaagttaaatgaaacatcttctgatgcttatgaaaaattagaagctcttctttccccggatgttataaagttaaaacattatgtggataaaggtgagtatcttttagttctagcaaaggacctttttggtattccagaaatggatccaaagatggctgtgcctgttttcaaaactaaaacctag

SEQ ID NO: 243459 - DNA, 141 bp, Klebsiella pneumoniae; identical to SEQ ID NO: 219317

SEQ ID NO: 243460 - DNA, 435 bp, Klebsiella pneumoniae
atgaaaaagatccttgtatcctttattgccatgatggctgtcgcttcatctgcctgggctgcagagacaatgaacatgcatgaccaggtaaataatgcccaggcacccgcccatcagatgcagtcaacctctgaaaaaagcgctgttcagggagacagtatgacaatgatggatatgagcggacacgatcaggctgcaatgtcccatgaaatgatgcaaaacggcaattctgctgcccatcaggacatggctgaaatgcataaaaaaatgatgaaaggcaaaccaggggccaccaacgaatcagcaacgtcattttcagaaatgaacgagcatgaaaaagccgctgttgtgcacgagaaggcgaataatggtcagtcttccgttattcatcagcagcaggctgaaaagcatcgcagccagatcacccagaattaa

SEQ ID NO: 243461 - DNA, 198 bp, Klebsiella pneumoniae
atgcattttaccctgatatatataaataagctcgataaagccatgagaatgcaacggaattttagtaaatcgggtctgcttttcaatatgaatgtagttgtctttgaaaaaccttcgctccatatggcttttgaatttatgacacacttgatagttagcgcgaagcagttcgagttctctatcggcataagccagtag

SEQ ID NO: 243462 - DNA, 1878 bp, Klebsiella pneumoniae
atgattgccttggctgttttccctgaggtagcaacgcttattacggatgtatcttctcatgtgaatagtgcggtgtataagttgcttaataatgcaactgagccactttggtggtctttgtctcaggatttccataatcttgcagaagcagccccaacggtatttctagacgctgtagaagctgggttggaaggcgattcacctcagattttgtcattattccgaagtgatgaagggataatgcaacccacagagtatctttcaaatttgttatgggcattagagatgttagcgcgtagcccacgttatctaatgcaatctgcacttttactggcttggttagatgatgttgatcccggaggtcgatggggaaaccgtccagcagtttctttaaggcggatttttgttagttggtcaccacaaacttatgctaattcatcacaacgtattaaggtcattgatcggatcatatcgctgcatccaattgctggttggaagttattgctcgcattagcacctcgttcacacgatacttcagaaccttcttctatgccaaattggcgtgatttcactcctaatgagccggagtctattacctggtcctctgttgcaacagcagcatgtgaaatcggtgaaagattattaatgcatataaatgggaggtgcgaacggtggtttgaacttttccatctttgggggaattttgattcaaactggaaattttcagcagctaagcaattagcagattactcccttaacctcacatcttctgataaaaaagaaaggttgtggaatgagttacggcattttttacagagaaaccgtggcttcaaagatgcgccatgggctctgtctgaagaagaattagcaccgttggatgctatatttctttcactaacaccagaaaatgtcgaggaacgttttcgctggctattttgtgcaggggccaatgagttaggcgaaaattatgattggcaaacacaacgaaatagactcgaagagagacaattggaagcagtagagttcttacttgcagaacttgaatttgaacaaatatttcatttctcttcaacaattacgctgcactacgattttggtcttgctttagcgcgatcctcaacaaagtgtgggcataaacattttctaatgaaaaaagcgctaatgtctagtgattcagatatagcaaatattggtttgggaattttttatggactcaaagccacgaaaggctcagaaagcgaaacttgggttcaagaaatatgggaacaagctataactgataattggggggagttagcggaagtacgcattgcccaagtattaccacctgtaatgtcactttggctgaaaatagaatcgagaccagttaatattagtacaatatattggcagacgatccctacatttaggctttctgcagatttagagcttgagtatgtcattgatcatttacttctggcagaccgaagtcacgatgctcttgcgtggcttgctaataatataaaaatagaaccagagggctcagttattattagagtaatgcataccgctgcaagcactaaagactcttccaataatgataatacgatgtcgagctattatattggtattctcctagattacctggagagtgatgtaaagacttcaaaagaagaacttgtgaggctcgaatggatttattttcaagttttacggtattcacgacatccagccaggaacttacatcaggctcttgctaaagaccctgtattttttacctcactaatgaaattactctccaaagattaccagagcgaattaatggaccaccaaaagtggatgctaacggtgccaagatttcttctacctgctcataagagcaaccagctaaatcactaa

SEQ ID NO: 243463 - DNA, 618 bp, Klebsiella pneumoniae; identical to SEQ ID NO: 243421

SEQ ID NO: 243464 - DNA, 2292 bp, Klebsiella pneumoniae
gtggttcaggggtatgccggggtggggaaaaccacccagttccgggcagtcatgagtgccatcagtctgctgccggaagagacccgcccgcgcgtcatcggtctggcgccgacgcatcgcgcggtcggggaaatgcagagtgccggcgtggatgcgcgcacgacggcgtcgttcctccacgacacgcagctgctgcagcgcaatgggcagacacccgatttcagcaacaccctgttcctgctcgacgagagctcgatggtggggctggccgatatggcaaaagcccactccctcatcgccgccggcggtggacgggcggtgcccagcggggataccgaccagctgccgcccatcgcgtcgggccagccgttcaggctgacgcagcagcgcagcgccgccgacgttgccatcatgaaagagattgtgcgccaggtacctgagctgcgaccggcggtctacagcctgattgagcgggatgtgcaccgcgccctgaccaccatcgagcaggtcacgccggagcaggtgccgagaaaagaaggcgcatgggcgccgggcagttctgtggtggaattcacgccaaagcaggaaaaggagatagaaaaggcactgagcgaggggaaaaccctgccggaaggtcagcccgcgacgctctacgaggcgctggtgaaggactataccggacggaccccggaggcacagtcgcagacgctggtgatcacccatctgaataaggaccggcgggcgctgaacagtctgatccatgacgcacggcgggagaacggggaaaccggcaaagaggaaatcaccctgccggtgctggtcacgagtaacatccgtgacggtgaactgcgcaaactgtcgacctggacggctcacaaggaggcggtggcgctggttgataacgtataccaccgtatcagcaaagtggataaggataatcagctgatcaccctgacagacagtgaaggaaaggagcgatttatctcaccccgggaggcatcggcagaaggcgtcacgctctatcgtcaggaaaagatcaccgtgtctcagggggaccgaatgcgcttcagcaaaagtgacccggagcgcggctatgtggccaacagtatctgggaagtgcagtctgtttcgggtgacagtgtcacgctgtctgatggcaaaatcacccgtacgctgaccccgaaggcggagcaggcacagcagcatatcgacctcgcctacgccatcaccgcccacggtgcccagggggccagcgaaccgtatgccatcgcgctggaaggggtggccggtggccgggaacagatggccagctttgagtctgcctatgtggctttatcccgcatgaaacagcatgttcaggtctacaccgacaaccgtgagggctggataaaggccatcaggcattcacctgagaaagcgacggcgcacgatattctggaaccccgtaacgaccgggcggtgaaaacagccgatctgctgttcgggcgggcaaggccactggatgaaaccgccgcgggccgggcagccctgcagcagtccggtctggcacagggaagttcaccaggaaaattcatttctccggggaaaaagtaccctcagccgcatgtggcgctgccggcatttgataaaaacgggaaagccgccggtatctggctcagcccgctgaccgatcgggacggacggctggaggctatcggcggagagggacgaattatgggcaatgaagacgcccggttcgtggcgctgcagaacagccgcaacggagaaagcctgctggccgggaatatgggggagggcgtcagaatggcccgcgacaatcccgatacgggggtggtggtgcggctggccggtgatgaccgcccctggaaccccggggccatgaccggtgggcgggtatgggctgaaccggcgccggtggctccggtaccgcaggccggggctgacattatcctcccgccagaggtactggcacagcgggcggcagaagaacagcagcgccgggaaatggaaaaacaggcggaacagactgcccgggaagtggccggggaggcgcgtaaagccggcgagccggcggaccgggtgaaagaggttatcggggacgtcattcgcggactggagcgtgaccggccgggtacggagaaaacgacgctaccggatgatcctcagttccggcgccaggaggaggcgattcagcaggtggcctcagaacgtctgcagcgtgagcgtctgcaggctgtggagcgggacatggttcgtgaccttaaccgcgagaaaaccctcgggggcgactga

SEQ ID NO: 243465 - DNA, 276 bp, Klebsiella pneumoniae; identical to SEQ ID NO: 139610

SEQ ID NO: 243466 - DNA, 255 bp, Klebsiella pneumoniae
atgtcgtacagcctgtggcgggacaggcaggttaacgcatttatgacaaccaaccgggcctgggggatccagtgcgacactgtttctcaggccgcgtgggtgatcagggacggggagcgggtggaccttcagataaatcatctgcctctgtactgcagcggttaccgctttgaagcccgtgatgatgcaggaaagatacagcgccagctcgataaatacagtgtctatcagcatctgtcacgccagtcgcaataa

SEQ ID NO: 243467 - DNA, 249 bp, Klebsiella pneumoniae
atggtagctcgtcacccgggttacgcactctttcccgtcgcgccccaggcggccaattttcagatgaccggcggtgacctgcatatcaaagctgtcatcgacacactgatagttcagatcctgataggggtccagcttatacggtacgcggtacatctcgtgcgggtccgggtttatcagctcgcgcatcagttcgaccagcccggcagcatcaaggatacgcgtcggaatataggcaccgcccagtga

SEQ ID NO: 243468 - DNA, 123 bp, Klebsiella pneumoniae; identical to SEQ ID NO: 139687

SEQ ID NO: 243469 - DNA, 123 bp, Klebsiella pneumoniae; identical to SEQ ID NO: 139695

SEQ ID NO: 243470 - DNA, 2520 bp, Klebsiella pneumoniae
atgagcagtaaccccccgatcagattcagccacaaccaccacctgctttcggtgaagggatgtgaagccgggcttgatgtgctggccttcgagggcgatgaagccctgagccagccgttccgctaccgtattgaattcaccagcgcagaccatgccatcagcaaagagatgatgctgatgaaggctgcctccctgacgctgcaggcgccggtggctcagggcttcggcatcaatgttcagcaacccgtgcgggtgatccagggcgtggtgacggggtttgaacggctcagtacctccagggatgaaacgcactacgcgctgacgcttcagccgcgcctggcgctgcttaatcgctcgcaccagaacgccatttatcaggaccagtccgttccgcagattgtggaaaaaatcctccgcgagcgccacggcctgcgcggtcaggattttctgttctcactgacaaaaacgtatccgcgacgcgagcaggtgatgcagtacggcgaggatgacctgcgctttatcacccgtctgctgggtgaggtggggatctggtttcgctttaccgccgacacgcggctgcacatcgacgtcgctgagttctgcgacagtcagcagggctatgagaaggggctgacgttgccttcggtcccgccgtcagggcagcagtcggccggggtggacgcggtgtgggagatggcatgccgccaccgcgtcgtggagcagcaggtcagtacccgcgactacaactaccgcgaggcgacggcggacatgaacgcgcaggtggatgtcacccgcggggagaccaccacctttggtgaggcttaccactggggagataactacctgaccgcggggaatgtccatgaccgccatccggcgccggagtccggggcgttttccgcccggcttcgccatgagcgttatcttaacggccagacccggatgcaggccaccaccagctgcccgacgctctgcccgggacaggtgctgaaggtcaccggcggagaggaggtggccggagagtttgctgatggcgtgcttatcacggcgatgcacagccacgcccggcgcgatgcggattttgcggtggagtttgccggcataccggacagcccggacgtcggctaccggcctgagcccggcgcgcgtccggtgatggccgggacgctgccggcccgcgtgaccagcacccgggaaaacgacacctacgggcatatcgacaaacacggacgctaccgggtgaatatgctgtttgaccgggcgcgctgggaaaccgggttcgagagcctgtgggtccgccagtcgcggccgtatgccggagacacctacggcctgcacctgccgctgctggcggggacggaggtggcgattggctttgaggatggtaaccccgaccggccgtatatcgcgggcgtgctgcacgactcggcgcacggcgaccacgtcaccattcgcaatgacaaacgtaacgtcctgcgcaccccggccaacaacaaaatccgcctcgacgatgagcgcgggaaagaacatatcaaggtcagcacggagtacggcggtaaaagccagctcaatctcgggcatctggtggatgctgaaaagcagccgcgcggcgaaggctttgagctgagaaccgacagttggggcgctatccgggcacagaagggtatttttatcagcgcggacggacaggcgcaggctcaggggcaggtgctggcgatggagccggcggtcagcaatctggccgaagcccgggagcagatgatgtccatctccggtgacgcgcagaaggcgaccgcgaacccggccgatctccaggcgcaaattaccctgctggagcagcagctgacggacctcaaaaaatcggtactgctggtcagcgcgccggaggggatagcgctgaccagcggggagcatctgcaggtctcagccgggcataacctgattgccacagccggaaagaatgcagacgtcagcgtggtgaaaaatctgttcatcggggtgggcagtgcgctgagcgtgtttgtgcgaaagcttgggatcaggctgatagcgaaccagggaccggtacagatgcaggcgcagaatgacctgatggcgttgcttgcccggaaggaaatcagcattgtcagcacggaagacagtatcgaaattattgcgaaaaaacgggtcacgataaacggcgggggaagttatatcacgctcaatgccagtggcattgaatcagcgacggcaggtgagtacagaacaagggccgggtattacgtcaggcgggaaaaagcgcagcataagcctgacattgcacctttagctaatgcgataaatgacggcagccataatattcgctacctgtgtacagatgataatggggtgccgatgatgaatactccttacagggcctttctggctgatggctcggtattagagggtgtcagtgatggcgaggggtatacgaagttgtttacttctgcacagatacaggatgttctgctgcatatgataccggaggccatcaatgcctaa

SEQ ID NO: 243471 - DNA, 8691 bp, Klebsiella pneumoniae
gtggtgctgcgtcgcctgagagacgcgctgctgtcaggcgatccgattatctcggtgatcctctccagcgcggtcaacaacgacggcaacagaaaggtcggctataccgccccttccgtcgcagggcaacaggcagtcatcgaagaggcgttaatgctggcggccatcgacgacaggcaggtaggttacattgaaacccacggcaccggcacaccgctgggcgacgcgattgaaattgaagcgttacgcaacgtctatgcgcctcgcccgcaggatcagcgctgtgcgctcggttccgtgaaaagtaacatgggccatctggataccgcggcgggcattgccggactgctgaaaaccgttctggcagtcagtcgcgggcaaattcctcccttactgaattttcacacccccaacccggcgctgaaacttgaagagagcccctttaccataccggtgtcggcacaggcatggcaggacgaaatgcgctatgcgggcgtctcctcctttggtattggcggcaccaactgccatatgatcgtcgcctcgctgcccgacgcgctcaacgcgcgcctccccaatacggatagcggcagaaaaagtaccgcgctgctgctcagcgccgccagcgacagcgcgttgcggcggctggcgacggattatgccggggcgctgagagagaatgcggatgccagctctctggccttcacagccctgcacgcgcgccgtctcgatctccccttccgcctggcggcgccattaaaccgtgaaaccgccgaggcgctcagcgcctgggccggtgagaaatcgggggcgctggtttacagcggccacggcgccagcggcaagcaggtgtggctgtttaccggccagggctcgcactggcgcactatgggtcaaacgatgtaccagcactcaacggcgtttgccgacacgctggatcgctgtttttccgcctgtagcgaaatgctcacgccgtcactgcgcgaagcgatgtttaaccccgattcggcgcaactggacaatatggcctgggcgcagccggcgattgtcgcgtttgaaatcgcgatggcggcgcactggcgtgctgaaggactgaagccagacttcgccattgggcattccgtcggtgaatttgccgctgctgttgtctgcggacactatacgattgaacaggtcatgccactggtttgtcggcgcggcgcgctaatgcagcagtgcgcaagcggcgcgatggtggcggtatttgcagacgaagacacgctgatgccgctggctcgccagtttgagctggatctcgccgccaataacggtacgcaacatacggtattttccgggccggaagcccgtctcgcagtattttgcgccacgctctcgcagcatgacattaactatcgtcgcctgagcgtaaccggtgcggcgcactccgctttactggagccgatactcgatcggttccaggacgcctgcgcgggactgcacgcggagccggggcaaataccgattatttccacgctcaccgccgacgtcattgatgagtcaacgctcaaccaggcggattactggcgccgacacatgcgccagccggtgcgttttatccagagtattcaggtggcgcatcagctcggcgcccgcgtttttctggagatggggcccgatgcccagttggttgcttgcgggcagcgcgaataccgcgataacgcatactggatagccagcgcccggcgtaacaaagaggcgagcgatgtcctcaatcaggccctgctccagctttacgctgccggcgtcgccctaccgtgggccgacctgctggcgggcgatggacaacgtatcgctgcgccatgttatccgtttgatactgagcgttactggaaagagcgcgtctccccggcctgcgagcctgccgacgcagcgctgtctgccgggctggaggtggcgagtcgcgccgcgacagcgctcgatctccctcgcctggaagcgcttaaacagtgcgccacgcgactgcacgccatctacgtcgatcaactggtacaacgctgtaccggcgatgccattgagaacggcgtggacgccatgaccatcatgcgccgtggacgtctgctgccccgctaccagcagctactccagcgcctgctgaataactgcgtggtcgacggcgattaccgctgcaccgacgggcgatacgtccgcgcccgccccattgaacatcaacagcgggaatcactgctgacggaacttgccggttattgtgaaggttttcaggctattcccgacaccatcgcccgtgccggcgatcggttatatgaaatgatgagcggcgcggaagaaccggtggcgattatcttcccgcaaagcgcctccgacggcgtggaagtgctgtatcaggaattcagctttggccgctatttcaaccaaatcgccgccggggtattacgcggcattgtccagacgcgtcagccccgccagccgttgcgtattcttgaagttggcggcggaaccggcggcaccaccgcgtggctgctgccggaactcaacggcgttccggcactggagtaccatttcaccgatatctcggcgctgttcacccgtcgcgcccagcagaaattcgccgactatgattttgtgaagtatagcgagctggatctcgaaaaagaggcgcagtctcagggtttccaggcacagtcttacgatcttatcgtggcagcgaacgtgattcacgccacccgccatattggccgcacgctcgataatctgcgccccctgctcaagccgggcgggcgcctgctgatgcgcgaaatcacccagccaatgcgtctgtttgacttcgttttcggcccgctggttcttccgctacaggatctcgacgcccgcgaaggtgagttattcctcaccaccgctcagtggcaacaacagtgccgccacgccggattcagcaaagtggcgtggctaccgcaggatggcagcccgaccgccgggatgagcgaacatatcattctcgccacgctgcccggtcaggcggttagcgccgtaacattcaccgcgccatcagaacccgtgttggggcaggcgctgacggataacggtgattatctcgccgactggtctgattgcgcaggtcagcccgaacggtttaacgcccgctggcaggaggcctggcgtctgctttcacagcgtcatggcgacgctctgcctgtggaaccgccccccgtcgccgccccggagtggctggggaaggttcgcttaagctggcaaaacgaagccttttcccgcggtcagatgcgcgttgaagcccgtcatcctgctggcgagtggctgccgctatcgcccgccgcgcctcttcctgcgccgcagacgcattatcaatggcgctggacgcccctcaacgtcgccagcattgaccaaccgcttacctttagcttcagcgccggtacgcttgcgcgcagcgacgagctggcgcaatacggcatcattcacgatccgcacgcatcttcgcgactgatgattgttgaggagagcgaggatacgctggccttagcggagaaagtgatagcagcgctcaccgccagcgcagccggattgattgtggttactcgccgcgcgtggcgagtcgaggaaaatgaagcactctctgcatcccatcacgcgctatgggccttgcttcgcgtcgcggccaacgaacagccggaacggttgcttgccgccatcgatctcgccgaaaaccccccgtgggaaacgctgcatcaagggttgagcgcagtctcactatcacagcgctggctcgccgcacggggtgacaccctttggctcccttcactggcgcccaatacgggatgcgccgctgaattaccggcaaacgtgtttaccggcgatagccgctggcatctggtgaccggagcgtttggcggattaggccgccttgccgtgaactggctcagagaaaaaggggcgcgacgcatcgccctgctggcgccgcgcgtggatgagtcatggctacgcgatgcggagggcgggcagacgcgcgtctgccgttgtgatgtgggcgatgccgggcaactggccacggttcttgacgatctggcggccaacggcggcattgccggagcgattcatgccgctggcgtattggctgacgcgcccttgctggagcttgacgaccaccagctggccaccgttttcgcggtaaaagcgcaggcggcaagccagctgttgcaaaccctgcgcaaccacgacggacgctatcttattctctactcttccgctgccgccaccctcggcgcgccgggtcagagcgcccatgcgctggcctgcggctacctggacgggctggcccagcagttttccacccttgatgcgccgaaaacgctctctgtcgcctggggcgcatggggagaaagcggtcgggcggccacgccggaaatgctggcgacgctcgccagccgtggtatgggcgcgttaagcgatgccgaaggctgctggcacctggaacaggcggtgatgcgcggcgccccgtggcgactggcgatgcgcgtttttaccgacaaaatgcccccgttacaacaggctctgtttaacatcagcgccacagaaaaagccgcaacgcctgtcattcctcctgctgatgacaacgcctttaacggcagcctgagcgatgaaacggcggtgatggcatggctgaaaaagcggattgcggttcagctaaggctgagcgatccggcgtcactgcgtccaaaccaggatctgttgcaactcggcatggactcgctgctcttccttgaactcagtagcgatattcagcactacctgggcgtacgcatcaatgcggaacgggcgtggcaggatctgtctcctcatggactcacgcagcttatctgttctaagccagagacgacgcctgccgcttcgcagccggaagtgttgcagcacgacgccgacgagcgttatgcgcccttccctttgacgcccattcagcacgcctactggctggggcgaacccacctcattggctatggcggcgtcgcctgtcacgttctgtttgagtgggataaacgccacgatgagttcgatctcgccatactggagaacgcatggaaccagcttatcgcacgccacgacatgttgcgcatggtggttgatgccgacgggcagcagcgagtcctggcgacaacgccggagtatcacatccagcgcgacgatctgcgcgcgctttccccggaagaacagcgcatcgcgctggaaaaacggcggcatgaactgagctatcgcgttttgcctgccgaccagtggcctctttttgagctggtggtcagcgaaatcgacgattgccattaccgcctgcacatgaacctcgaccttttgcagttcgatgtgcagagttttaaagtcatgatggacgatctggcgcaggtctggcgcggtgaaacgctggcgccgctcgctatcaccttccgtgattatgtaatggctgaacaggcgcgccgacagacatcggcatggcacgatgcctgggattactggcaggaaaaactgccgcaattgcctttagcgccagagctgccggtggttgaaacacccccggaaacgccacacttcaccaccttcaaatcgacgatcggcaagacagaatggcaggccgtgaaacagcgctggcagcagcaaggcgtcacaccgtctgccgcgctgctcacgctgtttgccgccacccttgagcgctggagccgcaccacggcatttacgctgaacctgacgttcttcaatcgccagccgatccatccgcaaatcaaccagttgattggtgattttacctccgtcacgctggttgattttaacttctcagcgccggtgacgttgcaagagcagatgcaacagacccaacagcgcctctggcaaaacatggcgcacagtgaaatgaacggtgttgaggtgatccgtgagctgggccgcctgcgcgggtcacaacgtcaaccgctaatgccggtggtgtttaccagtatgctggggatgacgctggaaggcatgactatcgatcaggcgatgagccatctgttcggcgaaccctgctatgtgttcacgcaaacgccgcaggtctggctggatcatcaggtcatggagagcgacggcgagttgatgtttagctggtactgcatggacaacgtgctggaacccggcgctgccgaggcgatgtttaatgactattgcgccatcctgcaagccgtcatcgccgcccctgaaagcctgaagactctcgccagcggcatcgccgggcacattccccgtcgacgctggccgctgaacgcgcaggcggactacgacctgcgggatattgagcaggcgacgctcgaataccccggcatccggcaggccagagcggaaataaccgaacagggcgcgttgacgctggatatcgtaatggccgacgatccgtcgccatcagcggcgacgcctgatgagcacgaactcacccaactggcgctgccgttgcctgagcaggcgcagcttgatgagctggaggcgacctggcgctggctggaggcgcgtgcgctacaggggatcgcggctacgctaaatcgtcacggcctgtttaccacgccggagatcgcccatcgctttagcgcaatagtacaggcgctgtccgcgcaagcgtctcaccagcgtctgctgcgccagtggctacagtgtctgacggaaagagagtggttaatccgcgagggtgaaagctggcgctgccgcgttccgctcagcgagattcctgagcctcaggaagcgtgcccgccaagccaatggagccaggcgctggcgcagtatctggaaacctgcatcgcccggcacgacgccctcttctccgggcagtgttctccgctggaattgctgttcaacgagcagcatcgcgtgactgacgcgctgtatcgcgacaaccccgccagcgcctgtctgaatcgctataccgcgcagattgccgccttgtgcggcgcagaacggattctggaggttggcgccggaaccgcagccactaccgcgccggtgctgaaggccacgcggaacacgcgacagtcgtaccacttcacggacgtctccgcgcagttcctcaatgacgccagagcccgtttccatgatgaatcgcgggtgtcttatgccttgttcgacatcaaccagccgctggatttcaccgcccacccggaggcgggttacgacctgatcgttgccgtcaatgtgctccacgacgccagccatgtcgtccagacgttgcgcagattaaaactgttgctgaaagccggcggacgtttgctgatcgttgaagcgacggagcgaaacagcgtattccagctggcgagcgtgggctttattgagggattaagcggataccgcgatttccgccgccgggatgagaaaccgatgctcacccgctccgcatggcaggaggttctcgttcaggccgggtttgcaaacgagctggcgtggcccgcgcaggaatcgtcgccgctgcgccagcatctgctggtggcgcgttcgcctggcgtaaatcgcccggataaaaaagccgtgagccgctatttacagcagcgctttggcaccggtctgcccattttacagatccggcaaagagaagcgttatttacgccgctgcatgccccgtctgatacgccgactgagccagccaaacccacgccagttgccggggggaatccggcgctggaaaaacaggtggctgaactctggcaatcgctgctgtctcgccccgtggcaaggcatcacgactttttcgaactgggcggcgacagcctgatggcgacaaggatggtcgcgcagctaaaccggagagggattgccagggctaaccttcaggatctgttcagccattcgacgctgagcgacttctgcgcccatctacaggcggctacgtcaggagaggacaacccgatacccctttgccagggcgacggtgaggaaaccctgtttgtcttccacgcttcagacggcgatatcagcgcctggctgccgctcgccagcgcgttgaacaggcgcgttttcggcctgcaagcaaaatcgccgcagcgctttgccacgctcgaccagatgatcgatgagtatgtcgggtgcatccgtcgtcagcagcctcacggcccttatgtgctggcgggttggtcgtatggcgcgtttcttgcggcgggcgccgcacagcgcctgtacgccaaaggcgagcaggttcggatggtgttaatcgatcccgtgtgccgacaggatttctgttgcgaaaaccgggcggccctgctgcgcctgttagccgaaggacaaacgcctctggcactgcccgaacatttcgaccagcagacgcccgacagccagcttgccgactttatcagcctcgctaaaacggccggtatggtgtcgcaaaacctgacgctgcaagcggcagaaacgtggctcgacaacatcgcgcatctgctgcgtttactgactgagcatacgccgggcgaaagcgttccggtcccctgtctcatggtgtatgccgccgggagacccgcgcgctggacgccagcagaaaccgagtggcagggctggataaacaacgccgacgacgctgtgattgaagccagccactggcaaatcatgatggaagccccccacgttcaggcttgtgcgcaacacattacgcgctggctttgcgcaacctcaatgcaaccggagaacacgttatga

SEQ ID NO: 243472 - DNA, 186 bp, Klebsiella pneumoniae
atgaaagccttttcgcggaaccgtcacgactatcgaattatccgtttccccgacatcgcgcagtccgcgcctgactatcgatatgttttgatacagggtatttgccgggaccagaatcccttcatcttcccacacttttttaaagaaaacttgctgactgaccagttccggagtggcttccagtaa

SEQ ID NO: 243473 - DNA, 1068 bp, Klebsiella pneumoniae; identical to SEQ ID NO: 138368

SEQ ID NO: 243474 - DNA, 939 bp, Klebsiella pneumoniae
atggtaggaaaaccagaccttgagacgttcgtagaacgtctgcaggccgtaggcattgaaccgaggttcaatgttgccagcactggcaacgtggcgggggtttcattcagtgttggagatgtggcattcaagggatctcagttgggtaaaaaatacagttggaacactataaaaaacaaggtgatatatgacaaaaatagagatgatgaactcgttagaagattcgcagcaagaaaaacagatgacgaaaatagtattagacgatcacttgttgaaccaaatatcaatgacgatagaaccattatcagaaacgatgatgatattatcggagtcagtcagcacagcattaaatcagacgcaacagacactaacaagagtgaacaactcattagaggcaacaacaaccgctttaaactcagcgaaaaatataatagaccaacaggcccaaaagttagaagaacaacacaaaaagctgcacaggtactcaacagagttaaaaaacaatacaataaaaaatcaatcaaaacttataataaaagtggcctcaatagttggcgtgataaatctgatagcggttctatcagtaggatacttgatcatgcagaaacagccaacgcagccacctattcatttagactcaaaggccgtggcaacatcaatagtagagcaactaagatcgaagagataagagaaaggttaggtataaaaaaaccagttattcagccagagaataaagaaaaaatagttaaagaagaaataaagaaaaaaccgttttatatggttgagcatgaaaatagatttaaatctaaactacataaaaccaaaaacactatcaatgaaaaaatcattaatcaaaatcagctaacagatgaaaatgatgacggcggtgataatgatggaggcggtgataatgatggaggcggtaggtttaggatgtaa

SEQ ID NO: 243475 - DNA, 1260 bp, Klebsiella pneumoniae
  misc_feature (105)..(114): n is a, c, g, or t
ttgcaatataaccatcaaaacaggcgtttttgcttcagcaagaatgagcagctatcctgcccagcaagatttagcattgcacaatattggccatgtccgtggcannnnnnnnnnttattagggaatgataaagactatctcgcaacacgtattgcatataaattaaatttaactggtccagcattaactatacaaaccgcttgttctagctccttagttgccgtacatatggcttgtgaaagtttacgctctggtgaatgcagtatggctattgctggtggaattggtatcacatttccacaaaccggtggttatctatatcagaaaggcatgatcttctcaccagatggtatttgtcgtccttttgatgcagaggcaaacggtacttttgctggtaatggatttggtattgtagtgttacgtcgtcttgaagatgccttagtggatggaaacacaattattgctgtattacgtggtagtgccattaataatgatggtcatcaaaaagcgggattcacagctccctccgtagcaggccaagtttcagttattagagaagcaatacaactggccgatattaaaaatgaagatattgaacttattgaagcacacgcaacagctacaccattaggtgatccaattgagtttagtgcattatgtcaggttttcgctgatcgctctcttactgcttctaaatgcgctattggctcagttaaaggcaatatcggacatctggatacagcagcaggtatcactggcctaattaaaacgatattagcggtaaataaagcacttattcctccatctatgcattttaatcacccaaatcctcaattacaaatagaaaaaagcccgttctacattcctaaaaaccctaaagcttggtctagcagaatacgaactgctggtgtttcttcatttggtattggtggaacaaactgtcatatcattgtgcaatcattgcctgactcattagtatcaatcaaacctgaacaagaggtagacaataattttgaatactcattattgcttagtgccgccacaaaagagagtctaaaaaaacttgctggtgattatgcaccattaataaaaattaccccagcaaacattctggctcataatgcattacagcaaagacaactcaacttaccatggcgcttatctatccccttaacaagtgagagtgatatttcactgttagctttctctcaaggaagtgctgattctttaatacaatatgcaatacgtgttgcgagatag

SEQ ID NO: 243476 - DNA, 1203 bp, Klebsiella pneumoniae
  misc_feature (1084)..(1092): n is a, c, g, or t
atgcgagaaattgctgcacgctcagatcatgtcattttgggcacagcaacccccattcaaacccatccagaggatttgtgggatttaattggcatcttacaccaaggaagtggtcacttcgttcttggtaacgattatgccaaatggcaccgcccacaagagattttacccatactctctggtgagcagcgtgtgactaaaacgagttttgcttgggagcttcttaggtcaccattacctgttgtcgattcgaccaacgaacaaaatgctcgtcgcttattcagttctattcgtcaggatcttggcataattaatcagaacgataaatgggatataaagaatacgctatcagacctgtcagaagactctttagaatattttgaagaagagctggacagagatatagctggtgccagtttttttcagcgtgaaaatccgttaattcgccacatcgttttgcgcaaacgagtaactcttgaaaacgccggtcttttgccccgtataggtgtagatgttcatcctgatcgggagttggcaaaggaagtacatcaatttaatattttgtttgagggtaaagccttgagaacaagtgaggacttccgacaagcctatgtagaagcccgacactttggtaaagctcttgctcagaatggcaaaggaagtggcttcatgaaaaatcttatggaacaacggatttgctcgagtattgccgctggattgaatacggcccgaatgctattggaaggtcggaccctacgtgaagaaagcgatgaacaactgattgagattaaagccgaaagcccagatgaaattgcggttctggaaagaatgatagccagacttgagcttataaaagaagaccctaaactcaatgctgtgattcattaccttgagaaggaaaaatggctgagatttggagtcattatatttagccagtattacgataccgcaaagtgggtagccgactcacttgctgaacgttatcctgatcaggctgtaggcctttatgctggagcaggtcgtagccgactctatcaaaaaggggaaagcgtcaatattgaaagggaaactcttaagcgtatgnnnnnnnnntggattccatggcaagtccatgttgatcaacgtacccaatgtctgaacgaatgcaggaccgctacaacctgttcggttctttgcctgacaccatccgtgatgaatggatag

SEQ ID NO: 243477 - DNA, 249 bp, Klebsiella pneumoniae
atgcaggaccgctacaacctgttcggttctttgcctgacaccatccgtgatgaatggatagaagatattgaaactatgggtgagaaaatggatgagtatattaatgcccagaaacaggctaatggatttgacctgcgctatacagagacaatgtctccttcggataaagattggcgtgactgcgccaatgtgctttcacgtcgcgatttcacagaattaatgatgtctgggtggggggagagtaaatga

SEQ ID NO: 243478 - DNA, 576 bp, Klebsiella pneumoniae
  misc_feature (534)..(543): n is a, c, g, or t
atgagcatcaggagattttcgtcacgtacacatagacttgatcatagcttcctactcgagcacctcaaaggtgctcggagttacaaacgtatagctgggtactttacgagctcgctctttgaagtagccaatgagctacttgattctatcccggatgtaaaaattgtctgcaatgtagatatccaccctgatgacctgaaggtggctcagcttcgtgaatccaagatgatagggcgctggaatgatcgagatattgaagctgaaagtctgcttaaccgcgaccgctatcgccgacttgattgtttcctagccaagcatgggcaagtaatccgagttgctcctgatagtatttgcggtttcctgcatggtaaagcaggtgtcattgaacttgctgatgggcgaaaagttggcttcattggctctatgaacgaaactagcagtggctggcagcggcattacgaaattctttgggaagatgaatccccggaaggtgtggaatggattgagcaagagttcaattatttgtggaatgcnnnnnnnnnnatcgcagagaggttatatttgaagatatcgtag

SEQ ID NO: 243479 - DNA, 216 bp, Klebsiella pneumoniae
atggccaccaccacggcaaccgacctgatgaagtccggggatgcgaccgttaaaggcacgtttggtaagtcttccagcgtcgtcaaatgggtggttctggcagaagttgtcgccggcggcatcatgtacatgatgaccaaaaacgtgaagttcctgtttggcttcgcgattatttccacctttatcaccatcggtatgtcagtcgccggttactga

SEQ ID NO: 243480 - DNA, 135 bp, Klebsiella pneumoniae
atgtgggtaatgatgaatcttagacgtactgggcaggtgatgtatttccagtgttacgacagcagggaaacggctgaaatggcgattaaggttatgaacgccgtcgccagcagctgggaattctatatcagataa

SEQ ID NO: 243481 - DNA, 696 bp, Klebsiella pneumoniae
atgtcacaattaagattgaagtggatgagattaaagatcagaaccaactctgaggctgtctttgattttatcaaaaacaccccttattctgatgctattggtgctggttttactaagtatgaaaccattcataacggtatagctgcaaccttcaatagaaaaactttaattttagagccagtttccgatccttttggtgatattctggaatttgaaagagttgtttttgaccagattgatttttctatccaaactattaccaataaaatatgtttgttaactttttacaatccgccaaaaactgttaagccgtttattgattttctatctcaagcagaagggttaaatgttgcttatggaaatttaactgttgatctcaaatatttcatgaagatcattagagaaaattttggcgtaaaagtgttcggtatttctaaagttaaagtatcaaatcttcctgttactgaaaaaacaagggcatgcttagaattgaattctagcggagatgccttgcatgatttgaagagctttgttggtgataatgattttaaattggataaaataagagttggtgcgctttatcatgattcaaaaatcagttttgagttaactagtggagcttctgcgataatacctgaagagcatttgctgacttttaatgatgttatttcctgtatggaaattgataagttttaa

SEQ ID NO: 243482 - DNA, 609 bp, Klebsiella pneumoniae
atgagtaacagcctgttaccgccggggtcgtctgcgctggaacgcaggctggcgcaggcatgttctggcatcagcgacttaaacgtgccgctgcgcgacctgtggaacccgtggaaatgcccggtaaagtttctgccgtatctggcctgggctttctccgttgaccgatgggaggaaaactggacagaaaccgctaagcggcaggcggttagcgatgcgttctggatccatcagcgaaaaggtacggtagcagcggttaagcgagtgatcgaggggctgggttattcaatgacccttgaggagtggtggaaagtagccgaccccgccgggacgtttcgtcttgagatcgatctgaatgaaatcggcatcacggagccgatgatttacgagcttgagcggattattggcgatgcgaagccggttagccgtcatatatcacaaatgaagatatccacgagtgtgcatggcaaggcttatataggggccgcggtagtagatggggaagtgacaactgtctacccggagggatacaggccaaatgatgttattcagtacaatggaaaaatatggtttgacgggaattatcattatttgggaaatagaaaatga

SEQ ID NO: 243483 - DNA, 306 bp, Klebsiella pneumoniae
gtgagaaatgccttccatcatgcagccgtcgcccatgaaggcgtaggtgtagtggtcgacgatatcgtgtcccggacggttgaactgcgccgccagggttttctcggcgatagccatcccgaccgcgttagcgataccctggcccagcggaccggtggtggtttccacgcctgcggtgtagccgacttccgggtgacccggggttttggagtgcagctggcggaagtttttcagctcggatatcggcagatcgtagccagtgaggtgcagcaggctgtaaatcagcatcgaaccatggccatttga

SEQ ID NO: 243484 - DNA, 735 bp, Klebsiella pneumoniae
atgggttcacgcattactgttccgggttattttggtgataaaggcctgggttttgacccgctcattcgccgtggcctgaaatatttgaatttttatggagaggcagataaaactggtcggaatctcgcacccggtggcgcagctgcaacggtactgggttcgcctgttgtgcaggaaaatggcgtccagtttactcctgccggaacattgctggatacaggcattctgcaatctgctgatttcacatttttcacaatcttcaactgtccgaccctgtcgcagattctgctgctcagcaattttaacggacctcgacagtcaggctcaggcaccactcaaggtgtagtgctcagaacgcagcctggctcgacaaatatgacgttaaatttttctgttaacactataaatgggggcgtatcgacgcagcgcacagtcgggctcggtgggttgcaggcaaacacaaactatttgttatgcgcccgctttaaatcaggccagaaaatggatttcaaaatcctgaacaaggcgctgtcaggagagaaaacaacagatatgggcgacccggcggatttgggggcaaaactgcgtatcggcggtagttaccaggctgatctaacgaacgcagggattcaccgattttctgctttacacactgttgcgttgacagatggtgaaattacaaaagccgccactcagtggacagcttgggctaaagctgtcgggttaacaatttaa

SEQ ID NO: 243485 - DNA, 246 bp, Klebsiella pneumoniae
atggtttttaatagaccttacaagttcaatgtattctgttcggtatttcaagtcgttgaccgtatttccatgaaaaacagggcgttcaactacgcccttagtacaatcaaatacatgtacattttctattatatcgttgaagtccggatcgaccataatcccaatgtcaccaccagagacgctacaattaatgattggcaaaatttagtcctttttctgatttttagtgaaggctttttatgttag

SEQ ID NO: 243486 - DNA, 1155 bp, Klebsiella pneumoniae
atgagttcagtaatggttgttgttgatgttgaacaaggcactcctgagtggcttgagtggcgtaaaactggagtgactgctacttgcgcccctatcctgatgggtgcagatagtgctacaaaaactccatatcagttatacctacagtatgctggcttacttgagccagaagacctttcagtcattaaacaagtacgggcgggaaagcttaacgagcctcttgctcgcgcatgggctgaaaggaaatatggccaaatcagtttgcctctgtgtgtccggcatcgtgattaccctcacatgatagcttcactggacggtcaatttgacgacatgaatctccttgagataaaaaacctttcatcacaaaagcatctggatatccttgaaaagcaaacaaagtcgccagagttcaggtactatttctggcaagcacagcaccagctctttgtaacaggagcacccggtgtgtatcttcttttttggtctgctaaagatgagcctattgtcttttacattaaaccgaatcttgactgccatagacgtttactaaagcgatctacggaattttttgaatcggtaaaaaacaagacagctcccgcttttgacaaagaaaaagatattttgcttatttcagatgctgagataataaaacaaacacccggatttaccatccctagcgatcttaacgtgcgtgtatcggctcttcgtggtcatgcgtcagcacttgaaaaagctaaagcagaggtcgaacgactagagaaattaacaaaggctggaattgctggtcttgctgattctttaggttttagacctgacgatcttatccgtttggatgggtttggtattcggtacattgaaagcatctcgaaaggaactacaaactggaaaagtctggctaaaaaactcgttccgaatgtaaaccctgacgaacatccagactgcataaataatgacaagaaaacgtcaaagcttactacttatgagtatgtcgctacgtcatctgacacaatagcagtatctgtccctgacgcagttaaacagtctccatacgtgttcatgcctcaatcgcaaaatgttgcgactgataatggttctatggattctggtacaactcaagacagtgtaagtgaaagtgatggtgttatgatcttctga

SEQ ID NO: 243487 - DNA, 1536 bp, Klebsiella pneumoniae
atgggttacaacaataaaagtcgtagtgcgtacaaaggtcaaaataacaatggtaacaacaaaaacagcaatggaaatgaaattgctcagttagattctgttaccagacatcttgtatcacttgaaaatgattttaaggcggctgcaacgtggaatcccactctttcttttgcgaaagagagtgttttcgctaagcatgttatcaacaacagtccctacctcactaagttggctgcacagaacctcaaatcattcgaggttgctttcctacagttagcaacaagcggccttacactcgatccagcacagaagatggcctaccttgtccctcgtatggggcgcgtattcctcgatgtgtcttatatcggtttgagtcgaatggcaaccgatgaaggattgtgtgaggatattgttgtagaactcgtgtttgaaaaagatgactttaaatcaaatggtcgtcgccaaagccccgaacacagctttgatcccttcgcggataaaggcgctcttttactcaccactgctgacaaaggtgatgtcggtgaaagaggtaatttcagaggggtatatgtcgattaccgaatgaaggatggacgcaaccttgtttactttctgaccaaatcagagctggcctctgcccgtgctgtttctgagtcatggaagaaggttgaagagcgggagatgtctccctgggttcgcttcccttgggctatggtgcgtaagtctgctattaagcagaccattcatcaaatccccggcaatcgcactcgtgtcgcaaccatcatcgattatctgaataaagatggcggtgaaggttttcgtgatgtgaatgcaactccagtacaggctgctgagtttgaaatgtctgctcgtcatgctgcacaacggcacgatgttcagcaaaaccaacccccagcccaaccaactccatcaggtaacgtttacgatggtgaggttgtcaaatcggaagctaacgcaactgaaacaactaaacagtctcaagcagaatcgactaaaactgagtcatctagcattaactcagcctctccaattcagactgctgaatcggacaacaaagctgaggaaatgtctgatgtccccggtgttcgtctttctgctaaacgtcgcatcaataaacttgttaagcgtgtcgaggttacgatggcttatgaaacaatgattgccgaagttaaaacgaattttgaattcaacgatagtgaagtccaatatgctgttcgctctcttgaagaatctcgtcgtaagcttctgcaatccaagttaacggatgcagtcaacaaatgtgactttacagatgttgagaacttcttagataaattacccgaaggtgaattcaaacagaaatccaaagtgtttgttcaggaagtgcaaactgaaacagataaaatgcggactttgtatgatgaagccatcaaatcaaaaaatttcacagctttagatgcggcaattgaaaaagtttcatttaaaccattaaaaacggttttgagtgaaatgctttcttccgcaaaagcagcttaa

SEQ ID NO: 243488 - DNA, 777 bp, Klebsiella pneumoniae
atgttctctaaagccactttgatcggtgtggttggtgtcgagccaaaatacaaagctgctatagacgggaaagattcattaatcgctttccgtcttggttgtgaagtattcaccaattcaaagaaaataactgaatggtacacaattaaagctttcggtcgtgttgcggactatctgcatcaaaccattaagaaagactcatccgtgttcctggaggcttcaattcgcaataaacgctggacagtaaatggtgttgaacgtcatggtattgaatttcatgctttcacagctcgtgctatgtctgatgctgatacaaccaatcatgctcaaacttccacggtttcaatcccatcgtctgattcacctgatgatctgtttttccctgtaatggataagtcagataatcccgctgtagaacagcctaagcagcctccaaagcccttaactgctgaggaagctcgtcaggttgccagtcgctttcgtcagacgtttgaagcacaaaaacagcgaatcgctgatttagccacaaatgcacccgccaaagataaagaaatcgaacctgaaaaggtttctgtttcatccccggctattgctagtggtcgtgcccctgccattaaaacttgcgcatccgtgcctgctacagaaattccttcgggaaatactgtaactgaaaacctgcttaaagcacgaaatgctttaagcaaaaattctggacgcgcactgaatagtagcaatggtcacgctcatgtacgtggtggatggtcaaacgttcgatga

SEQ ID NO: 243489 - DNA, 534 bp, Klebsiella pneumoniae
atgaacattaaaagtctgatttcagaaggtgtcattgatctggatggttatattcaggttgaagcttgtaaatgcccttcctgtggtgcgccagcaaattatcgtttctttgatagttgtaatggcggatgtgttaatcaacagaaagctactgaatgcccttcatgtggttatcattcctgtgatgatgaatgttgcactgtttgtgaggagcgttatcgtaaagagaatagcgatgctattgctacatactacggcatatccagcccttctctcgccgctctttttttggcaaaaatcgaaactgaccttatggttttacttgctaaacttgaaattgagttacctgatgagtttgcttgcgatgatatccctcagtctattattgagggtgttcacaattgcgctgatctgataattaatttcgataagaccgactttgttaaacatcctttatcacgcgaaatcagaagttctgtttatcaccttctgggtgagttaaatgaactgattttttggtctgatagtttctaa

SEQ ID NO: 243490 - DNA, 507 bp, Klebsiella pneumoniae
atgactttagtttatggaaacacagtagagccaggtggaatgctgcttgacgatgacacttctatcgaacaatgccatgaatgcggcgctgattgcatggttcgtcgttacgaaacatgtgatggtgctatcaatcaacggtattcgattaactgtccagagtgtggttatcacgaatgcaatgctgaaatatgctttatttgtgatatgcgtttcactatgagcgaagaagaagaagccgatatctatcttgatattgagtgttcggtttccacgcttactgatgctttggtctacttgagtaaagtagaaggttcgttgttgtcggcaaaagccatgctcaaatttggtgattacactagagccaaggctatgattccgggtgaacagataaattactgtttattccttgaatcatctttgcctaagacgcctttactggaaagcctagtatcttctactaacttactttcttgtgaattggcaccagtgctttacgcagactga

SEQ ID NO: 243491 - DNA, 675 bp, Klebsiella pneumoniae
atgctcaacgaaacaatggctttgatttctctcgctatgttcgcgatgttattttatcgctttacatacatccgttttctggctcctatgtggatcatcttgtttgttattctcagcggtcgagctgtaacagcatatggtttaattactatcttgatgtttgcagttgtgctgatgtttttcattctcgatgctattcgcgtcgctcagaaaaaagcagctaagaatcgtggtaaggatacggaagatgatgctgtatctatcttcgatgaagttgaagatgatgatgacagcgcgttttctgacatccctcgcctgtctgccttagatgatgacgagtcacctaagaaggctgcaagacccaagaaaacaaagctcacggtttatgaaggtacactgatgagccacggctttgccccttacaatgatgtggttggcaacgacaaatcatattttgtcgattgtgatggcaaaaaagtttggggaattggtctgaaagacgctatcaaaaattgcagtgcagaagttggtgataccgttcgtttctggaaagaagcggaagttagaaccaaaaaagccagagtttttgataatgaaggcaatgtaaccggatgccgcaatctgtctcaggacaagaggcgcggtctgtgggttatggaagtcgtttctgactaa

SEQ ID NO: 243492 - DNA, 675 bp, Klebsiella pneumoniae
atggcagaaaataaaaagcagcagcagaaagaggggagcggtaatgcgacaaacaagccagaccgccgtactcgcaatgtagagaagattccgttctctaaccctgaaatcgaacataaattcacgctgaaaacacaggaagctattcggctgtatactcgtaatttcaatgcaacatctcaggctttgttcaatatcatgattaatacgacacggcttgagaaactcagacaacgtggggtcgcggcatcagctaagaaagccattgatgctgcgctggatacgccgatgaaagagatcgagctgggcatcacggcatttactgagatgttaaacgctgctggtgatgtatcagaagtcaactacactaaccctcgcgagttcaccacttcaactcgaactcccgaggcaaccaagctcattaaactattcaaaaattatgaccacattatttccattctggataaagcgtatttaaacgcactggcccccgctgaggaagtggaagataccaaatccttccatacaagcaacattcagacacttgccaaaacaatcaaggcacatgcgcagagttctgttgagcaacttcaaagtatcgccggtgaagaagatcatactggaaatgtgagcgtcgttgagtcggtggagaaagcagaaaatttagaagattaa

SEQ ID NO: 243493 - DNA, 1074 bp, Klebsiella pneumoniae
atgagagcgaaagaatcgcgtttaaaatttgcgttagccactctaattacaatgtcaacgtttgtgttctctgctggcgttatcgctgatgattccacagatactcaggcagaaaacgaagtttgtcgtgataaccatgtgttatctacaaaactttttactgatgtgtgctgggcctgcatatttcccataaaggttgctggagccacactcgggccgtcaggagaagtgcctgatgatgctgcaacaggaatggtctgtgcgtgtgctgatggcctcggggtgtaccatccggggattctttctgcaatgtgggaacctagacgctttattgagctaaccagaacgccggggtgtatgtcttctcttggaggagccaaactggatcttgggagtgaattacaatacggcactcaaactgacggtgctcaggatgaacgtttgagagcgtccattagtttctataacgcgcatatgtatgcaatgccattgctccgaatgttagatctttatctgccgggagattgtaacgcagacccatattcagatttcgatatcataagtttcacagaaatagatcccacatggaataacacaacgttagccttctttcaaaatccagaatcagccgcagtatccaacgtcattgcccaacaggcatgtgcggttgaagcagcagcacaatttgcaggatctcagcctcaatcaacattatggtggtgtgctggttcatggggaggacagtaccctcttacaggatcagtaagaactatggatacaccgcgaacgacaagcctcgcagcaacacgtcagttagctgtagagcatcgaagggggcttgcttatcgttccgtaggaaatgatgtggcatgtcgagcaaagatatatccaacaatacctaagcaacagtacaagctaaatatgttttaccctacacctgaaactaaaaagggacataacattggcgaatcaccttacaaatggcaaggaggtatgttccgataccctacgggtatggggcaggattcaacctacatgattttccagtggagtgattgttgcaggactctgtaa

SEQ ID NO: 243494 - DNA, 1254 bp, Klebsiella pneumoniae
atggtgaaaaaagatttttacagaataactattcttgcagccgctgtattatctagcacggcggtattctccaatgaaagcatgaagccacctacgcggccagaaatatctatcccagccacgagcatccctcagcgcccagcgccattatcagaaaaagacaagcttgatcttgatgagctggtcaaagtagcaaagatgaagcgagctgaatatgaaaaaaaatcccgcgaaactgctattgctaaccataaaaaaatcggggagatgcctgttccaaaatcagagcatgaattcataacagatgcggttacgggcgcaattacagatgctgatattgcagatggaaagcaaaataagatagcaggagatttttattacgtactcgtttcatcatcattatctgatgatgaaatccgcaacatactttcacagtacaaaaatcgtaaagatgtagctcttgttatcagaggtgttaaagacaaaaaaaacatcctgaaagaattaactcattggcaacagttggtactcgattcaggtagtagtacaccgataaatcttgaccctacaatttttaagagttatagcgtcacttctgtaccaacaataatccatgaaaaagacggtaagctggtggctcgtgtttccgggatatcaaacatagcatacatgaaagataagcaaggtgatttaggcaccgcagggccgacaaaagatatcagtgaaatcagcttattggatatcattgaggaacgaatcaagaaccttgattttgacaaaatgaaaaatgaggcgcttaataattattggaaaaaacagaagtttgaaaacttccctgatgctctgaaacgcaatcaaaaaaccattaatcctagtgtagtaattccacaggatatactcgcaccagatggacaggtaattgccaagaagggccgcataaacccactagaggttatccccttccgcctaaaactcattttttttgatgcacgtagtgactggcaaagaaaaatcgctaaacgtgagaatcagaatgccaagcccggcatacaacctattctcattacaaccaacgtatatggcgacggctggcaaacatttaaggatgcaggtgaaatttacggaagtaggttatatatgatccagcccggaatgtcagagcgatttggcgttacatcattaccaagcattgtaacatctaacggaacacagtacgtcgtggacgaataccctaaagatgaggccgaaaaataa

SEQ ID NO: 243495 - DNA, 534 bp, Klebsiella pneumoniae
atggtggtgaaagaaatactcaatgtggtgtggcgaaaagtatataagaagaagaggccgtggaaaaaacaggccgtattgatgataatcgttgccgtcgtatcggccccaaccagcctgtacctgatgaatcgctatcaatttgcaatcgatccacaaaataatcagtgccttcctccttatcgtatttatctcgtcgataaatttgataaaacacctgttcgaggaaaaccgttcgcttttacatctaaatatattcgggtctatggtaaaggtattaaaatcgttgatgcggttccgggggattttgtttcagtgaccccggaagaaacgactgtaaacggttcgatggttggtgaagagttacgactcgctaaagaatctggtcacagcgaacaagagctaactcgtagtgggaagatacccaaaggccgaatttggttgatgggccgcacgaagctcagtttcgattctcggtactgggggtcagtgtctcaagaacacatattaggacgggcatatccactatggtga

SEQ ID NO: 243496 - DNA, 1620 bp, Klebsiella pneumoniae
atgagtatgatcttcttcgaccaacagaatgtaaaaacaaaattcacgcagaaacgtagttgggtcgtacagcaaagcgatgggccaatgatcaaatggataccatccctaaaaacactccgtgaaggttatgacatactcagtgataaagtggacaatggtgaaccgatctgcaaagcgaagttttcggtaactattttctctaactcaaaagacggcgttttccgcgcagcacaggaagcagccagctatctcaatacgtatcagtttaagatgatccctgatacgaactttgtgtgtccgatatttctttcgacacttccaatgttcaatgaagtagccgcagaaaaaacaatgggtcgatatcgcacactggctcttagtgaagctcttgtactcacgccgctatatgcagattggcaaggaactcgcaacccagcactgatgctaacttcgcgatccgggcaaattcagatgctcgatcttttcgactctgacacaaactacaacgcatgtattgcggcagagtcgggttctggtaaatcattcttaactaactacatcattacagcgtatcgcagccttggtgctaaagtctggtgtatcgacgtgggtgattcatacaaaaatatttgcgaaacctacggcggtgactatctggacttccaccctgataaaaaaccatgcttaaacttctttgagctagtcgaagactattttggtaaagatccatcaaacgaagatggtaatggtgaagaagacctgatcattgggctactaacggttatggccgcaccacaggaagggttaagtgatttccagacggcccgactgaaaaagcatgtcgctcaacttatcatggagcatggtaaagccactaccattgatatggtcgctgcttcgtgcctccaagatgaagaccaacgtataactgatatcggccaccagctatacccattcaccagcgccggacaatatggccgatactttgttggtaaaaacaacattgacttcaaaaatccgttcacagttcttgagctatcacgtcttgaaagctcagagcatttgaagcaggttgtcttgttgcagctcatttatcagatccagcaggacatgttccttggcgaccgttcgcaaatgaaaattgttgttattgacgaagcatgggcgctgctgaaaggtaacattggtgagttcattgagaaaggctatcgccgcttccgtaaatacaaaggtgcggctatcacaatcactcaatctatcaatgacatctacaaagatggtgttggtaaagctatcgcagataactccgcgttcatgctattacttggtcagggtgagtctgcgattaacgaggctcaggccggtaaacgtttggcgctggacgatgcaggatatcgtttccttaaaacagtacgttcaagcagcggggtgtattcagaagttttcgttatttcaaaatcaggacagggtattagccgactgattgttgacccattctccctccttctctactccactaatccagatgatgtttcggagatcaaacgtaaaaaagaaacaggcttgacaaccgaacaggccattaacgacatacttaaagacaggggtattgcctga

SEQ ID NO: 243497 - DNA, 732 bp, Klebsiella pneumoniae
atgagcgaatcaatcattgtccagcgattgaaaaatattaaacgcttttcagatgtatgtccggtaagagcatacgatgaaagaaaccgcatctttatgctagacaacaaatgtgtaggtttcggcttcgtttgtcgccctctatcaggaagtagcggaaaagagatgcaacaacttcaaacgttgctttcatccaactttccggcgaaaacgattgtgcagtttgacctgatcgcaagtcctaacatcgttaacaaaattaatcagatggatttcctgcggataaactgcggcgaccctattctgaaaaatgcgattatcaatcgctcacgctttcttctacacagtacagactatccgatgaaaggcacgggcactcgcgtgcgtgactgcctcatgatctgcactgttaaaatacctgttaaagcagagtatgatctcaaagaagaagaactgaatttagtaaatgaattcaggcacagttttgatacttctctcggaattctcgggctttcgcctactccattgacgcgagagtcatacattgacattctctcgtccattctcaatcaaggggagaatgcaagctggcgagatcgctcccctgttcaggttcaagatgatttaatgatttcagagcagttactcgaccctgaccgctcattcttcgttcgatctaagtacgtcggtattggcaatccagaagatgaaaatcagcgtggtgaaaggtaa

SEQ ID NO: 243498 - DNA, 747 bp, Klebsiella pneumoniae
atgtcatttaaaaaatgtttttttgccgcctccttgctcgctggatttgtttctactgcatttgccggaactggctcaccaaccgatacagttttcacagaaaatgcattaaaagcagcaccaaaaaattccgtccaacctaaaagattcgttgtgccaacaaacggtcttattgctttagatattgatggtaaacttaatgtcatgacgtctaatggtcgttttgtcttgaaaggatatctatacgatacatgggcaaaaaaaccactggagaagtttgatgatgttgctaagtatgcatccatcattccaatgaaagaactgaatctgaacatcgccgatttgcaacctgctgtgtggggtagtggcccggaaaaagtaatgatttttattgatccaaattgccaatattgccatgcaactcttaaagaactcgctgatcttgaccccaaaaaatataccgtgaacgttatttcactcggtgctcttggcgaagacagcaaaaaacgcaatcaggaattgtactgtgcaagtgatcgatatcgtgctgaccgtgcaattatctctggtgataataaaacgaaattcgttcaggtaaaaaactgtgaccaatcagcaatgattcgacgcaacattacggcacaggtgctgggtgtcagtatggttccattcatcattcgtgatgacggaaattacagcattggcaaaccagctcagggcttaaaagcataccttgaagctaagtaa

SEQ ID NO: 243499 - DNA, 606 bp, Klebsiella pneumoniae
atggttttagctctgtttggagtagcgagtatcgcttcccttactggatgttcttcgctggtgggcggaaattctgagtacggctgtaaaggtatgcccgattcagtcacttgcatgagcgtcggcgaagtatatgaacttactgatggggataattataaacaacgagtcagtgaagtttcacagcagcaaatggcagggaaagaagtcaatgtaaagcatcaaactgccggtggtgaagtttctggcccatcggtaagtgggggcgctccctacgtccctgttcctcaaccgactgcgaacccacaaccgatacgcacaccgtcacaggtcatgcgggtacttgttgacccatatgagtcttctgacggtgatttaaatgtgccggggtatgtctatacagaaattgagccacgtcgatgggaggtcggtgcttctcgcgctgcaactgttcagccggtgatcaggccgatgcaggctccggtcagttctgagcctattgctgaaaattcagccagtacaacgcaggccaagaatacgtcccagaatgctcgcggggggaaaaatcaaggctccaatacccgaacgatgatgccaaaccgttaa

SEQ ID NO: 243500 - DNA, 1332 bp, Klebsiella pneumoniae
atgatggataaaataaaagatatttgggttaatttagcaccaaacaaaaaacgctgggccttatggatttccatcctcgttgtgttagtccctctcctcatccttctgatgccggagaacaattcgcctcgttctaaggcaaataaagaaaaggtcattcagaacgtattaacagattcggatactgctggtgtcagtcagaacgctattgcagctcgactacgctcgctggatgaaagcatcagaagtaccaaacagtctgttgagaacttgacaaagacacttgaccccgatgctttgaataaacgtttgaacgctattgaaagcgctcaaaaaagcgaatctgctgcccgcgcttcactggcaactcgaattgacagtatcaaaaatggatatgccgtaagtggttcttcaaataataaaaatatctacgccgcccccaaagaaggtaagcctgtgagtcctacggacaacgaaggtaacactgatactctgcaacgagtttatgaaaatgatttagggccagaccctactgacttttccgcagatgataacgataccaaaaatggaaaggatcaacaggcaaatgaatccattcctgacattgttactgtccagcaagatataaaagaagaagagaagccgaatcctgatgatgatccagcctttcaaacatatcttcccgccaccagtatcatgagtggtgtatttatttcggggatggatgcacctaccgctcaaaatgcacgtagtgatccttatccagcactaattcgtatcaaaaaagacgcaattctgcccaaccgtttccgttctgatattcgtgagtgcgggttgttagctgcgggttttggtgatctatcttccgaacgtgcctatttccggtcagaagttatcacgtgtattcgtgaggatggtgctgtatttgaggccaaaattgattcttacgctgtgggtgaagatggtaaagcaggtgttcgtggtcgtctagtgaccaagcaaggacagtatctggcaaaagcacttacagcaggtttcctgcaagctgcatctcagttgtttagcgtccagtccattccgactatcaacgttaaccgcgatggaaactctagcagcagtccttatcagcaggtaatgagtagtcaagcgatgcaaggtgctgcaatagcgggtgtaggtggtgcgttgaatcgtcttgctgacttctacatgaaaatggctggtgacttattccctgtgattgagattgatccagctcgcagtgttgacttcattgtgcaaaaaggcgtcgctctgaaatttaacaaagttaataatgttgggggtaaataa

SEQ ID NO: 243501 - DNA, 1164 bp, Klebsiella pneumoniae
atgaaattaccagttaagtcgctggcaatgctcgtgtcattggtagccgccggttctgctgtagctgatgttaacagctatggcctgccatttgctgagaattctgccggggggcagcaatcaggggcagcaaaaagtacactttctgttgacgaagggcttattctcggtaatgcaacaggaagtaatgaacccgttgtcgtacctgccggtaaaccagtagtgaataattcaaaaggcgctacttctaatcgtgctaatcatactgcgacggctggcgcatcacgtaacgctaatagccgtgacaatcctgctgtagatggaaccaatgtgcagcctgtgcctaacaaaattgtacagccaatccgccttactgacgatgttattccatcaagacaagagattatcgttgagccgggggtgaatacgttaataccaatctcaatgggacagattaaccgtattgtcaccccatttgatcgccctactatccagaagctccagttaaacgacgtaaaagtaaacgtcgaaggtaacgcaatctatgtcttcacgcctaaccctcgcccagtagctctttatgtaactgagaaaggtgatgagagtgttgctatttctttatcacttgttcctcagcgcattgcccccgtgcaagccacacttatgttgtcacgtaaactaaataatgcggctactgtcagcggtggagtttcacctatgatgtacggcggtagtgaaacaaaagctaagaagtgggaacagaaagacagctatgtagaaactgtccgaaatattctccgcacaatagctttgggtgatcttcctcccggctatgcgttaggcaaccttggtagcggtgtaagcatccctaactgcaactttagtaccggcacggttcaggattatatccattacaattttaagggtggtcagtacatcaacggcagtcagttcagcgttattgtcggggtcgctcagaataccgggcctactacggttactgttgacgagtctctatgcacacacccgcagatggctgcgcgtgcattgtggagtcgcaataccttggaaccgggtcagaagaccgaagcctatttcgttcttcgaaacggccagcgccaagttcgcattgacgatggtgcgcgtcctaagcttgcggagtaa

SEQ ID NO: 243502 - DNA, 618 bp, Klebsiella pneumoniae
atgaatagtagacagtttaaaaaaggtcttttgcagatggctggagagatttcggccctcaaatggatagtgttaggattactcggtgtggtagtgattctttccgcaacgttaatgtctcgttctcaggtcgtaacaattatacctccgaatctgacacaaacggcgtggttggatgaaaatgcagcttcggcaccatatatgagagcgtgggctgtttatgtcgctcaatcgttgggtaatgccaaccctacgaccgtggatatggtgaaagatgcaatcggccctttccttgacgctaaaatttacacagaaacgatgaagcgcattgatgatcagatagaccagattaagcgtgaccgtataagtctttatttctcgcccaatcgtgtgatcaccgatcctgctgctccgggtgtgttctatgttgaagggaaccaagggcttgaaggtatcagcggagcaccagtagttaaaccaatgacctttcaggttaacgtagatattaaggggtatcgtcctgtgattacgtatgtgaatatcgcgcaaggtaaagccgttttaccctccgatgctaacaaacgtcgtagcaaagacaatgctcgggggaataaataa

SEQ ID NO: 243503 - DNA, 285 bp, Klebsiella pneumoniae
atggaaccagttaaaatttcacattctgtcgatgatcctccgaagtttttcttctggagtattgatgaagctatgccttttttcgtctttctgatggtcggcatctttaccggtcgcatcttaacatttgcaattattggggtagtgattacgcgctattacggcagcttccttcaacgtgcatctgaaaaatactttttacacctttgctactggaacctcggcgtttcattcggcaaaagtacaattgtaccaaactcatttgaacgggaatttgtcgtatga

SEQ ID NO: 243504 - DNA, 837 bp, Klebsiella pneumoniae
atgagcaaaaaaaaatctctaaaaaatacagctatctttgctgtcccgctggcgattttgataggaacagcttcatacattggctacagcgtgcataaacaggcaaaggttcttgatgatgttgcatttatggtgcaaaacagtcgccctctcgtaactgatcgagagcaactacgtgaacttttttcaaaatacatttctgctggtgggttggatctgactctggtggcacctgaaaagtctacaatttcacgctctggggcgaaaaatgataaagactatatcccatcaccttctgatgagcgaatttacggcaatccagaagctcaattttatattattgaatattcggattttgaatgcccatattgcaaagagcacttcccgcagcttctcgatctcgttgattcttcttccggcaacattgcccttgtttttaagcacgttcctgttcacggacaagcatctcaagttgaatcacttgcggctgaatgtgcagcggaacaaaacggaaatcccggattttataagttagctcgcgcgatttttgaaaatacgcaatccgacggacgaggtttgacaacaccacttgatgtgcttgctgaacggaatggcttcgatggaaaacgactcatcgaatgcgttaatgcagctcgtcctgcaaagaaaatcggagccgatgttcgtgaggccgcaggtcttaatattcaacagacaccttccactattgtagttcacggtgaacgttctgcattagttcaagggatggtaaatggtacggggattatgcaaatgatggctcagcttgttgatgggggaatgccagaaaaaaaatga

SEQ ID NO: 243505 - DNA, 291 bp, Klebsiella pneumoniae
atgtctgatacaaaaatgtaccttctgtcagcaggggttagccttgtctgttcagcgctacttcttgccgctttttcatatgcagataagtcatcacaacttgaggctcttgctgaacaagcgaaaaagccagtgtatctgaacacgcaagagaagatgaacagagaaatggcagacatcatgcttccattgttgcaaaagcagtataaggaaaaggaagctcgcaagaaaatcaaaaaacccgataccgtttatgcacctgagcagctacaaaattccagaggctactaa

SEQ ID NO: 243506 - DNA, 660 bp, Klebsiella pneumoniae
atgcttgatcagcttaaagacgataaatggcccatatcgttcaaaggactgatgatctggggtacagctatttggctcgttatcatgttttttgtacccgcgtccttcgtctatgaaaatatgatgaaagaaatcagttggggggaaaagatgataggaataaatgaattccctgccgttatggatacaacgaacgcacgatacaaatatttatttattgatacacacatcgattctgcgctcaaagggtattatcaacccattaaggcaaaaacaactacgggagatgttttcaataaaattggcgacctcgctgttcctttctttatgaatggcgcaaaagtatttaattatttgttattcatcatgacatatagactgagtctgattatgtactggattccctttttgctggttgttggcgtgccttcgatgtttgctggcttaatgaagtggatgtcaaagcgatatacgttcggttactcttcgccattctttaaccgccgcagcttaacaatgatcggatgggggattttttcaatgatcctttccctttttgttcccttccctattcctccaatgataggcgcagtagtgatgatagtagcgatgcctatagccttcattttgctaataagcaacttgccaaaacgcatctaa

SEQ ID NO: 243507 - DNA, 1962 bp, Klebsiella pneumoniae
atgagtgagtggaagtacaacatgccttggcgtcccaattatgaagcgtttgaagttgctggttggagcgcagggatcgccagtgcgcttgcagtaaatgcatatttcaatatgccttctttgccttgctacatggcagtggccgtgcaggcagcatatggcataagagccttgccagaggcttactacgtttacaaacacaaacgccgactcgctaagaggccagatgttttaattatgcgcattgaagaaattattgatgcaatgattaaatatcctgactcatatatattcggaaagggtttccaatggggccagaaagaaggacagtcagcatttgaacttcttaaacgtgacctctcaaaactggcagctaaaactgacgataacttcatgggtttaggatggattcatcaggtaggctcagatagtgattatatccgtactgttgaagatcttctttcgctacacactctcattaccggaaccacaggctccggtaaaaccacttattacaagttaataattctacaggccgcccttaaaggacaaccgctgatcatggttgaccctaagaatgatgaaggattggctaagtggatggaaatgtgtttatcttttgtggggcgagcacataaattaaactatttttctttagctcacccagaaaaatcagtgcgtatttcacctatcacaaactttacacgttctggtgaagtagctaaccgcattatttctgttatacagcgctcggattcaacgagtgatccattcatttccttcgcaacaatgtctttaaccagcattctcgaaatgatgaaaatgtgtgagattaaaccgacattgaaaagccttaaaacacagttgggttcaaatatcacagcactggctgaactggtcacacacgccataaccaaagttgggcgggaagttatgcctgatagttggtttgactccatgcttgcagccagaaaaagccggttgaaatctgttgatgctatctctatcgctaaaatatgtagcgaactttacatgagtgatattcgtcagaataaggcattcccggatattgaggcaggaatagatacccttagtcataaccgtgaacactttcagaagatgatcctgaacgtgatgccaattctttcccagcttaccactggttttatgggggacttactttctcctgacacatttgatcctgaccagttagaagacgaccgacctatagcaaatatccgtgagattattagtaccaatgggatgttgtatcttggtctggatgccctggctgatggcgatacggctgccgctgtaggctcgattttcctatctgacataaccagtgttgcgtcagaaatctataactttatgcaacctcgtggtgaagacgtagcgaacgtcatgattctggtcgatgaagccgctgaggttgttaacgaccaagttattaaaatgcttaacaagtcgcgtggcgcaggtttttgtatgtttattgcatctcaggggacatccgactttgaagcgcggttgggttcggaagcaaagatggaacagatcatagtcaacactaaccacttcacggctcttcgtacaccgtctcctaaagcgcagaaagctatcatggagcgcgtccctctgacgaaatttaagtatattatgcgcggtcatggttccagtgcaggagctgatcccgagcagattactggtagcgtaggggaacgtctgatggaagaagaaagcgaactattcccagcaccactactgggctggttgcctaatctcgaattttttgcattgaatcaggcaaaggtgattgtaaaaggtaaagtgcctattttatccaagccgaaaaatcagaacgagatagaccggataaaagcaaaagccgctcgttttcagaagatttacaaagaaaaagttcgcggagaaaaaatccgctccaagtcagctcaggtgtaa

SEQ ID NO: 243508 - DNA, 2655 bp, Klebsiella pneumoniae
atgtttaaaagaattcagaggctgttttttggaaagcaagagaaacaccctactggcggacagattatcatgccacaagaagtggtcgaagccctcaagggaaccagagatgttttacaatatccacctgctgaaaacggcttccctgccagaatccctggttatgctttgttgtccttacaggatgaaattattgtcaaaatcaaacgcgagcttatgatccgcgattcagaatttgatgagtatattcagcctatgcttaataattttgcaaacttcgttcatctgctcccggcctctgaatatcatcatcatcgcgcacagggcgggcttcttcgtcatacacttgaagtcattttgtactcaatcaagatagccaaaagctttgaatttgatgccaacgaatcaccagtcatcaaatcagatcgtgcgctggcatggcgtctggccgtagtagtaggtgctgtaatgcacgatatcggtaaacctatttctgatgtagatgtgtgggataaatcaggtgaacatcactggtcgccaactgtgagttgcatacatgaatgggctgaacagaaagatgttgaacgtttttacatttactggcgtacagatcgccatgagcgtcatcacaataccagtttgacaaaaatgactgatattgtaccaaagacattactcgcttttctgatggaagaaggaaacgatatttataacgaattaacagaggctctcgccgggagtaattcatttcgtgctacagctacgcgcaacgatactggcacagcgtataagaacaagatccacaaaatagtttctactgctgacagtcgctctgttaaagaagacctaaaacggtactcgggagatgctgttcgtgctgcacaaaccggtgtgtccgttgtagcccgaatagtcgatgctatccggttgcttgttaaacgaggtgactgggttcccaataaacccggctcccctatttggtatacaacagaagggttatttgttgtctggggttcagcggtagagccgatcacaaccatcgtcaagtcatctggagtgaatgtaccccactctgctgatagtctcgctgatatcatgctgagttatgggctgttcgttttaaacgaaaatgattctgtctattggcgcatggctcctcatatcctgaacgataagaaatcccgtcaagataaagagccaaaaaacgcgttaagttgcataaagttcgttgaccccatcgttatttttatagaagacgttgtacctaacccgacatcctgccgaatcaaactcgctgatggttggaaagagtttttggctgctggaggcaaagctactttaaaagaaagccgagcatacatcggtgataaaccagaagaaagagtgctgccacttaacgttgacccagaaattcttaaaggtggatcactaccacctacggaagacctccctccagatggctcaattgtaaaacgtggcacagtagttgagcctaaaaatattgttgatcacatgttacggattaacctgctctcaccagaagtagcagcggcgatcaaaaaacgcgatgctgaaaatttaaaggctaaggaagaagcaactaagacccctgtagaaaaagaggaagccggtgatgaactactttcagacaaagatcatcgccatcaaaatgcggtgcaaaaaaatgcttctaataatcagcacgatgcgtcgtcaaaggaaacggctaaggccaccgaaaatcagacacatttgttcgctgatgagtatgaatctctaccttatattgatgctgacgctgatacagaagatatggttcatcagtattgcatggaagataatgagcagcaaactatcagcttacgtgagcggatggagcaggctgctattcaacaaaaatatcaggacgatgaatctcatattcagcagggttcggttaaaccagcggttgatttgtgggccgaggcacagcagcgtatccggcagtctaaagatgaacgttatggggtttcaattcccagcgatatgaatacaaatgaaaatcctgcaattaaggatatccccggaattcttgaggggggacacatattctcctccttgttcaaggatgcaccagatgcaacaaaaataatattgaaaaaaatcattagcgaacgccagaaagaactcattgcggataactttcacctttttattcataaaaaagacgatcaggacgaagaaaactatttagctatggttgccgcaggttgggtatggaaaccatttcttgatcctaatgaaaaattccacatgtacaaatcgaagccgggctattttctaaagcgtgagcttaacgaagatattgattatctctcaggtggaaactatctgaagaatatcctgccggtaaatcctagtgatgtgtattgtcctgaaaatgacctataccgtgctatagcaagttatgggcaggtaaaaaaaacatacgacaataaagatgttatagcactgagtggttccgcaattagaaatatggctaagtcgcttgaactggatactgccagtgttcgttttttggtgtgttacaactttgactccgtgaataaacgcggctcagagcatgtacttgtagacgataaccttagaccttacatggtggattctcatgagtga

SEQ ID NO: 243509 - DNA, 582 bp, Klebsiella pneumoniae
atgaaaaataattttcgactcaaactgtcaattgccgcagtcggagtggtcggcatctttctgtcgggttgttcagacagtaaagagaaggagttgcgtcaatacgaatacgtaaactatacgcagatcattcctcccaaaatgtatgtcccagaaggttacacgtactctgaatcgtggcatggaacacaacgaggtggtgcagcgcttcgcactccgagctatgaacatgcgcttgtaagcccctacgctatttatgacccaacaggcaaacgctatgcagatcatcgcgataaatacacggatatgctcctgacgagcgtcgcgaattctgcctatgcaaatggcccccgaggcacgtttactcagacgccgagtttttgtggtgaaaactctcacctgctaaacaatgcaagtcagaaggcgtcccggtctgagtatatgcaaattaaagaacgctattgttcaacgccggggtatcgtcttagccagcatgaaatcgatgttcttaatggcggagaaccacaagagctgcgcgattatcgcatcaaaatgtacgtggataatcagctaccaaagtaa

SEQ ID NO: 243510 - DNA, 918 bp, Klebsiella pneumoniae
atgaaagaaattaaaagagtatccgttctggggccattggtgatcggatgtttggttatggtagctgctggaggttctgtctatacggctgttaaatcatacgacattgataagagcctcaatgatgtgaaaggtattggtatcgaaatcagcaactctttaaaaagtattcaggcgcagcaggactatcaaaccacattattgaaaaatggtagtggtgctgctggtggaaacttacaggattctgttgttgctgcgctgggaaaaattgaaagcgaaaaaattgcacagcaacaggttgagctttataaaaactgggaggcatctggtgaaagtaaagatggccatcacctctatggaaaccctacagcccgtttcactcttttgaactactcagatcttgaatgtcctttctgcaaaagatttcacgaaacgcctaaattcctagtagatagcgccaaaaatggcatggtcaactgggaatggcgtcatttccctctgtcattccatgagccaatggcatctaaagcagccgttaccggtgaatgcgtggcccaacaaaaaggcagcaaaggcttttgggccttcaccgaatactggtttacgcataccgcagggaacgggcagggcttagctagttatgacgaaattcctgcattgttcggactggataaaaccaaatatgcggcttgcctgacagacccaacgatcattaagaaaatcaaagatgacatacaggcaggtaacgctgctggcgtaaccggtacaccagccacgctgatcatcgataaccagaccggcaagacagagactctcgtaggcgcgcagcctttcgacagatttgttcaggtgatagaaggtatggctaaccctgaaaaagcgaaggctgaacagcctctgcctccggctaaaaaataa

SEQ ID NO: 243511 - DNA, 363 bp, Klebsiella pneumoniae
atgaaaaaaacgcttatctttgcgctacttggtctgacttgcttgcctgtgcttagtcagagtaaagagatggttgcaggcaatatttcttccagtgaagtttcggctgacaatagagagattaataattatttggcagatcttacggatgaagacgcggcgttaggttcggtaatgaccgatgttgttaaaattaaaagggagcgttgtgatttaaatatggggattttggacattaaactaatctccacgaaagacgacgtattcaaagaactcgaagagaaagttaaggagaatcctgcctatattaaaagttttgaatattcgggcagggttaaatcccactttggtaaatgcggttaa

SEQ ID NO: 243512 - DNA, 651 bp, Klebsiella pneumoniae
gtgtttaacaacaaaactattttaacgctttcattactcgccattttgaatgcatctcctgcatatgctctgagcctcagcgatattgttgattcagctaaacaggctttgactaaaaacagtgaaaatgatgaaaatcagaactcaatggtgtcaacgtctcacagctacaatgacgcggttggtgaaagtcgcatcgctatcggtttttctccagaaggttctgctcagaaagctattcttgatctgatcaactctgccaagaaagaaattcgacttgctgcctactccttcacttccccagaagtagtgaaggccctgattcaggcaaagcatcgcggtgtggatgttaaactggtagttgattataagggtaacatgggtaaaagttctattgcagcgatgaatctaattgtaaacactggtataccaatccgaacaattcagaaatatgccatacaccacgataaattcatcattgttgatagggttagtgttgaaacagggtcttttaactactcacgttcagccaactcaagaaacagtgaaaatgccattgttttgtataacatgcctcaagtcgcaaaccaatttctatctcattggacatcgcgatggaatgatggcacaccttggaaatcaacctattaa

SEQ ID NO: 243513 - DNA, 339 bp, Klebsiella pneumoniae
atgaaaactttgactcgcgcaaacctgaaagcagttctggctacttccgcaatcatcgcgctcggtgttactgccgcttacgcgaatggtactgaacaaaccggtttctccgctgtctggcaaaccatcaccgattatatgcagggttctctgggtcgcgtgttagttggcctgatcgttatcgtcggcgtcgcggctgctgttgttcgccagtctctgatggtgttcgcagttgcggttggtgcggcaatcggcctgtactactcacccgacatcatcgacggtatgatggcatcgaccgaaggcgtacagactgtactgcccgccgttggcatctaa

SEQ ID NO: 243514 - DNA, 381 bp, Klebsiella pneumoniae
atgagcgaaaatgcagccaaaccatttgcagaactgtcagccgaagaaaaggagaatcgtttttcttctctctccaaagtcgcgcttaaatctctgcgcggttccttcaatctggatgagactgaaaagcagctaaaaagtgaggttgggtcagccagtgaaaaggtcaacctgctgtctaaaaagttagctaatggcgaagagcacaaccgtgaagaatactcagaagcggttaaagaccttaataaagcttcccgcaagctggataagtttctcgacagctacgaagaacttcgcgatggtacaggcgataaactgaaagaactgcgctcctttcttgatgagcttatcggtgagatcacagatgagcaggttctttaa

SEQ ID NO: 243515 - DNA, 1467 bp, Klebsiella pneumoniae
atggcattaacagatgaacaacagcagatagcagactacacaggtaggttgctttgtggtaaggcatatgcaggttcggggaaaacattcactctcattcagttctccctaaagaatccagataaaaagattttatacatagtcttcaacaaggcgatcagggaagaggctgaacgaaagttcccgaaaaacgtccattgtgttacttcacatgcaatggcatatgctaggttcaaagaatacgcagacaaaacccggcagaacatcagcatcaaggagtatcgggacattatgggagaagataactggcaggttgtgaagttagctgtggccggtcttggtaactttatgaactcgtcagatcgagacatcatgatggagcacattaaaaagaatgtcgaaaatgaagataaaatatcctcttctcgttttgaaatggcactcagagcggcaaaaaatctctgggaaggaatgatagatcgaaactcggaagttccctgtacagcaaacactcttttaaaactatttcagttatctaacccagcactacataccctctacgatacaattctgttcgacgaaggacaagatgccaatccggtgactcttgatatcgttatgaataattcttgccaaaaaatcatcgttggggatgaccatcagatgattaaccggtggcgaggcgctgagaatgccttatctgtagttgaagagcggggggctgacgtactccgattgaccaaatcatttcgtttcgggccaatgatagccggacttgccaatttgatacttagtatgaaaggtgaaactcacccactaataggattaggtgatctggactatgtatgtgagccacgggaaatagcagattatggctttcatgctgttatcagcaggacgttcatgggtgttattcagtcagctcatgaagcgattatgatgggcaagcgtgttatgtggaacggagggataacaaagtataatctcgatgaattactagacatttatcatcttaaaatgatgaggctggatctcgttaaaaataaaaaaatactcagtgactatggtaactgggcaaattatgtggacatagctgaaagcacgaaagacacaaatatgaatcgtgccatcaggataatggaggaatacatagacattcccggcatgattgccaccatgcgaagtaatgaagcaaaaaccgaggctgaggcagaccttgtcgtgacgacagcgcatacaagcaaagggctggagtggaataatgtgattcttaatgacgatttcgcctctatccttgaagctattgacatgaaaaagccaaaggcaaccataattgatgaaatgaatctcatttatgttgctattacgagagcaaaagacagactaagcattaactcggtgattatcgaattgataagtgaatattacgcacgtcaagaaagaggagaaagtatcgttattgtctaa

SEQ ID NO: 243516 - DNA, 657 bp, Klebsiella pneumoniae
atgagcaacacaataaccgaaggaataaactcttatttagcctcgctttatataaacatgtcactgaaagactggacaccaaagtcatcctatcttgtgtgccgtgggctggtggacaacggtatattgcatggtgatgccgtaataggtgttcttcgagagcgtttttttgagtcatatgacgaagaacgacctgatggttattctgttcgatattcaaattatgcgtggattgatgccggtagtgaggggttatttgatccatgcaggccagattttttacatcctgataaatgtatttttaaaactaagctatctgctgaatacttttcccctgtaaatccgttgacgatgaccatcaatgatctgccaagtcattataattcagatgaaatatatcctgttcggcgaggtcttcataaggaggtgttcagtcgtttacttggtttcagggtagaggttgaaggtctgactatgacagaggttgcctatctttcagccctaccgctaaatgaactaggaaagaattctaaattagtttatgagtttttgataaaaaacaacctaagcaaactacttctattaaagaatgtagagaaggtttttccacaattggctaaagcttctcctcaatcattccgcagtacaacagtgtag

SEQ ID NO: 243517 - DNA, 1116 bp, Klebsiella pneumoniae
atgactgagaaacgtggaaccgggactgaatatggtcaggacaaattaaaggacagagcagataattatgatttggctgctgacgaaaaaaaaccaagagcgaagttgaaattactcggtgttctaattgttgccatcattggcgtgggggcattatatccggttctgtttggtggaagtaaaacccccgcagaaaagaccgaagaagtgattgcgttaaactctgatggtttacccgttggagaaaacgaaaccacgaatcaaaaagacgctgctgataaagctgctgctgataaagccgctgctgataaagctgctgctgataaagctgctgctgataaagccgctgctgataaagctgctgctgataaagccgctgctgataaaacagatagttatactgatgctgagcatcgtcttctggacaatgctgccccgttaaatcctacaacagagatcgtgtctgctgaaaaagtgcaagaacacgcaacaggccagcttcctccagaggatgttaaaggcatcgcagatgcagtaatccatgatccaacagtgaaggctactgatgaagccaaaaaagtttctcaaaatggaacagaaatccaacaatttgacgccggtaagtttggcattggcgctgatagtagctctgctgtaattcagcagccccgttcaaatcaacatcagcaaccaattcagaaagtagttgaggataaagagcagtcttccggcctcaacagcgacgatatcctgaaaagctatacagggcaatcaagcgaagtttcctaccattcacaatcacaaaatactgtatatgtttatggctcatttgcagccaaagtttacctgctgccgcttggtaagaatgaaaaaattaatgcatatctttccgaccccaaaggatgggaagtaagccaactgccgggtgatattctacgcattaagcggtcaattaataagtcagagtggagcgaagctactgatctatttcttgtcgcagggaaacgcacgtacactctgatcctgcaaggcgttgaccagcccaaattacgtactgatagtcttcgctacattgatccaaaggcccctcctgcggctaagtctggaaaaaaataa

SEQ ID NO: 243518 - DNA, 975 bp, Klebsiella pneumoniae
atgattgaatatgatttccatgataccgctaatgcgttcccttttattagcggagatgcatatgatacgttgaaggaggatatacgtataaatggtattcttgaacctatctatcttttcgaaggtaagatcattgatggccgtaaccggtatcgaattgctaaagaacttggccttgatatcccgactcaggaatatgagggtgataatcctgtagggtttgtgcaaagtatgaacctacatcgacgccagttaacacccagccaaaaggccgctgctgcggcttttcttgctgagttcaaacaaggacaacatactgacgaggaagagtatgagacacaggaagaaatagcaaaaaaactcggcatatctcgcaggatggttgttgaagccaccagccttaaaaaaaatgccgatgtcgaattaatagaacgagtcaaatctggtgatattagccttcacaatgccacagcgatcgcacgccttaatccagaagatcagaaaaccatcgtcggcgaaggtactgagcgtgtaaaggaagtagcgaaaaaaataaaagcaatgaccaaggggaaaggacgtaagaaaaaaaacgatcctgaaagaattatagggctggatgctgttgagatttacactcttccagaggctggaaatggcaaagctgagtttgaacagaaagctatcggaatgaaaaatgatgatagttctgaacatgaaaccgtcacggtaaaagtgaggaaaacgcgcggaaaaaaaatatccattgatgaagcgaacgatttcggccactcattgatagacgctataatcgtgctcggggcaaccgcagaggatgcccacgggggggggagcgttatagacgctgcattatctgaaagtcagctagagagcttttctgatgactatgaagcaaccgaattacgtgcgttgctaagcacgggtatccgagtgttagcaaagctggttcagtaa

SEQ ID NO: 243519 - DNA, 1023 bp, Klebsiella pneumoniae
atgcgacaacgtttcttcggaatgtcgggtttggttatcgttttgaatattgttttctcagacaatgttcgcgttcagttactgacactctgcttgatgctgataactaccctactcttcactcctgctggccgcgtacttgtcggtacgtgggccaataaggaaaagtggcggactctcaacgtccctcaaaaaactgttttttttaagttctatgtagctattccagtgatcgccatagcactcatcattcacacaaccgcctactctcgtgtcgtaactgatggcgtcatgagctatgtattccctgccagcgaagacatttccaatagtgccatgttgactaaattacgtggaattatggattctaaactgccaaacattttttcctctctagctttatatttcgcttacctgtttggcattgggtcaattgtcaaaaacatgcaaatcggcatctcaggaaagatgataaaacgcatacgaaatagtacagatgcaaaacgtgttttggagcagatgacttgggatcaatttgaaaaaatactcaggaaatttttcgagtcaaaaggatataaagcaacactaaccaatacaggcgctgatggcggggttgacgttgctcttgagaaaaacgggcgaaaagaaatggtacaggccaagcactggaaagtgaaccgggttggtgtatcagtagttcgtgagatttatggtgttgtccaagcagagcgaatgcaccgtggattcattgttacctctggtttttttaccgaagaggctcgtgaatttgctgataaggtgtctgggaaggttgtattgattgacggaaatcttctcatcgaaatcattaaaggtgattctgactttgaaaaacaaactgatgcgacaataaatagtgcagtatcaattgaagaaaatccctgctcagtatgcggcgggaaaatggtactgagaacttctgataaaaaaacattttgggggtgttctaattaccccgagtgccgaaacactcatgaaatctaa

SEQ ID NO: 243520 - DNA, 372 bp, Klebsiella pneumoniae
atgcttttttattacttgggctacttggtctgcatggttttgatttacgcaatggttcccgttctgggaggcgatatcccactccatgcggggatcatgaaaatctacgcagtgctgaatatagttttcctgttcacagtcatctggtggaatgcgcgaaaacacttctactacgtatggggggtatacctcatagtaatggctggctacttcggattcatctatccagatgctcctgatgtacctctggtggtggtgtttggggtggctgggttgaatgtcttgatcacattctatgatgtagtgatctgccgctgcaaagggatttatcacagaacaggggaacggtacgcagtaccgtttaaaaaataa

SEQ ID NO: 243521 - DNA, 315 bp, Klebsiella pneumoniae
atggctttgaagcgtacctttctgctcatctttgtactaatcagtggttgctctacatcagcagtcattcagaagccctctgtagcggtgcctcatactgatggtcatacagagcgcccttctgcattacaggtattgaaagacgcaggattaatggttcacgacgactacagctcagccgactacatacctaacagcaatcacacaatgatctatgctgatgttcgatatgctccctgcaaaatgatttttcgatacattacgaccagtgatggcaactactggatgccaaatcagattggatgttcaccataa

SEQ ID NO: 243522 - DNA, 651 bp, Klebsiella pneumoniae
atgataattgatgtattctttactacacgagacaaagtagctctgcataccttttcgttggttataaaagctcatcaggaatggcgaaaaagtctgctcaacatctgcgcccaacatgggtttgagtctttctgtggccctgacttttgtactcccgattatttcctgcaagagcgatttagtcagaaattaagaggccgggggtttaacccggtatatgacaagtcaatatacgttaagtccgattatgaagtgttcactctccgacgcgattatcctgctggtgcagagatatatcgtcagattgatgatctgtcgcgaacagcattggagtctgtaaatctgaggcaggaggtctatggccgtccaaggcatgtagggtatcagcacgctgcctgcatccttctgggtattgaccatacctttaataagagtgacataacagcgttctcacaggtgtggcgcgttatagactcagatggcgcagagatgcttgtttcagcgatccccgcaacactaaacgaagaagataaaatgtattccgttcctgctgttcctgatgtctgggaaaaaatatcttctcacgaagtgatttcattattcaatacgcacaatgctcagttgaaaggagaagacgtcaaatggctttga

SEQ ID NO: 243523 - DNA, 726 bp, Klebsiella pneumoniae
atgatcagtattgcagttacattggttctccttgtcttgttgatgattaaaaatgttttgcagaaaaagcccccctctcgttgggtacacgttgctattgtcgtctgtgtcgtctatctattctgtctgcggtttgtcggcgggatctacactgtcccatccgcatcaatggaaccaaatcttgacatcggtgattacatcgttggtgttcgtgtaggcggcctgttagacaatggtgatattaaacggggtgatatagctgtttttaaagccccatcagtgcctcggactttgtatatcaagcgggtcatgggtgtgccgggagatgtggtcgaatatcatcggaacaaagaattcactgtgaatggcgtgccggttggtcaggttatttctgaaacggagcacttgctggtgtttcgagatcaacgtgaaagaacaggcgaagattatgagtttgttgtggacaaaagcactccgtacctcaaatcgaaagataaatggattatccccgatggttattattttatggtcggtgataaccgtgatcactcttgggatggccgttactgggaaaacccgccaggtacaccaaaacatttgcgcggtctaataagtaaagaccagattgagtcacgttatgttgcaaaactattcaacttaaagctctttgacatgtatgaccctcttgaagctgaattgaggattattcgaaacaatgataattga

SEQ ID NO: 243524 - DNA, 495 bp, Klebsiella pneumoniae
atgaggttttttgctccttctatgtatgctgtaaagcatcaattttgtggggatggttttatgctgcgtttttttccgataatgtttgcctctggccgggtcgctcacaatcgaatgttggttacgatcatggactctttggcattatacacattgtatctgtcgcatgtcggcatcatgcgttggtatgtgggtgtgtccttttcaatactgttggccgcatactacattcgcagaagttacacgctctatttccgcctagtcgaaataaacagccttatcaaaacgaacatcgtcttcgatgcagggtttatttccgtatttttactcgtcaaaccagaagctattgacagtgagcctatggaaatccctgttccggttaaagtgccagtcggagagttctaccagcgttatgtgctttacgtatacatgagcctttgtagcgcactagcccgctatgccagaaaactaaaagaacaggaaaatgctaaatga

SEQ ID NO: 243525 - DNA, 804 bp, Klebsiella pneumoniae
atgaatgaagttctgaacgcgagcttgttaaagaagcaattgccagagtatgtcaatgacactctcggtaacgtgaatttcggcccatcgttaaaaactcaaagtgatgatgttgttatggtggggagcgttgccatccgcattgatgatcttatgaaacgatgctctgatgatgtcgaggtcaaattactgattgctgagctggtggatgctatcagcaaagccagcccacgaaacctctatcggtacaaaaatgccgggtttttcggacggttatggaatagcttgacgggagggatagattcaaaggtcatcgaattcaacctttactgtcgcagagtagagaaacttgctaaacatgcgccagaacttcttgagcaggttaaggaatccattcagttgatcagtgggcttagggaactatatcaaaaagatgtggctctgcttgaccagtacatagaggccggcactgcttacttaaatgagtatagaaatagcgatataacacctacgagttctcttgaatatggcatgaaccgactcaagcgtaaactggttaaccttaaagtaactaaaagtacgctggaaatgcataccgcttcggtggaaatgtctcttcacgcctcattggataacctcgaaagaatgaaagactgcgttaatggcctgatacctatgtggcaacaacaggttcggatgttcacgtctggcgcatacgacatcaatactgatgcaaaaactgatgagaagtttcgtgcattagtcaacaaaatcaacgcgaacacagataaaggaaaacactaa

SEQ ID NO: 243526 - DNA, 1116 bp, Klebsiella pneumoniae
atgacaacttctactgatctgtctcttgatatcagcacgatccaatttgaccaacagaaggctttcggtattaccgaagcaaaccgcgacgaaatcctccaagctgcttcaactattcgtctcggtgatgccatgtcagttcataatttcgggcgtcctaaagcgggcgatactaattatctggatacgctgcttgaagatgtgaaaattatcgatcagggccagagtggaaagaaacttaacgaagtagtagaactgacccgccagattagcgaatccgtacaaccttcgccattccagttagctgtaagtaaagttcctgtagttggccccattatttctcgcctcactattatgcagagacgagcattgagccgttttgactcagtgaaaggccagatcgatattctcacgaacggtatcgaatcaatttctacagggtatctcactgaaaacgtgaagcttgaggcaatgtacaatgacgtcatcgttgatgtgcggcagcaggggatcaatatagttgcgtcggaactggctatcaaaacgattgaggctgagcttaaaaagcggcaggaagagttcaaaaaggacaaatcaaatacgctgctggccgttgaaatcaacggtattgaatatcagcttacggcactgaaaaaacgccgttctgacatgatcaccagtcagcaaaaatcttacgatgatttgactatgctgcggatgatccagcagaacaatctgacgatggttgataaattccgttccattgaagaaatgacgttgccagcggccaagcggggccatctgatagttgacgcacttgagaaacaaaacagtggcgtgaaactgacagaagcgattgatgatacgactaacgcactggctgtacgtcaggctgagctggtgaaagaaaactcaattcgtattgccaagcaatcacatcgagctgtctatgacgtagagacgctggatcgagtatctaaactgatgaacgaaaccataacagaagtgaaagcaatacataaaagcagtgcagacaatcacctcatgctggagcgtcgagcggccaagtggcaggaagaacgccgtcaacgactgattgaaggtatggaaaagtaa

SEQ ID NO: 243527 - DNA, 1047 bp, Klebsiella pneumoniae
atgctaaagaaccggtttaaagatgaaatagttgaaccattagtggccgttaaaaagataaagggtaaagcacgtctacacctttgtttttgggtctttcttttcgttgtttcgggactgatgtattgggcatcattatttactgttgttgatttacccacattatcttcaatcgctcaatcctcacctatatcactagagcttactgtgaaaacaccatcctcttcaatcgaaggggcattcgacacggtaacttcttcgctgttttctgggattgatagttttttacccccagtgatgaaactcgggtctgtcattatgttgataattggttttgccgcctttatattcaacaggaatgtcatgtttttagttatgtcgatgtctctggctggaatgctaaattttgcaccagtattgcttggaactaataccgaggaaagttactcatctgcttcatcgcatgtagctgagaaaattgatcttagcggctttatcaaatcaggagatgtgagaagtttccttgaaggagttgaacaatattcagcgcggggcgggttcatactcaatgaaactataaagagtagtaatgctaatcaggatgatgcattaaaccttttagatatattctcaacggatgatgcacagaaagtaagcgttggttttgcagaaacagtggcaaatgcaatatcaaatggtgacactactttgcataacagtacacagaatgtttcggccttgtccgcctacgtactttcgtcagtaggtcaagaggatagtaaacctgtaattgatagcagaaccggctttgctatcttcgaagcggcgaaagaacgggaaggattccatatgtccaatctgtattcgaatgcggtcacagctaaggttacgtcgcaggctaaggttcgcaacttcctgattaacacctcggcgatattgttagctttaggctttgtatccctctggttgtggggggtttcattcaggaacgttcacagggcagaaaaagtgtttattgaagaggaaaagttacgtaacgtcaggtag

SEQ ID NO: 243528 - DNA, 177 bp, Klebsiella pneumoniae
atgcaccagcttgatactactgactttatattaattggcctcgcaattgctgcttttggagtgcattttctttactcacgttacaagcgagtgagagaggaagatgagcgccgtcgtctcgaacgtgaacagccgcaggtctggtcggatactaagcaggaatctgacaagcagtaa

SEQ ID NO: 243529 - DNA, 210 bp, Klebsiella pneumoniae
atgttcagaaaatcagccaagcagaaaaggcttgagtacctcagcaagttcatgacaaacggctatgtgtatgctttgatcgacagtgatggggagattaaagcaacttatcgatataagtacgaaacgaacaaagctcgcaagcttaaaggtcaagcgatagttatgctcaaggaactgttctacaaagctcttgaaaacgactcttga

SEQ ID NO: 243530 - DNA, 261 bp, Klebsiella pneumoniae
atgaatcaaaaaataactaagtttctttttaagaaaagccttggcaaggctattcaaaaagtgttcttattgtcatttattcttttcgtatttttgtttctgcattggattgcttccacttttggtcgtgtacctacatcgatggttatttttttctcatttatagtttttattggtggtgcaaaaccaatgaaaattcatcttttaggtgagagattgaatcttatgacccgtcgctatctcaatataattttcccatga

SEQ ID NO: 243531 - DNA, 459 bp, Klebsiella pneumoniae
atgtataaatatctaatagcattaacgggaggaatctctggcgcttcggcatatggcatctatcattttgggcgactttacttccttcctttctggaaaggcgggcttgaagataaaacattcatatcattagccttacttacctttctggtggtgtttctggtgacgtttgagcacttcctgactatgacgatttacagtacagtgcgtttattccgttcatctgcctttataaatttctccttgctaactgccattgtcaaagcagttcttttcccatttaaattcattgcgtatttctcttcaatgctcataacgactggtgtttttagtgttggggctgattttatatccatgcttatagttggctatgtttacttcttcaaaatgccagatattaataaagggattaacaagaaaattgctggtgggattgctgatgaatcaaaaaataactaa

SEQ ID NO: 243532 - DNA, 429 bp, Klebsiella pneumoniae
ttgtttcgcaagataactaccgggctgatcaccttcttttataaacaccccttactcagtaaacttattactattttgtccactgttttgtttttcattgaaagtgtgtgttatgcaaaatcagacttcaaagatatggcttctggtttgtcagcgattttatacctcacaataatgacaataaacttgtatgtcattataaataaagaatcaataatcgcattccatctaatggaatattttgtagagcaccaagatgaagtcgccgcagatgaagaaattgaattctttttgagggaggcggaaagtaacgggtttaaacctaagtttgaaagctacttaaagagcttaaacagaagacccttaataaaagaatgtatgaagaaatgtatggagctaagcaaacagagcatggagatggatgcgtga

SEQ ID NO: 243533 - DNA, 321 bp, Klebsiella pneumoniae
atggctttacttataaaaacagacagaaccatgaaggtgattcatgctgatgatttggaagccagtaaaggcaacagcggcgagttatcattggaggacattcataactttatcggtggttacatgcaacttatccctctctctccaccaatcctacttcatggtaaagagtatgtttaccttctgtgtgatgaagatggcaaaaggaaacggtgtcctataaatcatcttgccaccgaattcctctccggtacgcgtattgccagtaatgattgtgtcgtcggggatgttctgctgattgaacaccacgaaatatcttaa

SEQ ID NO: 243534 - DNA, 567 bp, Klebsiella pneumoniae
atgcgaattattaagttaattatagctactatcaaaggacagaatagtaaatccgtgttttgtgatgctgttaatagctcacctgagttactaactcgaattgacgaacatcgcgaactaatgtttgcggtggaaaaacatactgacttactggtacgcaaaccgtgggtcaaaagctcgctgctggatatggataactatctcctcaagcttttcagtacagtctacggacgcccccccaaagaaaatgatcatattcgccctcgcccctttgatgctgatagtgttctgcgtggttctttcatccatcctgagtggatacggattgaaggtgtctctgatggtagtcacgaaatgtctggggctgaatggcaaaacgtcgatttcgcagttcaacccaatacagcttcttctgttgttgacttcatcgtgtctcagcttcgtccacacgatggtatgcatgttagtgagtacgacccgcttaccggaaaaggcagattcattaacatgggatttgattttacccccggtatttataccttgcgtctgagatgtgataaccaataa

SEQ ID NO: 243535 - DNA, 462 bp, Klebsiella pneumoniae
atggcagatgcaaagtatcaactgacaagccggatcacccggctttctcaagccgatgagtgggagtctgcacgcaaagaatggcaacttgatcgcatttataaaacagaaaaaccggtgagctgtctttgcggccactcccccataagtaacgtgtgcgtgctcaaaaatactgttaatcgaagaacagcctcagtgggaaactgttgtgtgaaaagattcatggggttgccttctgacacgatatttaacgctgtagaccgtgtatccaaagataacagtaagtcagccaatattcagacactgacacttgctctggaaaagagactaatcactcagtgggaatatcacttttacgtggacaccataaacaaaaggaaattgacagtgaaacaggccgccacgagagagcgtatcaacaggaagctgacactccttatcaaaaacacggatgaaaaataa

SEQ ID NO: 243536 - DNA, 3411 bp, Klebsiella pneumoniae
atgaatgacatcgttcgtaacgaagatagcgttgaacgtatcgctcgctttcagtccctccagtccggggagttttggaagtcaaagcaaaatattgacgaagaggccatacgtgccggtgacgtgcttctgttgatgtctattcgttgggtagagaactacccgcacacggtaatccttcgctctcaccctcggcattacggtgagtatgtaaacatcgaatatatcgatcagaacggtaagaagcagcgtacacataaaaaaatggaagagcatcgctttctggttaatgattttttggatcggttcgaattcgagcctgaccaccagcagatacgcgagcgtgaagttgctgctgtacacgcagaagtcgcccagatacagcaggaaatgaacgatggcatgactaatcctgcgctgatgagatccatcgttgaagaacagcttaagctggatgaagatcgggagcgtaagaatagcgggagtgaagccccggaggcgctacctcctgccctgtatgatgaaacggtgccaatggttacgggtactgtgcagaacgcgctggctaaggggatgactccgcaaactgtcaatgcgatgaaactggccgcaaaacgtgagcatcgcattgccgaaattcagtcaaaatggctggagtcgaaaagaaaccagattggtagcactctcaagaaattaatgccctacttcaacgaaatgcccgctgctgcgctggcaaagacggaggatgtccgtgagtacgttgataaacttcaatcaggcatccaatcgatttttctgtatacgggtgaaggcgtagagatagtaccagtaaaaaaaggtgagtcggcagcacgcgacatacctcttacattcgttcaacgaaaactcattgttgaagaagaacttgccgtctgggcagatctcgatgaatggtttgatttccgttccactgaactgttttttaaagcgctgaacgagcatcccgagctggtggatcagatattcccttcgcaacgctgcgtgctggtcatggcaatgactaaccacgatctcaactacgcagatccgtgggctaatgaacacatgaaccgtcaaaaccgcaaagtcttcctcatggttcgtgatggtgaaaatatttatcaggtattttcctcagtcgaaagtcaccttggatctgcccgtttgttcccgtctcaggatgaaaccgagtctcacttccgtggattggatggctctcagattaagttcgatgacattgcctataccgaccgcctcaaagggttcgagcttcgcgcacttcattacaaacgttttctgctgctaatttgtggccttgaccatcgcgaaaaactgtttggcgatttctatgacgaaccagcgtcaatgaatttcgtttcaatgcagtttcaggaggactattgccgtttcctacacgatgatgatggttcgggcctgttagcggcgaatgatgaacgtccgagcctgagccagtacattcgggaagcgaacgcgtatatgcgctctgggtcacgtatgctttgcaactggtattcgcttatgacccctttaactgcgccgggggcatgtaaagaagaatatcagaggagttatcgttcgttctactatactgcgcgtcccgcagaggatatcagcctctcgattgcctatcgtaaagcccagtcgatttgtgttgatgtcccggttaaacgtgaatattccgattcttggttcaactgcaaagtcgatttaaccgcgagccgtggcagctatgacgactctgataagcagcttccatatctttgtcttgatgctattgagccagacgatctcgaatggtatgtgttcaacaggaaatatcggggcgaccatcttttctatatccgttttttcaaaatggcaatcaagttcattcgcgccgaacgtgaagaagaacaagaaattcgtgaacgtatggccgacgcactggataaaggcaatattggtatgcctgacgagcgcccttctctggttaagcaagctgttatcgcatggcgtgcggcacagcgcggcgctccacttcgagatgctctgcttaataaaaaatcatggcagtctctgctgaaccagatgtacatgctcgcaggcaacgccgataacgagattgaagatgtggctaaattcgttactgatctgggatataagccgctcagaatcgttgttaatgcttcgggcaaattagccgtatatgcggaatcactggaacatgaacgcgatatgcgtgtagaaaagcatgtctgggttcatcgtatcaatttagtccgtggtaagcgtaaagtccgtgaaacaagtcgaacgtgggccattcttcccgagtcactggctgctgaaaccacgatccaccagtgggacgaggcccaagcatggacaggtaaaaagtccgtcttttcttctttcaatgcgaaacaacgaattttcgaacgaattgaaaagtgcagcgacattctgaaaatgttctccgggacaatgagcagagaagtctttgcaccgatttttagagaatggtgcgatgcctatgatgctctgacgatgaatagttctacggtggtaacaccccatctactgataccatttggataccgcgtgagagacgacgagcaggattttctgtgtgtgtgtgtgaccaaccctgaacagctcctgtataaactggcacccgatgagcaatctcgcgaggcagtaaggaaggcttacatccgttggtatagcgaaagctacaaagaagactattcacgaaagctcgtagatggcgcaacaaaaccgacaaccttttccctctatgtagctggtgatgccaatatcagcaatggccgcttattcaatgtcgccgggtatcctcatcgcgttctggggtctgacgcttcaccagatcgtttcgctgatgccatgacgttctataaaagcgagctgggccaaaacagctctcagaacgggaaaaaagtatctctttacgtttcacctcagcttgtcaatgaggccggggaagtatgcgttgacgaactgctgaataacccgatgccggaaacctatcgtccggtggatctcgtgaaagtctatctgaacgattatcgtagttaccgctcaatcagtgatgaaaaacaacttgagtgccactatgcgcaaacaggcgacaaggttaagttccacgattggtatgatatatgtgaacgcgatgtaacgactgatatgcttttgtctggtgtagtcagtggagacattctcgtcaagcgcctccctttcaacaaccgagcggctgcgcaggcttacatcaagcgtaatcatttccacgacacctacaaaccaattgatgagattgaagatgtgccggaagcagcaatgccaccagcgggggtggtcagactggtcagagcatag

SEQ ID NO: 243537 - DNA, 516 bp, Klebsiella pneumoniae
atggtcagaacgcccccctccccgccgactatgagaccagagccgtttaacccggacgctgaataccctccgttcgacaagaatgccacagaggatatcgacgggaaaaaaatcaagctactcgcatctccgctggacacggcatacctgtatgacgtcccggagaaaatgataaacctttctaccctgtcaccagacgatcaccgcatccgggacgctattactcataacatcgctttaaagttagttgaaacactcaggccggggtggccgcatcgggttatagagtggcttgttatccctgatcttattcgccggacgcgcaaggaactactgattactgaaacatatcttgctgagtcactatccgcgtcacctgaaagaaaagctgcattgttccgggttgtccgcgccctttcacctcaacggatctcccacatgagtcaggacgcacaaaatacggtttacaacgtcttgcagcagatggcttcggcccccctctcagatgagcgataa

SEQ ID NO: 243538 - DNA, 342 bp, Klebsiella pneumoniae
atgctggcgctcgaagatcgcagagaacaacgccctcagatagtcagtgaaggcacaacggcactgaaaaggctggtggaggctgcgcagggtgacagcggccaatctcgggtaattgcatcattcttgttgtctttgtacaacagctatcgtttcagatttaatctggttgaactacgaagccttgactttggcctttttgatgattgcattgctgttttgaaaatggattatcagcccgaagttgatgtgcatgaacgtatcgaaaatggttctgcaatatgggagtcgttggcttcccaatggaaaaataacgagactgaaaatgacaaatcaaattga

SEQ ID NO: 243539 - DNA, 534 bp, Klebsiella pneumoniae
atgacaaatcaaattgacaaagaaatcagcaaatacaatctttctgcttttggatggcagcttggggaatttaaccactcaacaccatttaattcacatgtcatctatctgcgggattttcgctctaagcaccagcaattattcactgtggctcaaaaagacttttatgagttaaagctaaaggaggatttgccaaaagacgaatgtgtgaactttattgcgcagatcattaaaaagctagcgaagaagaagaaactaaacgaggttgaaagacaggccattgtccccattatggttcactacataaaaagcactcgtgtattcgctcagtggcgttcacaggcatcacctgacactcgtctgcatatggtaatgaacatttatcacgatggaacgacaaatgcgaacgcagttcgcctgcgtccattcatagtcatgcctgatgccgtcatgctgactgctatggaatttctggattgcacttcacgagtttatgacactgataaaaaaactcaccctgagtggtttaaatga

SEQ ID NO: 243540 - DNA, 414 bp, Klebsiella pneumoniae
atgaacaatatcaaaaaccagatcaaacgttttaacaactccaaacgtgtagctctgatttatcgccttggtttttgtacttcaatctacttgggtgtcactactgctattggagtaatttttactaattactcatttgatttcttgttgttgattttgtttttaatgtatttcactggggcttacgtcaacataatcctcatggaacttaacagttttaaaagaaatcttgttggagagtccagacctaacaatatttggctaccaataatggcagcgtttatcactgcgatagtgttgtatatttcttatggggaatatggcgcagagttagaagagttcgtcttttgcactaccagaatagtattgcggcttatttatcctgactttagttctggggttgaggctcattag

SEQ ID NO: 243541 - DNA, 660 bp, Klebsiella pneumoniae
atgtctatcatccatcttgtaactacatgctcaaaaagtaaaaatggctcgattggcgatacgatattcccttacgaccatcaggacataaacatagctttccagcagtggaaacgttgtttgctcaaacgttacattcagggaaatgacacgaaggaaaccctacatctttatcgtgggcaacattgggatacggccaaaagaatcgctgaaacgcatgataacatctgcttgtggattgtctctgctgggctggggctacgccacagctccgatccatctgtaccttatgaggccagttttactcaggttcgaaaaaaaagcgctgacctctggaacctgctgacgactaaccctatacttccgggccggatatcttcacttgaagaactgatgcgcttacatacgcatgatgcgtttgtagttgccgcatccccgatctacctgaacgctattgagaatgatctcgcgagaggtttatgccacctttcagagccagagaagaaggttactatcactaccacgtcatcatacgacggccagttaaaaccatttgtgacatatggaaatagtggaatgatgaagaagttaaaatccaatatgacgactctgaacataaaacatgcagagtcgttacttctaaaaaaatggctctcttaa

SEQ ID NO: 243542 - DNA, 168 bp, Klebsiella pneumoniae
atgaatataaaagagaaaaagataacagatctccatgtttcgataccggaatctgccggtaaagacacgaaattgataaacatgaatatgctggccgggcttggacatttctatatagccagacagcagcaaaaaaacacgcaccagaacatacttacaaatcaataa

SEQ ID NO: 243543 - DNA, 294 bp, Klebsiella pneumoniae
atgttagacgatcaaattgtgtctgtttttgacttgttaaacgggtataagtatctcatcatttctggtgttgttcttttttatctgattttgatatggcagtcagtcagacattatgcgacctatgtggtaacgaaaaaaaaacaagaagcgcattacgcaggcaagtatgaagatgagttccctgaaattaccaaacttatcataaacaagagcattgtttctttatggctaaacgttttcacgttagttgggatgactgtgtgcattataatgatgtttctcttgggctaa

SEQ ID NO: 243544 - DNA, 771 bp, Klebsiella pneumoniae
atgactggcttgggtagtgctgacgagattggtattggaatcatcgttgatacggccatagacatgctaatgacaggttgcgatctgtttgttaataaaaatgacttcacaccgggaaaggttaacgccaaagaaagcagtaactttgtcagaaacgataccctgatgaatcaacgagtagatttgagctggacgtcgaagagggggtttaggttaggtgtcattttttttggtgcaggaagggctgtacaattatctgaaatgtctcgatcacatacgaacacttacattgctcaatttgaccttacaggaatttattcaactatcgctaaccgtcagaaacaaattgaaccagacacgatccaagcagttttaagcaccaaaaatgacttctccacttggcttttctggcctcagtaccctttaaaaatacgacaacaaaacccaccggtaatggacgctaacgagatggccgcagcttatgagcaatggtatcaatatagtgaacctgcatggtatgagtcgctggtggagcaatcaccccttaacggtatacgagcagtatacaaaggctgcaaacgaaacaagagcggcgatgagttgttctacagattcatcgttacccatatgggtaaagaagaagcgtatcacttgattcactatgataaccgtttttacttactggactatacatatgattcagtacctctaaaccatcctttgcacaaaccgattctggatgcgtgcaagcttagaattccccggtcttaa

SEQ ID NO: 243545 - DNA, 423 bp, Klebsiella pneumoniae
atgagcgattcattaaagactttaaataatatccgtactcttcgcgctcaggcgcgagagctatcacctgaatttattgaagaaattgtcgaaaaattaatcgtcattgcaggtgaacgcagggaagaacaaaaagcagcagaagaggccaatcgcgagcataaggagaaagtgcaaaaacttcgtgcgcttcttgcagaacaaggtgttgacccgtatgaattgctcgatgaaggcggttctactaaaccccgtaagcaaaaggcagtgcgtcaaactcgtccaccaaaatacaaatacactgatgaatcaggtgtggaaaaaacgtggtcagggcagggaagaacgccagtagggattaaggcaggattagatgccggtaaaactctcgaagatttcctcatcgaaccgccaaaagaataa

SEQ ID NO: 243546 - DNA, 552 bp, Klebsiella pneumoniae
atgaatattttcgatggaatgcttaacagtgtcgatttttcccggtttacacctgcggtctacttgctcattggcttgatcattatcttactgttaaagtctttatcaggtggccttacaggccgacgcaagggcagttacgaacttcgaaattacatgcttgcgccaactattatgacgaaggctgaaatggctttctacaatgcattagtgtgcgttatagcggatgaataccgaatcatggtaaaagtcaggctggctgacatcattcttgttaagaaaaatggtagcaattacatggcccattttggaaaaataaaggctaaacatgttgattatctactgtgcgatccggtgaatctaaagccgattcttgtgatagaactggatgacaagagccaccagcgatcagatcgcattactcgtgataatttcgtggatagcgtgttgaaatctgttggtttgccgatacttcgccatccagtaaaacgtgaatacaatcacaacgaactactcatcagcattacaaatacaatttgtaaacaagattaa

SEQ ID NO: 243547 - DNA, 126 bp, Klebsiella pneumoniae
atgggggcaatggcatacctttatgccaaaagacgcttaaacgtcccaacaagattaggcataatgatggggctgtgtgatttgaaagacatcgaagactccataccacttatagaggtagattga

SEQ ID NO: 243548 - DNA, 432 bp, Klebsiella pneumoniae
atgagaatgaaaaataatgtatttgctggtgccttgatgctgttatgcgcctacgcaaccgcagccaatgatcccttgactaacgaccgggcgcataacgtcatcaaggcttacacagccgccatagtagcgacgtatgcgtgccggacaacgttggatggtggtaacggtcagtatcatcaagcgctcaacgctgcgcaggaggcgtttacccgcgctacaaatgatcgggataaggccaaaaggatgatcgcggtattggtaaaacgcattgaaaatgaagaccccggcgctcaacttacccgccagttcgacgaagtgaacgcaggcccggagctacgccacagatcttgtgaacaattggtgagcggcagctcacagcgagccagcgaggctggcgaacaatttaagctcaacgcgcgagcgcaataa

SEQ ID NO: 243549 - DNA, 825 bp, Klebsiella pneumoniae
atgcataactatccacgcaaactggcattatctgactggaataccatgctttttcattctcttaaactgatgttctccgtctcaggtctaataatgatagctgtcattattggctttggtggtggctctatcagtctgcttatggggcaggtgactatgcaggggttagggtacttcattatccagcccgcaatatttaccatctactttgtatgcttaatcactcgctaccgttcaggtaatgactttcttccagtaagtaaagaactccgcaacgtcatcctcaatgttttgatggggattgtggtgacaattctgttactccttatactttggttaatccgcatctatatcccgtctgcaaacgcggctgatgttccgccatctataacaaacgcacctgccggactatcgccgcagacaattcaaactatgccagtcagcttcggctctgtgttcccggtgatgtttaatatctttagcatcgcaacattttccgtgctcgtatgcgtcccttttgtcgcagtcattattggagtgatggtaaactgtaatgcgcccatgcatcgtaaccttgggttactcttccgtggtctgtttcgcaatatcggtacgatgctgctgttctcattcttcgccgtctgtctcttggctctctggtcgtatatggccgttagaaatgaatatctcatctttctgtctgctctcccgctggctttcctgtcggtgttttcctatgtgatcgctgagcagatttacatgcctgaaaagtgcttgtctaagcgcggtagtgttaaaggctcaaatccacaatccagattttga

SEQ ID NO: 243550 - DNA, 666 bp, Klebsiella pneumoniae
atgagaaacgacagcccggagcgcgggagaacgtatgtcatggttgactatgagaatgtccagccatccgtaaaccggttcgcaaggcgacctgaaactcattttgtcatctttgtcgggcaccagcaggatcgggttaactttgacctcgctgccatcctgcaacctctgggtgagcgggctgaatacgtgaaaattcacggcaccggttccaacgcgttagattttcatatcgcgttatttgtcgggaaaatcactcaacgtgatcccagcgcatcctttatcataatgtctaacgataaagggtatgatcccgttatcagctatctcaacgctaatggaacccagatagagcgccagagcgtctctggcgcgtccgaaaccaaaaaggtaaaagtttcacaccttccgtaccaaaaacataccagcaagcgtgaaagccacattaaacgcatcattcgtgcgcttaatgcgatgtctgaccacgcccccaaggatcgtaaggcgcttgaaggtttaattaaatcgacaagtgaatgtgaaggcggcattagcaataaagagcttaagcgagtgatttacttactgaccagcaggggcttggttaacactcacggtaagcgttttacttaccataccggaaacaaacttaagaagacggcataa

SEQ ID NO: 243551 - DNA, 315 bp, Klebsiella pneumoniae
atgggaaagtttcgttcatggttcgaactgctggtttatcgcttaacggtgagcagtgcagaattgagtatggcccgcagtgacagaaaagcaatgaacaatattcggcgtatcttcaatgaagttgaaggcagtatgcgcatctacgaaaagagtggagggagttgttcagaagttggcggtagtggtgtgtcgctaaattttatgggctttaaagtttatgcttttcgtcctgtgggtggaaaggatataaagccagcggatcactctggggagagtaccgttgtctcgtttgaaaaatatcgcacgaaatag

SEQ ID NO: 243552 - DNA, 684 bp, Klebsiella pneumoniae
atgggtgatgaagataaaagtggttatgaaaaaaaaccattcttgttccagattaaaagtgatattcagggtaaggaaatcacctccctctttatgatccatgcacgcaggtcagagctaaaggctttgctagatgagtatgtaaaaactctttatggaaaaacaacgggatgggatagtgtgctgggctaccatgtgtttgacggtggcctcgtccgatgtcgtataggcagagtaagtatattatctgaaaccgtagccacggctttggcaagcagcgggttggttattgatgtctctgacttcaaccggcctgtgacctatgatcagaaaaaaatgattgaacttgaaactaaatcacaaccaacaaagcgggggcacaaaatgtcaggacgtttatttattaaaaactttgccacatgcattcgttgtagttcttccgtggtcacggggaaacccagcgctgttgatcctgcatggaactccgctcatctatatgatgccatgaaatcagaggaacgcagtttccgtaacatgcatagcgtgtctatggatgagaaactcaatatttcatgggccgttccggttactgatgagattgtccacggggaagggcgctgcgagttttgtcattcatattgcgagaaaacacggactatcgtttctatggtcgttgtcatctga

SEQ ID NO: 243553 - DNA, 741 bp, Klebsiella pneumoniae
atgaatatagaaattttttcacgaaatcagaatggtcagcagccatatgttttaataaatgaaaagcgataccttttcctaaagacacgtgacgatgaaatgatcgcaggatacgatggctgtgttttcccgtactcgtgcacctatatctttgctgacagtaatcgacggtcgattgcaataatcatgctccattcccgtaaagagcctgatctgatggacgttgactggaacaggaagaacaagatacccatcatatatcctgaatttactcgtgaatcgagactcggagttccatctggaattcactcgccggacttagctcttaccatgctcaggtcatgcagaaaagcccaccagctttggtcttcgcagtatgttggtaaacagcttttttttgacagcattcgccgttccgtaacacttttcaataaaacatattttgtgtctaaggatcgtaaaattcctaaagggatggatggggcggtttattatgacccgattgaaggttttatattcatcaacgccagccgagaaccaatgtttgcgctcactgaatgcgctaatgaacgttatttttgttctgctgcctacgttgatgggcgggtagtgtcaatgtttgcccttgaggacgcagacatagtaaaacttggtggcgagttcctctttgacattcatcgttctcagatggcccgtcacctgttttctatacttgcaggggaatttggtgtagtggcatga

SEQ ID NO: 243554 - DNA, 1683 bp, Klebsiella pneumoniae
atgtccgagttaatgctgattgacgattacaaaactgattgcacaacatatgaaggatttggctgtattaatgatgtcaggaaactcgttgaagaacgcaccttattaaaaaaacaaatcgtcgaactccatagcaaagtcatgggaaatcgatacggggaggctttctcttacttcgttactgctgccgggcaaaatagcctgcatgagacgctacgcattgaacgcttctttgagttagaccgtgcaatatgtgctcttgatcaggacttttggaatcgcctcatagacgttatcaacgtcaaaaactttatgcctgccgaaaaacgtgaccaatggtttgatgacctcgacagatggagaaaagctgaccggttctcgttacaaaatgtcaggccactcccctttgaattggaaacagtgttgacaacagcgaaaactctatcagatgaaagaaaagactttttcagtgaaatggttgatggtgtttttaaaaaactatctcctacgcattttacgaataaatccgaaggtttttcaatgcgaatgatcgtcgctaacgccatgccttcaattgaccggcactatgacaatcaggagtatattaacgatctgcgaaaaattgtcggtctgatgtttaaacgtgaaggcgctgaatccgtttcaagccataatctttttgaagacttaaagaaatattacggtgaatgggtgccgattgacggtgacaccatctttctcaagccgcacaagaacggcactgtccatgttaagatcagtcaggatatcgcggacgcacttaatgtcgttctggcatataaatatccaaatattatcccactcaaaaagaaacggggtgaaaagctccggggaagtaaattaattactgaaaaacaatacttgctcttttctgaaatcctgccattttctgtatgtaactattttggcgaactggcacggtcaaaatccggtaggtcggttgcggcaatcaatgttcaggaaaaccatgaatattttttacccggtaactatctgcattcagccacaactaacatcaccgtaaaaagaatttttctgatgctgggtggccgcagtaatgaagaaaaaaagaattgttatcgctttgattttgatcctgtgccagtttttgaatccatctttatcaatggcactttgcccgatcaggagtctcaccagttttacccaacaaaaggtgatctacgccggagtgcggtagacctcgctgagttaaaagatagccattctgtgcttgatccaagcgccgggttcggtgattttctggagctattgcccagaaaagttggagttacagctatagaaatacaccctgtggccgcagccacactacgggctaaaggctacaacaccattcagggtgattttcttaaacttaaaccaacagatacaggtttatttgaccgcgtgctgatgaatccaccttattccgaggggcgctggtcacggcacctgtttcatgctttgagtttcattaaaccgggtggaaaactggtggccgtactaccatcgtctgcgtcctccagtcagaaatttgatgctataggcgaaggttatgtagtttctttctctgatccgtatacgcgagcctttgaggggacaacggtgagcgtggtaatcatcacgattgatcgtcatgagaaataa

SEQ ID NO: 243555 - DNA, 582 bp, Klebsiella pneumoniae
atgaccgtatcaatagcttcggttttaaccgttcaaaagaaagaactcgacgaacgtgccatcattcaaaagattgaagatgaatgtctatcgtctggcttcgatatcacaactgttcgtattatggttaacttcattgaccatatgttggaacaatattcagagaaactagctctacctcacagtgaaatcattcaagctctggagtctatcagatcctatagcgcaccaaatttctatcaggaagcgaacctgccagatttagatggtgtaatcatatatgaaacacttgtggactttcgtaatgccatcccatccaaaaaatttcgatgtccttcatgtggaggggtcagtagctcaccttatgactgtgattcgataaaagtttgcaaagaacatccagatggagttatctgcggctggaaatcatacggtttattcagaactattaacaaaggtgctcgtattcttatcctttctgaattcctctctaaacctatcgtgcatgaaatattcatgccgcttgatatagaagaagagaatgacaagagtgacgagagtgacgagagtgaatgtctataa

SEQ ID NO: 243556 - DNA, 435 bp, Klebsiella pneumoniae
atgaaaataaccacacgttatgtcaccccaaataagcagactcaggcaggcgcagggaaacataaaaaaaaggcgttttcaccacggaagccgcttaaatatttccgctcaatagactacttttatgctttccttttcttcggattcattttgctttcgacactacgattcgagagcaaacagaaagaagtagaaatcagccagtctctgggggttgtcaagtcagtgaccgagtatgatcgcgctttcgggactgtgtttataacaacgaacaaaatgcattttatcaccagtatgcaaagcggcttggtgaagggggatgatgtaaccttacaaaaactcatttccggtaaataccagctttgtgtaaccgggaaagaaaaatgcgttggaattgataaaaatttggctttagctattcggccctctgcctga

SEQ ID NO: 243557 - DNA, 492 bp, Klebsiella pneumoniae
atgtcagagcttaaatactggacaggaaatttatcaactggagacaatgttttctatgttcgcgatggtggggtgctttcccgagccatcgtgactgccgtaactgatacgactttttttatttcaggcactgatactccgtttgataaatcaacggcccgtaacccggaaggggtaagggcgttaccatatgacgcggaacatctcgaaaactacttttgccagcagcagagaatgaggttggccgcattgaatatggatgaactgtctgaggatcaggtagcccacatgctcggagggctaaatctggctggtggtactcatgcacagtttgcgctgaaacatgagcgccgggagaggctaaaggcgattgatattcaggcgctttcagacaccgaagttgcttatatgcttgccggtttaaaactggccgaaaaatcaaagcgagtaaatcgaaatgaaaataaccacacgttatgtcaccccaaataa

SEQ ID NO: 243558 - DNA, 471 bp, Klebsiella pneumoniae
atgactgagaaaactattgccgtgatccgaccatcgcaggttctcaacttacctcattactttatctggatggtcattggtcttcttcttttcgtcacaaatgacagcatgtatgggatacccttttacctaggcccggttgttattattatctggcgttatctggttgttcactgcattcgttatgaaatcactactgagcgcattcgtttttaccggggggtactcaaccggaaaatggatgagacagagctttaccgcgttcgagactacagcatccgtcgcccgctgtatctgctgatcttccgactggcaatccttcacgttgacactcaggatatccgtcagcgcacgattaacatggttggcatccgtaatgcagaaaatgttctctctgtgctacgagaacaggtagaggccagtcgtacccgcaaaggtgtgcgcgacattgatattggctctttacagtga

SEQ ID NO: 243559 - DNA, 744 bp, Klebsiella pneumoniae
ttgtacttcgtactcctgtctttctggcgtaataagcaacatgaacgctttcacagcaatactaatggggtaatcatgtcattaaaactcatagcattatgcatattagttgtcgggatagttcttctggtgtctttttttgtgtatgagggaaaaaaacgagagaaggagaaaactatcggtacagcaggcggagcgccaaccagtccgggtaaaatgaacaagctgccagccattacagcgaaaactggttctgtccatgatcttttcagcgaagatgaagaggagactggagacacacaaagctcagaagcgatatcaaatccttatgaagggtatgtggcagacaaattcttgcttaaccataagcagagcgtgatttacgaacgccttgaagaccttctgtctggtgactttcgtatctcaccaaaaatccgcattacagacattatccggccagaaaaaagtgttatcgaaacaaaccctgagcgggcaaaggctctgaatggtaattttaaaaatgcacgttttgatttcgtggttacggatattgataccggtgaaattcgcggtgttgtcatggctgaaaacacgttaaaagcgctctcttccgggccattcatcgcagaactgttgaatagaatgcacatcccattgttccgatacgatgataccagcgacatcagtgatgatgagctatcaaaccttctgtatgaaaaatttgaagaggtcgtaaatgactga

SEQ ID NO: 243560 - DNA, 360 bp, Klebsiella pneumoniae
atgcttgatgctgtaattaactctttttttcttaaatggtttaactcaaaagaaaaggaaagggcgggtgacgctgactggatacccccagtagaaggtgaattgggctatgaagattatgagctgagaaaacaaagtgcatgggatgggtgggtagcgcggagcgattatccgcttatgactaaaaaggcagtttcattaccggaagaaatgtatatttttctgacaaaggttcgtgaggcacgtcaaagcgaattagataacgctaggccaccagcaattcaacgagatcttacagtcaatgcaatgcgttgtctgggtgactacctgatacgacacgatatcgccgggcagcaatga

SEQ ID NO: 243561 - DNA, 960 bp, Klebsiella pneumoniae
atgcaaacacctttttccgttaaaaatctgatcgtctttcgtctgtctcgggatgttgatttatctaaacttgaggagcaaactgcgcatttcaaattttcgccctgtggttcacaggatatggcaaaaagcggatgggtttctcctatgggtgatgagtatgataatcttactcatcaaacgtcaggaattattctgctttgcgttaaaaccgaaaagaaaaatatcccgtcatctgtcatcaaagaaaaacttgatgagaaagtaaccaagctggaaacagaacaaaaacgtaaactcaagcgcaccgaagtagcgtcgctgaaagatgagatccttcaaagccttctaccagttaccctgcctaaaactacgcgaacctttatctgggccgatacgcaagctggtctgattatcgttgatgcggccagcgctcgtcgcgccgaagatgttacggcgctactgcgtaaaaccattggctctctgcctgtggtgccactgactatggaaaagcccattgagctgacggtaacagagtgggtgcgttcagggaagctacctgccgggttggcgttaggtactgacgccactttgaaagcagttctcgaagaaggtggtacggtaactgcccgtaatcaggatctgatttgtgatgagatcgcaaaccatatcgatgccggtaaagttgttgttaaggttgctttggactggcaggaacgtatcagctttgtcctcaaagatgacttctcgattggtcgggtgcgtttctctgaaacacttaaagagcaaaatgatgacattgatcgcgaagactttgctcaacgttttgatgctgattttgtgctttataccggcgaattgatgtctgtaatcaataccttgatcactggtttaggcggtgaagcggaacggaaagccgatgacgcagaaagcaatcataatcatggtgaaggtgagtaa

SEQ ID NO: 243562 - DNA, 420 bp, Klebsiella pneumoniae
gtgaaatctacaagcgaggacattgcaatcattatctctgccattaactctctgatcgcggactctggcaatatcacgcttgaactcaatggcagaaaagaatcactagagagagatttgctctctttaaacgagctgagtttatttacacgcattcgttatcgtaaatatctttcacaacgcatagctgatatgaaaaatgagatggaaagcatcaacaatgacatcaacgagaatgcgcactcattaagaaccgagttgcttgcccttgttcgtaaactgctgttggtacatagcaatgagaaatatgcggtcagcaaaaaacaaagaaatgaggcatgggacactctatctgagtggttagcaatggatcatgaatctttcatcagatatacgaatcaatgcgggtgtgttgtgtaa

SEQ ID NO: 243563 - DNA, 825 bp, Klebsiella pneumoniae
atgagcgctgtcttgaaatgggttggtggcaagagcacgctgatggccgaaataggaaaagtcatgccaccgggtaagcgtctgattgaaccattcgcaggttcatgtgctgtgacattgaacacttcatatgaaaggtatgtggtcgctgatatcaatcaggatttgataaacctatacagaatgattcgtgagcaacctgagagcatcatctcactgagccgcaatttattctcttgctgcaattctcacgatgaatattatcgcctgcgagatgtttttaatcaacgcaccagcgaccttctaactcagggagccttgtttctcttccttaatcgacacggatacagagggctttgtcgttataacaaacggaagggagagttcaacgtgccgtatggtcattataaaaaaccatatttccctgagaaagaaattcatcatttgagtgagaagctgcaaaacgcaactttgctttgcgccggtttcaaggaaacactggctctggccgaaccgggagatgtggtgtattgcgatccaccatacattaagaaaagccggttcacgcaataccacagcagtggctttaacatggcggatcaacgtgaactggtagtatgtcttgagggtatgtatacgaaaggggtcagcgtagtcgcttcgtctcacgatgaaccttatatgcgagatatgtattccgcttttcagcaaaaaaagttgattgctttacgtagtgtcggtgttgcggcaggtgatgagaagaaagcagacgagttacttatctatcgccatgcaaaaagcaccttgttgcaggtagccgtatag

SEQ ID NO: 243564 - DNA, 639 bp, Klebsiella pneumoniae
atggagttgaatgagtatacaaaagaagctctacgcacagaatcgattatagattctgtatccaacatgagtgcgccatcgctctattcagcattgcttgcaacaggcgctataggtgacattctcgatctgattaaaaaacatattttttatggtaaagatattgattacgaccgtatgaatgaatctatagaacgcgcgatagacagtttgcgagaccttcgtcatgatgtcgatcatgacacaataactgacggtcagaagcatgagatgttcgaaaaccagtgtggtttttatactgatatcggcccgcaacaactagcacatatcgacacacgcattttgcatgttgtacttggcatttcaacggaaagtgcagaaattgtccaggccatgatccgtaatattgagggcgcccctcttgatatgattaacctttcggaagaaataggtgatattaactggtatgcaaatgggatattccccgacgctgctggtattccatatcaaaaatacctgagtgcaaatattgctaagttagcagtccgttaccctgacaagttttcatcttggcttgcgcacgaagaaaacagaaatctggttgaagaacgcaaagtgttggaatctggcaccaagtaa

SEQ ID NO: 243565 - DNA, 471 bp, Klebsiella pneumoniae
atggacaaaaacatatattttgaacgccagtgcaatctgaggaacaaatatattttagcattaattgctatcggtattttatgttttgttgtttttgtttttgggttttactgtttgtcagtgtttttttcatcaagtgaaaacgtgccgggcgttgctgtcattttgtggacaattctaagcttagggtgtggttttggggcttgctactggatggtgggattgattcctgaaacaccagaaaatattctcacggctattaagctcatcaaaagagcagatgaagatgaacaaatcaaaccgctggagtatttatccactataattgaatcaggcgtgctgttccgcagaactcatgcattacatgcttataacctgttgtgccaagctaaagagacaaaagaacatgctgaaaaagtagaggagtttcgagcctgtagtaatgaaatcatggaaatgataaaaaaatga

SEQ ID NO: 243566 - DNA, 2067 bp, Klebsiella pneumoniae
atgagcaagacaaagccgacgaccagcgacatcatcgcgcaagcctatcaatcttttctcgataagaaaggtgtaagcgctcgtgcgggccagaaacggatgatgaatctctgctatggccttgttaatggcattgaagtagacagcaacggagagcgaaccggcaatcctgctgtttgcgtgatcgaggctggcacaggtactggtaaaactctgggttactcaattccgctcatcccactcgctaaagctaaaggcaaaacgcttattctctcaaccgctacagtcgcgctacaggagcagattgtttataaagacctgcctgatattcgcgccagcgcagggttagacttcactttctcgatggcaaaaggtcgagggcgttatttctgcaagcttcgagctaaccgtcaatcagacaaagaaatgaatttgttcgggcacgaaaacgagaatatcaaaacgctgcgtgacgagtttgataatgatctttggaacggtgatcgtgacacatatccggtcgaagtgcgcgatgacatctggcaaaaggttaacgcagtaggtggacagtgtgcatctcaccattgtccttattataagtcttgcccatttttcgctgcccgcaaagagttgggaaaagtagatgtaattattgcgaatcacgatatcgttttatctgatctttctctggggggcggcgttgtcctcccggaaccaaagcagagtatttatgtgtttgatgaaggacatcacctgacgagtaaggctatcagccacttttcttcatcctgttcaatcgacgcgacacaaaagtggattgatgaaattttcgatatggtgatcccacttgtggacaattatgatgaagaaatggaacgtcttgtaaccaatcttcatgcgcaagttagcaagctgaaaaaagaacttttagaaacaaaagactttttgcttcgaacgctacctttcaagtccgaatatgacaatcgtgaaacctgcatctttccgtcaggtgaaacgccaaaggaagttattaactatgccaaaagcgtaggcagaatcctcaacgatatgaaaagcaccaacagcaagatggcaaaaatcattgatgatcagtctaaaagtacgcctgagactggtgagcataagatgatagttggagagctggagaatcgtctggatagtcttgtcactgcatggagcaacttcgtaaatgttaaataccgggataaaaacggtattccatttgcccgatgggttgaagtcaatcgtgagaaaaaaaacgaggtcattatcaacagtagtcctgtacatgcaggcgatatgctgatgaaagatgtctggaaagttgtacactctgcgataattacttcggcaactattcgcacattaggaaagtttgatgcatatttggatcaagctggcctgcctcctgaaacgcctacattgctggcacaatccccattcaactatgaagaaaatggcgtgttattcattccgaaaatgcggttctcgccgaaggatgtagacggccacacacacgaggttggtgctgtgttaccaaagctggtgggacgtctgaaaggttgccttgtgttgtttgcctcgaaacggcaaatgacagacgtgttcgctatgatgcctgatacattgaaagacagcatcctgatgcagacgacgttacctaaaagtgaaattgtggcccgccataaactacgcattgaccggggagaagcaagcgtcatctttggaatggcaagtttctccgaaggggtggacttgccgggggactactgtaacaacgtgattattacgaaacttccgttcacggttcctacagatccagttagtctcactcttgctgagtggatggattctgtagggcgaaatacatttgaggaaatctccgtgccggatgcttgcattaagctgattcagtctgtaggaagactaatccgtaccgaaagcgataccggcgcagtgacaatactcgataaccgacttgtaaccaaaaaatacggaaaaggaattcttgattccttaccgcctttccgacgtgtaattcgataa

SEQ ID NO: 243567 - DNA, 1278 bp, Klebsiella pneumoniae
atggctactgttaccgacgaaaaagaaacggtttctccagctaaaaagaagagactgagtattaaagatatgccgggtttcgatatctccagtaccgatatgtcagcaatcatcgaccctgcttgcatgatagttaagaaaggcgggaacatctttcaggctcttgagatgattacccttacattagtcggtgatgagctgtctgtgctggccgttgatattgatactgctcaggttctttctcggggtaaagtggctctcgcctgcggcgacattagtgtctccatacctgcactacagctatcaaacctgatgcgtagtatgaagagcgtggatcatatccgattccgatatgacagcgaagaaaacaaaatgatcgtcaaagcatgtaaaagcacctacaagctgccggtcttcgtcggggatatccctgttatcgaggaagagttcctaaaacccgaattcagcatgtcattcccgcaggaaatgctttatcagaatgtgcagcgtattcttcactgcgcggcacgtaacgatgttcgatactacatgaacgggatttaccttaacatccttgataactcgctcttcatggttgccacagacggtcatcgcatggcaaccacaaagaacgctattcttgtaaaagataagccggaaaatggattaaatgcaccagtttcgtcagtggatatgcaagggcaagatgttggtgttattttgcctgtcggggtttgccctataatgcagaaaatattgaaagggcaaaaaggtgatgtcaggatggaattctgtagccacaacgtgatttttcatttcgacacaatccgtctggtttgcaatctcgttcaaggtaggtatccgcgttgggcacagattaccaaaggagtgaggcaagccagtaaaacttttaccgcgaacttgcttgagcttcgcgagtccatgtcgcgcgcggtacaccttctctcatccgggtctgtatccaaagaatcacccggaaaatgtaacttatcatttcgcgcaagtgaaattgtgatttcatccccggaaacaaattcagtcgattgtgaggagattgtttccgccactcaggtagatggcgatcaggacgaatgtttaattggtattaatggacattatttactcgatgccattaacggaatgctcgcatcaaatgcagagagcaccgaggtggaaattaaaattaaagattctacttccggcatttttttcaagtatggagatacccttgatgtgattatgcctctacgattgtaa

SEQ ID NO: 243568 - DNA, 228 bp, Klebsiella pneumoniae
atgtctactgatagcggtctgggcgataaggaatttcgctatgcggttgtgatatctcttgctcaagggtacataaatattatgtcagacaggcccgaaccatcggttcgccagaagggcgatgcctattcaaagtatgttgattgcctgaataagcaccaaaaaaaagaggttacaggcgattcaatttttatggctgaaaactgttatcttccccctgagttttaa

SEQ ID NO: 243569 - DNA, 324 bp, Klebsiella pneumoniae
atgatggaaattttctctgaaaaaaagaatagtcaagttgaaatgattgagtttatcactgactggctaagtgatattgcagggaggaatgttgacgacactttaagagagaagattcgtagacgagtaacattgctttcaaacgactctgagacacgactgtataatatcgtcaacgatttcaagcagagcaatgacatagaattgcaaaaaattgcaaaaagcatcgctccatttttaaaaaagagtaagtacgagcagttattcatgactcaagaccgtgatcttaaaactcagggggaagataacagttttcagccataa

SEQ ID NO: 243570 - DNA, 372 bp, Klebsiella pneumoniae
atgatcactggaatcctgaaagaagacattgcaacgattgttgctgaaaaggcaaaaagtgagggaataccagaaacatctttggtagaacgctgggttaaactcggtaaactggcggaagagcacccagatatgctgtctggtgatcttatagcatatcttaacaacggcgaatatccttctaccagtgctgaggacgcaccgctgtctcaaggtaaagatgctgaatatgaagccgagaatgtgcgcatgatgatgaaaatgctggtgtacgcactgaacaggcattcccctaatcattcatgtgtaggaaaagcaacgagtctgatgaagcggctgggtatgtataaactcacagacattttgcggtaa

SEQ ID NO: 243571 - DNA, 318 bp, Klebsiella pneumoniae
atggctatgactgagactcaatatctgctcgatgtactaagtgaagaatgcaacgaggttgcagttagggcaagtaaagctatacgcttcggacttgaagagatccagcccggacaagcgttaactaatgctcagagacttgcgctggagctggacgacctttatggtgcgatagagttgctgaacgaaaaacatcccggcacctacattcctaatcgcgataatattaacgcaaaaaaggctaagattgctaaattcatgaaatattcagaacagtgcggtacggtggtgctcgatactgatggagatgaacaatga

SEQ ID NO: 243572 - DNA, 1017 bp, Klebsiella pneumoniae
atgaaaaacatccttgaagaaatcaaaacgttagcaggcgagttaaacggtacttttccgatgaaagatattttatcttccctaagctccaacaagttgagaaaaatccgccctgacgcattgtcctttctggtggaagcagctcattttctctctgaggacattgaaactggtgagtcgtacaagcctgccgaagactacacgggacttcttaaacaatttaatgcagtaatcaacctcaaccgttcactacgccagcaggtttcattttatcgtagaaacattgggaatgaaaaagccaatatcgaagagatcgctcagttacatgagcaggttaattctgaacgtgcagcaaacgaacggctaaccgaagaggttaacgagttgaataataagttgttagcccgagacgagcgcctcgccgcactggaagtgcatgacatggcccacaaccatgcaaaaaaatcatttccttcgcagcatgacgaagctgtacgccgggctgatgatgcagaaattcagttggaacaggaacgtaatgaaagtgcggcacttaaaaaacaggtcgaacggttaggcttggtggaacatctgacaaaaagcaccgcccgtgtacttggcatccagaatgttgatgatccatttgtagctcaggatgtgctgagtcataccagcagcctgatttggaattttgaacaacttactcgggaactaaaagctggtactcagcttcctgaaccactgttttccgcgcgaattttgccactgccggaagacgggttgtctaaggaaagtatcgatctggttgtccatgtggccgggcagatgttggttcatttgagtcaggctgaaagccagtgcggctcgggttatcagcctgactggatggccgataactggcaaagcacctgtatctctggcctgaacaggcatatcagcaaaaataatcccatagatgcgatgaactatatcgccttcgcaacctaccacggctggcccattaaccaacaatcataa

SEQ ID NO: 243573 - DNA, 492 bp, Klebsiella pneumoniae
atgattgatacaaatactcttgaagcgaaattaaaccaacttaaccaaatcaaacgtctgtgtgacgctaaacaagctggcatcaggttcgaacaagttgacagtaacaacatctgtctgatttttttccttttggttgggagcctgatcgtttgggttacacgatttccttatagtataagcggagtggtcgttgctgcttttatttttagttttattattcgaccagttttaaggaagaagctaaggactaccgacgaaagaatttttgccagtgtatatgcgtatgtatctccattgccgaattgtcaagcaagtaaacataatacttatcttacaagatcactaaaagaaagagatcacgaagattacatttgcataaagaattgggtgagaatggaaagtgaagcaatcgagcatatcatctacacgcgttcaaaagaaggcgagatgcgagaaatgattattgaaaaatacaagggcgatgcgtag

SEQ ID NO: 243574 - DNA, 657 bp, Klebsiella pneumoniae
atggattcagaagtaagtgaaaagccagaagggtttagggaaaccagaatcctcattgccaatggtgccatcgctgcgaaacaagctgctttacagcgtgttcgcagtgaactgagcattttgcatgagaaagaagcacagcttgaagatgctatatacgaaataaaagagaatcgcgacaagttgcttcttgaacgttggggaactggcgaaccagaatggagcttcatactggagcggcctgaaaaaaacagccagatactcgctgagcgtggtgaggaagagattaaaaaacttggtttgtttacggcaggagtctttgaaaaaaaccagcagaaagcgctgggggtttcaataagaggagaaaccacaaacaaacaactcaagaaaatctcattatctctcgaaaccatctttcctcatctgtatgctgtaactgacggagaaagggcagtaatagtctgccacagcgcaccggagagttttgatttacagataagacagtcgatatcaaatggacttatcagcgttacaatgttcatgtatgggaggaaagacccgaaatactttaacagttttatggatgcagtaacctttatcagaaataacatgatcgggaaccgtttcaggtataaaactttagacgatttattatga

SEQ ID NO: 243575 - DNA, 513 bp, Klebsiella pneumoniae
atgatagacatgcgcgaactttttgaaaaggatgcaatggaacgttacaaggttcctctctggatagtgcaggagcgccgggacggtgaaagctataacattgacagcagctcaattctttcccatctgcattgggaatggcaggcctggaaaagatgccatgaaaatctcgctcgcgaatcacttgcaatcagtgcagttgatgacaatgacaaggccattatcaatgagatgcgtgatctggcagatactattcgtgaagtgaaaggggaaaacccagaactacgcagcgaagaaataatccatttgtatgaccgtgcggataccgtttttggcgatgagaacattcatgccctgttaggaattctggacaaccttatcattctgcatgaaacccccgtagaactgcccagcatcattctgactgagcaagttgcaggctctatctccacttaccgtactaaggtcattgaagctcttgaaaagaccggcaaaaaatggattcagaagtaa

SEQ ID NO: 243576 - DNA, 471 bp, Klebsiella pneumoniae
atgaataaatcaaagtttctccgctccggggtgattgcaggcggcttattctctctgtgtgtcagtttcggatcttatgctacagtttttaatccgacaaccaaaaccgacaatttatccaaagtacaatatccgcgtattgcgggagaaacggctgagacgcttcaagcctataaacagggttgtcctgactgcgtaaaggtagctcaggatgtatctaagatgcgccagcagtattgtgctgaccgtaacgccagcgttgacacggcgatagctggtgatccggtttacgcgtatctgaacggtgtgcggatggtattatccacacgcggggggtataacagccctctctatacatcagcccgtcaaatcgttgaagcaaatgttgactgcactaactctcaggactgggttgatcgaagccaacatgttttgactcagacattcaataacggccagcctttaggataa

SEQ ID NO: 243577 - DNA, 321 bp, Klebsiella pneumoniae
atgactgataaagaaattaagcaccgtatgtcaaccatacagagaagcattcttatatctctgtatcttttagagagaaaacttgaaggccctatagaagtcagggatctgcgcagaatcttaaacaaagacagatgtgagcgaggcgtgcccgagttacacgcgagcaatttctcagtttcatgcaagatgttaaatcagagaggatttctgcacaaattcagggataaagtaacactctgcgttgcatacaaactaacagaaaaaggagttgttgaaggtgaaaaggaatacactaagttgttaaaagaacttgagtaa

SEQ ID NO: 243578 - DNA, 399 bp, Klebsiella pneumoniae
atgaaaatttctctcaacgatcaccagacggctgttgcgtttatctatcaggatctgatacccggcaccgtgctgaatcaggctcgtctaattcaggaacaaaggcaccttctgaaatatatgctggataatctcacgtttgcatttcaaaacccggacgttgtagatttaatctcatcttcatatgccaatgcaaaactgcttttggcacatcatatcgaatgttgccataagcaaggtgtgaatgaggagtatatgcagcgtttatatcataaagccgggggggactatattgatgatgattccgttattatagacctatacaaaaatttgaatagaccattacctgtaaaacttttcttcttcaacagaatgacaatgagaaaagagaaacgatag

SEQ ID NO: 243579 - DNA, 570 bp, Klebsiella pneumoniae
atgcctacaccaatgattttcacaccgaatatgatgaaaggcatcatatcgggtgagaagacgcaaacctgccgaaaacccggcccgtcgataaaaggcatacaaaagtatggtgacactatctgggttcgggaaaatttttatgagaagggtcgctggaatccgaacagtggccctgatgacgttgactgggaagacgctaactggagtagtttaaaagaagtgctctatgcggtcgattgcgacaaacccaccagtaagcctcccgaatactggtggcgcagtcgtccatcaatccatatgccacagtgggcctcgcgctatacgctaagcgttcgccagctttgccagaagccggttcagagcctgacgctcgatgaaatcaaccgagaggggattggtatattctcttcctacgaaccggcctataaggcatgggagaacctctgggtgtcattgtatgggcgggatagctggctgagcaatcctgagctggtggtcatcggttttaaggtgctggaatcgaagaaaaccagcaacatcatatcaacacgcatggtgggcgcgtaa

SEQ ID NO: 243580 - DNA, 633 bp, Klebsiella pneumoniae
atggcgcagcaagatttagatttactgattgaatccgaacaaatgaggacaatcctcatgtctttaaagcaacttagcactcagtctgacggtgttatggttaatggaaaaatagtaccttgggatgatgcttttcctctgctaaatgcattccctgatttccagacaactcgcctgaaaaaagatgagtggatgggtatcgccgctaccacatgggaaagtgattatcactccagagtaaaaaaaaatgtatcgcgttcaattgcagaagatagcacgctggaaaatgacaatctttatctctggagtctgctcaacgctaccaatcagatccttcgccgagttcttgaatatgtgaataaaaaagagctgatgcaagcggaaccaaatatattacgtgccgcgaaagatgtgcttgttgctttggattcggttatcagtggcgctcagtctacagcgcgtatccgtaatgaactattcatgagcgggatcgatactgttgctatggaattccagatgctttatgcgagagcaaagaaagataatcgtgataaagactccgcaatgtatgtagatatattgactcttatcaggaacctgaaagagcagacaatgaaagatttaagaagctaa

SEQ ID NO: 243581 - DNA, 348 bp, Klebsiella pneumoniae
atgaatgaactacaaaccgcattagatactcttgccaataacgggagctggaaggatgcacttctgtatggtggcgtggcctttatcggtttcactatcgtgtcagcgttgttcagaagcgcattctttattattctcggagcagttgctgccttctatattttctccctgcaaacgccggattcaaacgttgatcttcatgcaattgcgcctgagaagattgtgtctatgatggttgagaggagcacctgcgccgctgatagcgtaggtgaaattaatagcattggcaaggtcatcagaaatggtgatgtgcttgatatagctaagaaatgtggtttaatgccatag

SEQ ID NO: 243582 - DNA, 252 bp, Klebsiella pneumoniae
atgaattataccgccataaaatgcagccaaattgaatacctgccgcagtacctcccaaaatcactgccattctggttaattattgatggagaagatgaagcaatcatgttaggggcgtatcttaacgctaaagaagcaagtgatcagtgtttatccattaataaaaccctcgctgaaaaaagcaccgtcatttcaaataaagataaaatacgtatggaactggacggtaagtgtttcatctattcggagtaa

SEQ ID NO: 243583 - DNA, 555 bp, Klebsiella pneumoniae
atgagcgcccgccagagatgtccagcgtcactgcgcgtcgggactatcctctacagtgctttttttgataccagtgaagacacggggaaagcaacaggaacgatatatgaagaggttgttcgttctattcggcgtcgcaggaattcatccccagactcaccaaagttcgtcaacgtcaccaagaagattgtcggtctcacatgggtggatacaacaaagccaccagcgacgcgctatggcaaaaaaccgcctaaaacagaaggatgggcgtcatatatttcgcccatgtgccaaactaattttgttctcggtgctgatttgccacacggcatttgcaccaccaaacttcttgcgattaaatctgcgatcagtgatttgcagaatgacatcgaatggtacgacagagaaatcgcggaacataaaaaaacacttatcccggatgcggaacatcttgctgaacttgttcgggagaaaaacgatgttgaaaaatctttgcgtctgggaaaaagttatctaacgaaagaaagaaacaagagggtgacaggaaaaaaataa

SEQ ID NO: 243584 - DNA, 300 bp, Klebsiella pneumoniae
atgacagttgcaatcaatagcacatttagcgttcccgttcaaaacgaagagttcatcatccttgttgatcatgataagggcgcttccgttacgaatgatgcagaaaatgttatccgctggctggatgaaaaccttgcaggaggacttggtcagcgcaaagtgtactatcgggatacaacgggcgaatacgacgagctgaaacatgagaacgttaatttcaagggctacattgcctgtcctcgccacattaagcaggcgctggctgagatggtacaaaaagccatgtcggagggaaaatga

SEQ ID NO: 243585 - DNA, 462 bp, Klebsiella pneumoniae
atggaatataccgaaagagagagagagttttatatcggggcaatgtgggctacgtctacaatgtggcgtatgcatactgacagcgttgctgttaaggatatgctcaacgaattacctgatgctcatgatattgcacgatattgcgcagagtatgatatacagccgctgaggctgaatgttatggactcgttaccgctcggctgtgatgctgcatatacctcgattagctatgggccgataaactcaaggggtgagattatctgcgatcacagcgaaatcccagagggcaaagaagacgaatacgattcgtattgcgtgtatgcggtagaacctgatggaacacgacttgtgctggtcgttgacaagtacagcgaagaagaagccaaaggtcaggctgaccttctgacagagcaattgcttgcgattctggctgaaacaaatgaaaaagagtcagccgaataa

SEQ ID NO: 243586 - DNA, 279 bp, Klebsiella pneumoniae
atgaagaagatgatcgtcgtgccggtgttcctgttgctggcgtcgtgctctcttgggctgagccttgatgaacgttatcagcaggcatatgacgacgtggtgcgtgaaccgacagcggagaacgtcgagcggtacatgaagctgagtcaggaagtgtctgacagggatatgcgtcgggcaaaccaggcggctgagcaggccacgattgaaagcgataaaggtttcactgagtatttcaaaaaatatggcagtgatgagtttaaaaagagtcgccagtag

SEQ ID NO: 243587 - DNA, 924 bp, Klebsiella pneumoniae
atgccaattggattaattgctatcgttatcattctggccgttgtgctgttaacgttgtttaaatgcgtgcgtattgtaccgcagggacagcaatggctggtggaacgccttgggcgctatcacagccagcttgacgctggcctgaatatcgttatcccgttcgtggacagcgttgcatatcgtctgtccacgaaagaccaaatcatgaaaattccgtcacaagaagttatctccaaagataacgcggtgctatcggtcaatgctatctgttacgtgaaagttgttgatgcacaaaaagcggcatacggtgtagaaaactatcagatagcgactgtaaatctggctatgacctcccttcgtgcagcaatcggtaagcttgatctggacgagagcctgtcacagcgtgacgagattaaagcaaccctgttgaaatctatggctgaacaaatgacagactggggtttgtcgctgcgctctattgagattcaggatatcaatccgtctgattctatgcaggcgtcgatggaagaacaggccgcagcagaacgtaagcgtaaggctattgaaacgttggcgaccggtaataagcaggccgctatcctcgaagctcagggcgtgaaagaatctactatcctacgtgctcaggctgatcaggaagccgctattctgcacgccaaggctcgcgtatccgaagcggaaggcatcaaagacgcaaacacgttgcttgccgagtctatggctggcgaaggtggggagaaggcaatgcagttccagttaaccactcgctacattgaagctctgagcgctctgggtgaaagtgaaaacgcgaaagttatcgctatgcctgctgatctgactaaagccatgagtggtctaatcggttccggtgtttctctgggggccggtagcgagcttgccaaataa

SEQ ID NO: 243588 - DNA, 459 bp, Klebsiella pneumoniae
atggatggaaatgttgtttggtggagttggatcatcgttggtgcggtgttcctgttaattgagttgttcacttcaacgtttttcggcttatggatggctattgccgcagtgttcccggcagtggtctcttttctgatacctgatatgtatctcggatggcaaatcggtatctggatcatatccatgcttgtctgtgcttacctatgggtacatatcagcaaacgcgataaccctaataagtccatacaagatacgattattgggcaaattggcatcctatcccgaggctgcgacagcgaaaagcaaggacttttgatccttcaaaaaccggttgaaggtcggactgagtggaaatgcatctctgatgatgagatcgcaccagacagcagggtttctgtaacagaaaaagtgaaccacgatgttttgcgagtggttatctctaaatcgtctcattcctga

SEQ ID NO: 243589 - DNA, 891 bp, Klebsiella pneumoniae
atgcgcaaaacctatcaagagacgccgttttctctacgtcgatacattgacggctatgaaggtcattttgtctgcaaaatggcttcccagccagaatttgccgatccatgctcgtcagatatgaccgaagcagaaatagcagcctgcgtagatttgtggctaaaaacatatggctgggagacctacccggaagttgctcttaaacatcgttcgaaacgccctgatttgatagcaaacaaatcacattgggtgcatgttatcgagtgcaaaaaagccttcggcttacctgtgatggaacaagcttttgactggctcagcagcagacataacccaaaagccgggttgccacacatgatcagcattgcggtaaagtgcagtaatggggggaggcgtagtgagtttggcatggaactcattaaaaaagcaggcatcggtcttatcgaagttgaaaaaagagcagggtttgtactaggcccgcctgatcagcaggaaatgcgcgagccgtcctattcactacgagtaatgtgcgaagcccgactcatacccggttctcgacgccttggccgcgttctgcgagaacaactgaacactgacacccgcatggccgtcgctggaactccgggagccacaggtcggtatatgaccgactggaagcgcaccatgttgcgggtcgaagacttcatgcgtaaaggtgattcacataccaccagcgaagtcgtttcttatctcaatgaaaatggggggcatcactggtgcaataaaagcagtgccatgactggcattaatatgagtctgcaacgccttcgatacggtaaagaggaatatgcgcacgggaacgcccacagatggaaatgggttgagggcaaaactaaatccattattcagaactaa

SEQ ID NO: 243590 - DNA, 1407 bp, Klebsiella pneumoniae
atgagtaagaagcttattttagatgaatatcattcatttgttgctacgccaacgattatcaatgagttaaagaaaattgattgcgtccctgatgttcagtacaaagttgatggtgaacaagttttcgttctcgataagctggtatctcttctaaaaacactggaattaccatctgatcccattgaacgtcggaatgtcgttagtcaggcagttttggccgcgatgcccgatgcatatctttctgcgattgaggcagtaacgtcatgggacataaagccagaatcctatgagattcggctagttgatggggcatacatcgtctggcataaagcattcaactcatttatccccgtaaccttttcgtcactggaaagtgcgcgtctggcgatggcagatctactcacaggaaaaaacatccccacccaatacgatacaatgaataaaagtggaggtgttaagacattcatgcaaccagcacggtctgagcacaggggatcgccttctgttgtgacatcatatctgtattcattcgccgggcaagttctccagcaagataaaaatgagaataccgaatttaatttctcgtttagtgaaatcaggggcttcttcccttttaatagcaggccggaagatgtgccggagtcgtcccttcattccggtgattcttttcaggacggttttccattaatcagtcgcgagcattatcaaaacctcttgaatcattctgctgcgtggttctttgacagcgaaaaagctgagaatgaagtaaataattattttagcgatgaaaactcatggttcgggttgctttccgctttcgatctgtcagacagtcatctttcgaaaggttggcaacttaatgatgaagaccagcagactattaacaccattcgccatttttttcctgagctatcctcgtttgatgacgctgtactatacgacaattatcaatgctttatggccgacgttagatgcatgagatcctttgatagcagcgacatctacagggacgaagaatttctgttttatattcttggtgtacatagcatggctggagtaccggaagagctacagatttccgataaggtaaacatcggttttatcgctgcctatttttacagcatcggactgacagtacgagaggctatcggaaaggctaaaaattacgcacgtatcaccagaaatatccacagggtgatgtgggactgtaaaaaggcattttcctatatttctctacacaataattctggcggaaaaataacaaccggccctcgtcgcttttctattgaggattctttcaaagtgcttcgaaaacataacgtgggaagtattaccgctactcagtcactttccagtttcgcattaagcaacgacaagctgagcgagagtaagacaacaaaacattaa

SEQ ID NO: 243591 - DNA, 561 bp, Klebsiella pneumoniae
atgcgtcgtgctttttcagataaaagtgctgcgatattgtctatcgcaactcaggaaactgtgatccataaaagatggtttgctaccactccgcagggagacggtctgcctgatgttcccggtgtttatcgattcagagttcctatggaacattccccggagcaaaaaattgaatttctcgccctgttgcgctggcgcagacacgggatgaaaaacattctctttccgaccttcgaatattttgttgacgatgagttcattacgataccggaaggcaccgagtggacacaccgcgagccgggagatcctgaaatgctttcccaagattctttccctattgtccagcgtatatccgaaatcacatcgtcttgcccgttctgcaagaacaagccgacactcagtggcaggaaggtagatttggaaaccggtgacagatattccacctcgttaccataccgtttcaaccagttttggtttacctgctgtgagtggatcgcgccagctccgcgccagaccatcgaacgcctaatagacgactggaacgaacacgttaagcagtaa

SEQ ID NO: 243592 - DNA, 759 bp, Klebsiella pneumoniae
atgatgaagggatggatactcacgtttacagaaacgaaggagtgtattgcacagtctttccgttatcccatactgtcgaaaaacacttttttcgtatcagttctgactgtgttcgcttttgttattagctggcttacgctctctggcgtgaaaggagatttgaaacctgcggcttcactcacaattttttgctcgtacttcttgtttgttatttcttcggtgagttggtcattcaggatgcgtgaaatgcatactgtgctggtaaaaatcattgttctcagttttattacaattgtattgctctggaattatctcggcgacgggctgtttaccgtaatacagaacatagtatctcacgatccgcaaagtggtgttgttaattcggaggtttttatcgcactaagcgatatgatctcgaatacaatgatagtttgtctctggcccggattttactggttgagtctttcagttatcctgcttgcacagttcaggcaacgagcagacatcacaaaaggaatacttaacagaatgattataaatcttcccgtatggataatgcaggtttttgtctacgtatcactctgcatcgtgcttctgattatatctccacttactcaactgccagttatgatcacaccattgctcactgtctggaatagcgtttttatctttctcgtcatagtcaacattgagaatggtacgccaccagctacggtcattggtcagatcgcgcgagtgagattaaccttgaggaaatga

SEQ ID NO: 243593 - DNA, 558 bp, Klebsiella pneumoniae
atgtttagcaataaagccaagttacaggtcggttctgaatatcatgagtcgctcgtatcttttatcaagcaagaaagcgaatcaggtatgattagcctgaaaaaataccaccgattcattcttttaaaatgggtcttagtgctcctttgtctagtcattacattttcattttttacatcaatttatttattcatccgagatggatcactatcagggatcgcaggaacggctggttatggctttatacttgtattgctgatgactgtactaagcattttatcattcggcctacaaaacaagcttgaatgcattgaagatagatttaatgacgatagccttatgaggcttttcaatcacggagcgcctgatgatgttattgacagcattatcctcgctctgggccgaacaggagaacttagctacgttgaggtgtatgatatatactgggtgtgcagtcgaacctgtaacgggattgacaaagcgcacctgctgggagaacggtatcagcagataaagaaaagagtccgtaatcgcaactttataaaaggtcatgtctga

SEQ ID NO: 243594 - DNA, 921 bp, Klebsiella pneumoniae
atggatgctcctcattttttaacggacaaatttgagttcgatttatcttcccgtggtttcaggatggataaagacaaagagggtttttatatttctgaattaactcaatctgcctggttggggttttcattattctatacatatatgtccgttgaagaaaaaaggatagtagacgatgatcgtgttgctgctgatgataatgttgaaccagcaacaccccctgcgttaaaaaaaataaaaaaacaacaagtgttctttctcgacgatgaaagtgacgaggtggataatgtttgcatctccacttctgagccaattaagcgttcatttaataaaattctttatgcattaaaaagtgatgcaacaaaacaggcaatcgcagttagtaaagataaatgcatcccaatgtggattcaccctgcaaatggtgaagaaggatggcatatatcaagtcatgggtttgctgtttcaagaaggccggacatcccggtaacggtgagcatgttggatcagcggcagattttttacggattctctccatcaggaatcgcgaaaaaaatgcaaccttccgtcgtagctcgtattgcctatagtggctccatcttcactcaaaattccgagtattttaacgaaaatattcttttggaatggattcgtgaacaatctgatccagcccttgtgatcagcattgacaaaggcagccgggatgaacggtctgagcgtctgacctacattcaggaatcaataaaagaggtgcttggcttttcatcctactatcgctggatcacacgcgatacagttgttatcgccatatcacacgataaattcgattatggagaagcaagggaacgtgttcaaaaccctcattggatgctgaaaacaatgagctggcctaacacctttatcctgaaagaaatgaaatag

SEQ ID NO: 243595 - DNA, 438 bp, Klebsiella pneumoniae
atgaaacatttttcagatatcacctcatacctaaatatttccgaccgtaagccatcattagggcaagttcgaaatgatgtgacaagctggggcaggacaaatcgctcttcgcgtcaccgagtaaaaatcactttatggctcgacagcgatgataaagaagatcgcgtcgttatttcaggtgaggttgttcttaacattaaaagaacggccccggaaaagggagtggatctgaatatcgaagttcatcatttctccggttatgatgaagtgaaacgtaagctaaccaccagccaccccgaaaaatactttcgtattgatggacagactcatcccgaagacgtaaaaaccttttatgcttcactgtgtgaacaaattgacaccctcgaacttaatgaacgttactcttttccggggttaaaagattacagagcagcataa

SEQ ID NO: 243596 - DNA, 333 bp, Klebsiella pneumoniae
atggcaagctcgggtgtgagaggaaagcgtaaagaagagatgctcacagcggcaaaagacgatctggcagaacggcttgaaagtaacggtttatggctaagagccgctacacgctggggggaaatgatagatgcctgtgataacgctgacctttgcgaattttacgtccagcgacgagaacattgcatcagaaaatcaaacgaacggcatcgcgccagactggaagaatctaaccttaatgctgatctcagtctcgttagacaacgaattgatgctatttaccgggaaagcaatcttgggccggtatcctactggtatatcgaatgggattaa

SEQ ID NO: 243597 - DNA, 198 bp, Klebsiella pneumoniae
atgaagatctctctcgaaaacggcgttgtgctttatgtctctcatttagctgatagtggtcaacgtaaaagccgccgtcagatggtcgcagaagcagcaatacgttgtttcggcatgaatatgggtgggactctgctcgatgagtcgctaacgacagtggctcgttttgacgctactggtaagcgattggcatcctaa

SEQ ID NO: 243598 - DNA, 300 bp, Klebsiella pneumoniae
atgtttgggtttcgcttttccggttttaccctgcggcactgcaacgatatagctaatttctggccggggaaatcctacaccagctcctttgaagagatcagggtatctgtcgcgaatagcgttactaaattttccatttggcggaataatttcaacaatttccccttttttttcccgaacagagccaccagcctgactaacccacgttacaatgtcacctttttcaaaggatgcaccaatcataattactccctcattttcatgttttgtctgatcatcgataccgtaccacagagctaa

SEQ ID NO: 243599 - DNA, 315 bp, Klebsiella pneumoniae
atgtctgaaactgtaaccgtcattgatgctatgggccgcccaagagaagtaaccgtaatcgctcgatttagtgaaaagatcgggggccaacaattcggatttgttttacataaagcattaactgttaaccgaacagtcctatgtcatgcagcaagcggtgtgcgaatcgaaattctgaaaggaagtgatgtagaaaggatgggtgagattgaagcgggaaaaaaagtgcttcaatcaatcattcaacagttcggggatgaaaaagttgcttcatggctttcatcatttctaaaaaaatatgccagtgagatttga

SEQ ID NO: 243600 - DNA, 318 bp, Klebsiella pneumoniae
atgaaatttctaaagcattttttcgttgcagtgcttctcgtttgttcagtagctcatgccgaaaacccaaaagaagctggtatacctttgaacgtaaaacaatacagcgaattagggaagttcggtgtacctcgtccgatgtccttgtcggtggttaaattcaacggtaagacatatattctttctgatatgcctgatcgtcgcctttacgacctcactctcaatagagcaaaagacggcagggaagtgttatgcggaaaaaaagggaaagggcttaaagtagctaactgctattacatattttttcgtgagaaatga

SEQ ID NO: 243601 - DNA, 189 bp, Klebsiella pneumoniae
atgaacgtaaccatgcatgtaacaggtaaaggtatttcatccatgctcgccgaagagctggcgctgtttggcgaacgtgtaggtgaagcaattgaacattgtcgtgatgaaaaagaatgtgcggctttagaagacgcattgcaggcacttagcaaggcaaagacatctctggataacgcagtaagttaa

SEQ ID NO: 243602 - DNA, 249 bp, Klebsiella pneumoniae
atgaagcttgggccgcgtcaggaagccatcctaaccgctatggtaaagaacggaggtaagtattggccggggtgtggaattgtttgggggaatttcagcaccacccgaataatccttgaatctcttgcagcgaaaaagctaatcaccaacgacggtaataatcgttattccgtcacaaaagagggtacaagtctgggtgatccatatcgttacattaaagaacgagtagctgaaaaaaaacaacaataa

SEQ ID NO: 243603 - DNA, 327 bp, Klebsiella pneumoniae
atgacaccgcaggaatgtcatgattaccagccagatgaacgtgaagcaatagcctcgtttgaagtgaaaggcgaaacgggaacattcgctgaactggaggcattatctgacgtagcccaacatcgtctggctgaatgttttcgaataaataattcaatacctgtcgggttcactgcgatagatttcctgaatgaaaaggaacgccattctcatcacatcttgaagctttcccttacgttatgtgtagatgagcaaaaaaaagcccatgaacgcattttagcgcgtcgtgaagctatgaaggtgaaacatcagagggcattgcaatga

SEQ ID NO: 243604 - DNA, 870 bp, Klebsiella pneumoniae
atggatttaagaaagacatttgaacaacttaccgacgaactgcttgcgctgaaaaagttgatcagcgaaagctcgccgttgtttgctcgtgtctcggtaatccccccggttttgcgcggcgcggagaatgagcctgttaatgagattgttcccattcagttgtacgggcgggaggcaatgattaaggctgtagatacgtggcttgacctgcatattaaagatgagttttctcagaaggcggcacgtcgcgcctcgggggtgctctggtttccttccgatgacaacgcattcactctggaattagttcgtctgttggaaataattaatacactcaaatccagtatagaaaatcacatcatcagcaccttccagaccagaacgtcaaggtttgaagctctccataaccagtgtacaggagttttgaccctgcacttatatcggcaaatccgctggtggcatgatcagcacatttctgcggtcagattctgctggcaggaaaaagagtctttgctggtgccggacaaagttgaattactggcacggatgggcaaagacggcagggaagatgaaagccagaagatcccaatgagtcagttgatacataaagtatcttctgtacccgaagataaacttcgcataagacgacgcctcaaagtgcagccggtggcgaatattactttcggtgacggactgaaaactgtaacagcgccaatgccgtacatcattattcaggatgaacggccagagataaaaatgttgggacattttgatgctttagaacgtgccaagcgtaagccacgcaatgacagggttaaaactgaggtcataggtcattttcacggagagagcattgaagtaattacagaataa

SEQ ID NO: 243605 - DNA, 1032 bp, Klebsiella pneumoniae
atgagaacgttaaacttcaacggaaaaatcaccacgttagaacccttgaccgtaacgctcaagggtgctgtttctgcatcagggcatcgtctgccacgcaacggaggctattcgtccagcccatatttccccggcaccagtattcgtggcgcgatccgtcatgctgcccatcttgtcattgttgaccgggttggctttgacgcggaggggaaagtaccatttgacctcgcagaccactttatgatggctcagggcgttgatattgcaggtgacagcgagacgttcgctgccggggaaatcaacgctggcgcagagttgcgtcgcaagaacccgctactgagcctgtttggccgatggggactggctggtaaagtcggcattggtaacgccatccccacgagcgatgaacaatggggcatgttcggcggtggggcgcgtaccataatgtttgagcgcaacgaatccctgtttgagttcctggagccggatcaggttgaccgccttagccgcattatcacagagcaggccgaggccagcgtagacatcacaactatcaaggctgaacaggccgcgctgaaaaaactgatgaaaactgccgataaagacacaaaggcggatttgcagaaaaaagttaacgaactggatgaaaaaattcagtctcgtaaggatgaaaaatccgaagcccgtgagtccattcgccgtcctattgacccctatgaagcattcattgccggggctgaactgaatcaccgaatgagcattaaaaatgccactgatgaagaagcaggcctgtttatttctgcgcttgttcgtttcgcttctgaaccacgtctcggcggtcatgcgaatcacaactgcgggctggtggaagcaagctggagcgtcacgacatggaagccgggtgaactcacgccagtcaccctcggcgagatcagtattagccctagcggtgtaaaaatcgaaggtgaagagctgtccgctatggtcgcagcttttgcagaggcagatggatttgattttaaagcccggtga

SEQ ID NO: 243606 - DNA, 702 bp, Klebsiella pneumoniae
atgttaaacgctaaaccgtaccgggtgatcatgaaatccttatcccccgtggtcatcagcggcattcctccgtcactcgatggcgttctgtatgaagccatatctcaggtgattgccagcaacaatccctctgaggttttgcctgccttacgtgatgtgctgctgttcaatgaagcattgggggtattccatgcatcatcgctccgttttggtattaccccggaacaaggagtaagcgcggccaccagcgtaaggtgtgactatttttcacaggaaaaactaagttcgtccatattctctcccaaagagaggggggggaaatacagtcagattcggcttgagggtgggccaacaaaaaagagactgacttcccgcccggcttactcagctccttatttgacttttgattttgccggtgatgccgatgcggtagagaagctgcttacactcactcatgttggtgtcgggtatgactatttctctgcggcaaacggggagttcaccgatgttcgtattatcccgttagatgaagatatcagtatttcctctggcgatgttgctgtcaggccagtgcctgacacatctggtttagatggggttaaaggtttgtcccccctcattcctccttattttcacggcgaaaaagtgggggtggtatacccggagccggttcgttttaacctgattactactttattgtga

SEQ ID NO: 243607 - DNA, 1875 bp, Klebsiella pneumoniae
atgaatgttcctgacctgtttgcctctgccgggttaacttcccgtgaaattcagcaggagtacatcagttctgtcaccgctggtatgagctgcgcgaaccgcgtagctcttctcagtgctgatactggtgttggtaaaacgcttggctaccttgtttctgcattacgcatcatagaaaaagacccggatgcaaaatttatcattgcgaccagttctcatgctcttatgaaccagattatgggcgcggatcgacaggccattgaatgcatggccgcgcagatcgggctatccgtcagtttctcccggttgatggggaagtccaactatgtatctccggcaaaagcccgtgacgtgttgaaaagctaccctcaaagctactctgaccatgtgcgggttttaagtgcgctcgcgcaatggtctgggcctctggtggaattcgaagaagagttcggcgagctgcctccggggatcagacccgaaatggttacatactctgtctgggatgatgccatccacattcgtgacaatcagcgtgatgccctcaatgcccgttttgtcgtgacaactcacgcaatggttatcattgattcgctctgcaaaggggttgtgttgggggataagttaaatacgcaccttatcattgatgaggccgacatgtttgccgacatgatggatctatggcagcaacgacgactcaacattcgcgatttacttggctctttgggggacaagtttccgcacagtgccgttgtcgaaattcaggagatggcaaaagaaatcacccgtgttgctgacggacttcactttaatggctcatctgcggcaacagaactgtatgaaaaagctgtggacacactggcgcacgccgggtcaaaaatcagtgacaaactcagccgtaatactttcctgaatctgctgtatagctggcaaatggcaaaagcaacagggggcaaaacgggcataggtgtgtccagaatcagacaagaaccggcgctgatcagcatcaacccgtttgttggccggaatataggccgttactgttcagaatggaaaagcacactccttacctcggcaaccctgagcattacgaacaatgtcgaacgcgggatggaatggatagtgaacgcgctcggcctgaccgaagacatgatttcgctcaaagacattttcaccccggaagactacggcaaaatggagctgactattgccggcgctgagttcccggagatattcagcaatccgaaagagcaggctttctctgaggcgtggatcactcaggttgctgatgcaatccgcaaatgcaacaaaccgctggtggtgctgacggccagccattcggaagggcgtgaattagcctctcgtctggataaggtttcgctacccgtctatctccagcgggcgggacaacctctttccgagacagtcaatgcttaccgtgaaaagcccggaattttcatttctgcgggggcatctgttggccttagcctgcgcaacgaagacggcagccagatgtttcacgatctcttcctgacccggatgcgcttctccccgccagatcgcgaaggtgttgaaagttatcaccagttccttaaaacgcgaggctataaccacacagtcgaagcgctgacgcgtagtttatacatttcacagctacagaaagttgtgcggcagggcaagcaggctattggtcgcggaatacgaagcgaaaatgactttgtccgcgtcaccattttcgatccccgtttccctgaaccaaaagatatttcatcacgacaccgtgtactggaaaatattatcccgatccggttcgggcaggcataccgcacctgtaaaatattatctccagccaaaagaagagaggacatcgaatgttaa

SEQ ID NO: 243608 - DNA, 564 bp, Klebsiella pneumoniae
atgaaattctacgaaaacgcgtttcgcgtgcgcatcccttactctgacatttaccgcattcatcagaatcttgattttctcattcaggagaagtgcagtattaagttaccgtattcgttcaacatacagcccggtaacgcagatgatgcacacattcttctaagaacatcagttgctatgggttttcccggtgaagtgtgtcgcaatctgacgcttaaagttggtgatgccataccattcgtgacgacgctcaccatgattcaacgcgtcattgacgggaaacgtaaacgagagatcactacgccgcctgaattgcaaaagggctatgtcacagaaagattttcccgtgcaggtttagagttgcaggagctgctggtctccccacctgaatatttctacgtgaagaaatccaaaaaggataaagcgattgtgcttccggcatccatcattcgtgccactggcatcgttacgtctgttgaagaggcagaaaaagccatcgtgtatggcgtcggtcgaaaaagagtatttggttttggcctgataaatatcactggagaacattga

SEQ ID NO: 243609 - DNA, 795 bp, Klebsiella pneumoniae
atgaatcatcatccagtagatctggtctataaggcactgacctctattctggctccctatcttacagacgccaagccagtgaccggtagctgctcttgttgcggccgtcctgcatcagagtttggttttaagggcttcgagcaaaaaaatagttacggccagatggtgatgcactgcattccttgccagagtttcttcacatccgcaccggatatcatgggcgtagaaaaccctaaaaaaccgacgaccggtcagaagtttggtatgtggtctggcgttggggcaattatcgaaattaacacactccgcgctgttctgttcgcacctccgggtgtagtcgcgaaactgccaccggcttttttcgagaaggtgaacgtcgtaactgccaccaccggccagcatttgcaatatctgttcaatacaaaaattgaataccctgcgatttatgttcaggactttggacgtaaaacctatgaactggtcagatcgctccgcgccagttacagcgataacgcaatctacgcctgctgcgatcagcttatgacgccacaaaattccgtgtcgtttgtgattgatttcaacaaagcaaaacggttgcacgagcagatggccacttacgaaaaaaaagaagtcgatatctttattcgcaccgtttcgatgctggcctacgcacgcattacaccagaaaaagcatccgatgaatttaaaaagcatgggctggttcctttgcttcgcgctctgcctgccgatccgcaccagagactcacattactgcgtctgctgagaaaggtttaa

SEQ ID NO: 243610 - DNA, 351 bp, Klebsiella pneumoniae
ttgggattccttaaattttttaccggtttttcacgggccagaactgttgcgcttggtgcaattctgttcgttatcgtcggtaatcttatcgatagcggattcagtatgaagatgggttacggggcagcggccagtttgttttatttctggttaatgttcaaacttaatctgggtcagatcccgataattatttgcgtaatgtctattttgctcgttttcacaattctcggggttgatctacaggaaatgtatcgcgactactacggtggttttttactgggaggatttgccgctcttatataccatgacttccgtgtctggctaaaccataacaaaacctcccgcgactga

SEQ ID NO: 243611 - DNA, 549 bp, Klebsiella pneumoniae
atggctgaatccctcattcctgacacgaaaatcaacatcgaaaatgttattaactcccttccagactgctggaaaaattcacctcgaataatgaatccgtttcgtgcaaaactaaataatggcgcggtatctatgctcgtcgatatcggcgaaagcgccattttatttatggtatttgtcagcgaaaaaagcgttaaccggtgtgaaagtattgaactgtctaaagaggatttctatctctacggtgccagtgagatcatcaaaaaattaacaccgctggtggacgaatggaataagtccaccagtgaaaaagaagataaacatgtcaccgcgagaaatgtttttatggatattgtatcggcagctaaaatatctggaatggctgttatcccggcgatgggcgataacagttttcatttcaaaaacggaagcgataaacataacggcgaagtcactgaatgcatcgaagggaattaccggctggtactgaacaaactgagcgacagtgaagttaaaaaaattctcgctctgatcgctgatattaaatag

SEQ ID NO: 243612 - DNA, 738 bp, Klebsiella pneumoniae
gtgaacacgaacaatgcacgttcacttgaacagacactgaaacaactcaacgaagcgtttgcggcgaatgcggagattcagcgtgagctggcccggctgcgggccagactaagtgatgcttatgaaagagaagctcagcctctacgtgctcagttagttatggggtcagaggtgattaaggaatgtcgtactcagtatgaacgtcaactggttgctcagtggggtgggctgatatcacctgatgatgaaatacgatgcgcgacttttcttcccggattcagcccggacttatcgatgctgtttaaccctccatatccgggattttgtgaaggtatgcttacggagtttatgcgccaccattatctcttccgagtacaaacgagtgaagataaagactttaatatagggctgcgatattcaccggagaaagacaatttaccgcttatgctgaaagggattacagcgcttttaccctacgtgacaaaaacagaaaccggccatattcctgtttcagcgaacacctacatcactttctccgacagagaaggagggagtgcttacatagcatatgagtcgctcgtcatcgatcctgaatcgggtgaaacgaatttactaattcataagtccacacgagaagaaacagtacgacttcatttttgtgacgttaggtcggccttgctacatctggtttctgctcgttattcctccatcaatcggtacagaaaattgtttgaataa

SEQ ID NO: 243613 - DNA, 492 bp, Klebsiella pneumoniae
atgacacggggcgcatttgaggagtcactgaaattttatggtgatcgtcagagagatgagaaaaaatgcactgcgctgaatgtccagtacagcgcgatacccaagaaatcggtgatgacagtaaatgtcgagatggcaaaactgaccggtgcaacggctgactgggaaaataaaatttacctgcaattgtcacagtatgaactgaggcacttttgcgaacttctttttggtctcagaaaaacagcagagtttaaatatcacggggctggcaaaaataaggggcttaccattcataataatggcgctcagggtgttatgcttgtcatatcagaagcgggtataacattacagcatctgttgaaccatgatcagcgtattgaactgggggcttttgtgatcaggagactggctttgtcctggcaggtttcggtaagtgatgttttggcaatacttcgtcagtcagtcgcgatcagtaaaacggttggcaattaa

SEQ ID NO: 243614 - DNA, 879 bp, Klebsiella pneumoniae
atggaaaattcgattaaaaccaagaagttgttcaaggatgcgatcccggaaccggaaaatgatacacagaggaaattgacagtcactacgcattcatcggttcagccagcagtgttaatgcggatgggggtttttgtcccgactaaaaagaagggaacagaagctgaaccaatcaatgccagtagtgctctttcgaaacttgaatatgccgcgaaagagggttatacggatgtggtgattacaggcccacgcctcaacctgtcaacggattttaaagtctggatgggtattattcactcatttagccgtagtgatgatgccctcaaaggaaacacaattactttaaaattcagtgactttgcgcgtaactgccaatatccaaacaagcgctttgattctcgtttgcgtaaagagatccgggattcccttgcaagaattcgtgggaaaactataaccttttcaaggccgggtgctactaaagtcgatatcacgggcttattaaaaaccgctcagtttgatattgagacgaatactattgttctcgaagctgacgaaaagctgtgggaactctatgctgatgacaaccttacacttttacgcaaaaaaccgttatcagctttgcctcgcaaagaagctgcccaagctatctatacatttatcgcttcccttccggctcaaccaataccgttatcgtttaagcgtctccgtgatcgcttgttacttcccagtagcaaaggggagcaaaatcgtacaattcgccatgcgcttgaagatttgcgaaaaatcggttatctcgattatgaattggaacaggatgacaccaaggaatacattgttaaaatcaaaagcagaaatcccactttaaagccagaaggctga

SEQ ID NO: 243615 - DNA, 654 bp, Klebsiella pneumoniae
atgtgccgaagcatatcgaaatggttgttcgtgggatactggttcaccttggttgtgatgatcgtgatatcagtagcaggtagtcgtgctctcatacgtagtgatgacttacgtgtttatctgatggcttcaagcatagccccatacaatactaattgggtaacggtgatcaggaatcgtgataagccagacattactgcattgatggtaaatgtgcctggcaccgacgataagacccatatgcgcttcatagagtacgcgacaagcgatttggctaacttggacagggatacgcttaaaagcctcgtacagagcgatacagaagcttctattcttggtaaacccacatacggaatgctggtagatgtcgatcctaagcaggccaaaatgttgatatatgacacaaaggccgacatggcgcttcttggtctaacgatgttctccgtgccggaagtcgcatttcttgcggttgccacattgataacgctgcttaagtatgtgttaacggggagaggacgaagggcgttggtggtctttagttactggacaaaaatatcctattttgtttcgtttttgtctatgtgcgcagctctctggcttatgtctttcccggtttatccttcgctgctgaaatgggttcgtgagttgttctga

SEQ ID NO: 243616 - DNA, 264 bp, Klebsiella pneumoniae
atgtacggaacagttaaagaagttatcgaacgtctgtctcgtagaaaccctgatgagcctattggtgccatattctgggatacagatgacgttaaagaagcgatggctctccagcgcaatgagaagattgatgacgaactagcagagcaagctttgtgtcgggttatctctactcatgacgcgaaccacggagtttgttggggttcgtttgtctgtactgtagatgacatcagacaggagttaactgaaaaatccgaaccttaa

SEQ ID NO: 243617 - DNA, 510 bp, Klebsiella pneumoniae
gtgagtgtattttcattccaaacatcttggcgtgatccggtgctggtggctttgaatgtgctgtgcattattatttttcattatgagctgacggcctatctcgctccgctacaaaagccttttccactagagcttggtttttctttttctctcgcacttgctgtatttatggagttgcgacatgggttcaaccggttagtgttcattcagttaacaacgactgttatcgtgttcatattcggaacgttcgttgcacatctgctgcgttaccagtatctgtcactggcttctttcatgatatcagagccggatattgaaagcgtaatcggcagcgactactacgcagccctgacaaatcctgctattggctatggaagttgttttgctgctggcctctctttctctcgccttttcgtctggaagatattgagaagactattgcttgcgatctttacacgcgggtgtagtgataaaatttgtccatgctgcggaaccgcagtaaaaaaataa

SEQ ID NO: 243618 - DNA, 651 bp, Klebsiella pneumoniae
atgtcctctaaaaataccaaatatgtcacctttacttttaatggcaaggctccttctgactggatagctacacttaccgaagccagcgaacaaacctcatggatagacccagagtcgccggggagcgttatcctgagagagattatgctcaatactccggttgatgttgaagcatacacagacagaagcactattacggtagaacttccgaagcaggctgacgcgttatcatcattgctgggtatgtatgccgctgctgatgcaaaaatacttttactggcaggctgtcaaaaagtcagctcgctggcgagcgtcacacttaaaaccgtaacgcttgagccttctggttttgctatctccagtgaacataaggccgaacgttccctgtatttcatgacgcataatgggatttgcgttaaggcggactcctcagtaactctctgtccagaaaaacttcccggcgcgactttcttcgccagcgaagaagaattggattctgcgggtattgtacgttggggtgaaaacggcggggaagggtggcggactcatgctaccgtgatggctggccgcgttgtgttaattaataatttcggtaatattatagctctcggcaatgaacccgaagatgccattaactcaattagtaactga

SEQ ID NO: 243619 - DNA, 984 bp, Klebsiella pneumoniae
gtgacacagaagagagaacgccctgttctgggccggacttttgccgaatcacctctttccggcaaacctaccgtgacgacggctgaaagtagtcaacgtttcactcttgcctcgggccacaaggttacatttcacgtcgaagtgatccccgcagagtcagttgaaagccgcacttatgttgatcagagtattaacggaagagatcagaacgcactcagcgccgaatctcttacagacatcacccgcacactgcccttgcagcagtttttcccggtgattggtcgtcaggtcggtgaacgtattgaaatcctcgatggttcgcgtcgtcgtgctgccgcgctcatttgcggagtcggactacgagtcatgttcaccaaaagcgatattagcgcggatgatgcccgccagctcgctgccgatattcagacagccaaagagcacaacattcgtgaagtcgggatgcgcttgatgacactgcgtgacagcggcctcagccagaaggaaattgccgagcaggagcgtctttctccgacgaaagtaacgcgagcaattcaggctgcatcagtacctgaaatactacttactgtattccctgttcggtcagaactgacgtacccggattacaaaaagttgctgactgtatctgaggtggctgaaaagaaaaaacttgaacttgatgcgctggtggccgatgtgggaaaagaggccgaaatgttgcgatcaggaacgaatctgttacctgatgattacaagaatgaggtcattaagctttttgacaaatctatatcgactcttacggttaaacctgcggcaaacaaacctgttgttgagtcgctgaaaaaatacgatgacagccgcgcatatgcacggaaaaaatcgaacagcaaagagcggaaggttgtttacgaattcagtcgaatcagtaaagaggcgcaggaaaaaattgacgaggcgattcgggcgatcataaatcaatatgagtag

SEQ ID NO: 243620 - DNA, 1206 bp, Klebsiella pneumoniae
atgtcagataattttgaccgactactcgaaaccggtaatcgcgcgaatatcatgctcaactggctgacagagcaaatccagtcgaagcgggaagaattcgagcaaaccgagttttataaaacctactctaaagccgcagtatcaaaactacctcacctgagtaagcgagctgttgacgccgcagtcgaggaaatggaagctgccgggtatcagtttggtaagcgtcagggtggtacttccacacagtacgccatgactatccagaacatcattgatatttacaaacacagaggtatcaaaacctaccgtgaaaaacgcggaaaggctttcgttatctttgttgtgaatttgaaaggtggtgtatccaaaacggtttctaccgtcacgatggctcacggtatgcgtgcgcatccgtccttactgcatgaagacctgcgcattctggttattgacctcgatccgcaagcgtcgtctacgatgttcctcaatcatcatcacagtatcggtcttgttaataactccagcgcacaggccatgttgaacaaagacctgacccgcgaagagattctggaggacttcgtgaagccttccatcgtgccgggcgtcgatattattcccgcctctatcgaggatgcattcattgcatcccgatggacgcagctatgcgatcaacatctgccggggatgaatgagaacaacgtcctgcgcgaaaatatcattgacaaaatcagtgacgattacgactttatctttgtggatacggggcctcaccttgacccgttccttatcaactccttagcggccagtgatatgctgatgacaccggttccgcctccgcaagtggactttcactctacgctcaagtatctgactcgcttacctgagcttgttcagcttattgaagactcagggttgcaaagcaaaatcattgccaacgtcgggtttatgtcgaaaatcatcaataaatcagaccacaaacagactcacagttttgctaaagacgtttttggtggtgatatgcttgatgctgttcttcctcgtctggaaggatttgagcgctgtggggaatcttttgatacggctattagcgccaacccgcaatcttatgccggtagccccgaagcactgagaactgcgcgtaccgccgcagaggatttttcccgtgcagtgtttgaccgtattgaattgttgagaggtgcagcgtga

SEQ ID NO: 243621 - DNA, 450 bp, Klebsiella pneumoniae
atgacaagccatataaatgaaattattgaaaggagtcgcgccgcttttaaagaagggtggttgcaggacatccttaaacaaccgggcgcaccttttcatacgctggccgggctggtgggtttgattaactcatcacgcgccagtcacggtttcgagcctttaccccaagtagatcgcgaagatggcgcacaggcaatacctgtagagctgctctacatcttgcctgaacaatgtgactgtcgcgccatcgaggcagaatctgccgcacgtctaatacatccctacaaaacaaatccgcttgcggttaggcctttaattgtagagccgatgttgatagacggtgaattacggttggccgttcgtgatggctgtttgcgctatatcgcaatgatcatggcaaaagagcagggggcacaggttgattttgtcctggtaaggtctatgagatag

SEQ ID NO: 243622 - DNA, 321 bp, Klebsiella pneumoniae
atgacaatttccgcttcgttattttactatcaagacctgtcgccatcggcgaaagcccttgctcgcgcacgcgttatggctttcgaagaagaacagtacaaaaagttggttgctcacttgaaacaaaaccgtccggccagcagtatcaatgcgctggttaacgatacataccatattcagcgtgtagtcaatagattacaggccgtgcgtaaataccagcgtgcttcacagcatgaagttgaacgcgccattgaggaaaatctctgcatgttcgatgctgacggtcgctattatatgttcactcagaaagccttctactga

SEQ ID NO: 243623 - DNA, 357 bp, Klebsiella pneumoniae
atgagtataagaatcttatgcgtgctgcttaccctttcaggtgcagccttagctgatgatactgctgccatacgggctgataacatacctgatcgcgagactgcaaattatgtatctgatatcacagaagccatacagcgccagatttatgatgcgaacagatataaagggaaggagtgtagtctgagcgtgaaaattgaccgggacggtaatattcttggggctaaagctgaacagggtgacaaagaactgtgccagagagcattaaagatacttggctataccaaactacctaagccgccctctgatgaaatatggagcaggattcaaaacgtcacgctgatattcaggccgtaa

SEQ ID NO: 243624 - DNA, 738 bp, Klebsiella pneumoniae
atggcctgtaccgctcttgttcctcttgatacgcgccagaagtgcgcgatgactgctattgccaagattgaagcccggataagtgccgggcgttctttgccagaatatccctatgcaaaagctttttttcgtgagttgtccgggaaaaacgttatatctgcccttgatatccgactggtcgattccgcttatgatccctctgtcaggggtggcgcgaccaagactgattacatcaaggctattgacgtcatgattgaaagtcgtggagagcagtggatactacccctctctaaatcagtaatagtgtccatctttccagcatcgtcagtcaggcagatacagcgccgcgatcaccgggagcagattatcctcacccgtagtgagcgccggtcagaacagcaaaaacaagagagaatgtttgtggctgaaaatacaaagagcgatgcgtggatcgctttgcagttttgcctgccgggtacgcacaaaagatggttacaggtctggagagacgaattggagaacgcggggatcacccagtgggaaatcagggcaatgctgacgcgctggtggtcagggttctggatagctcgcatccgcactgactggcgttggtgcgacagcatgtatgagttcctcaatgagctggactacgttattgaaacgtcgtcacctcatgatcttgctctttgtcgtgctgccttaccgctggcactgccccaaaccacgattacggcctga

SEQ ID NO: 243625 - DNA, 477 bp, Klebsiella pneumoniae
atgagtaacagcattaagctgttttatccgcagaagagcgaaaccttgccgcacctcgaagctattgagcttctaaaagcggcaccattcggcgtattcctcgcgtttattgacccgcgaacggacacatacgttcagaacgtctttccatttttttatgacccggtagatacctacgggctgaaagggcgctgttttatttcagaatggcacggactgaacatttacatacccgccgatcttggctggtacattgacggtcagcaggatttacgtcagagcacaaaaattttccgtcaggaattgggatatctttgtgctggccgttttgtcacgaaacctgtctctgtggaagtttcagtgaatatccgcgttggcgttgaatttgatgtcgctttcctgccgctgctttcacgctccggtcacgggaagatagccaccgctacttccagttctcatcgttcgggtagttgttaa

SEQ ID NO: 243626 - DNA, 276 bp, Klebsiella pneumoniae
atggttacaccagaagaacattatcagttcctgaaaaagcacttccgcaccaaacgttttgaagaccgtaacggtaaagtttggggggctaactattccagaaacatcgctgcacatcattacaaggatttgcaggacttcggttatagcctcataggacgccatgagtcggctaacggtgaatgtgttatctatgattctgacctgaatcttcttgaaagcacccctgaacgtagccgtcagtccgcaaagttgggaggttcttgccatgagtaa

SEQ ID NO: 243627 - DNA, 249 bp, Klebsiella pneumoniae
atgttagcagaacgcccgccagtcggcacggaaactaaatttaagattggtgatcgagtccattgcttcggaacctatcatatttattgcgccactggcgttattgaacacattgtctggtttgagggaaaaccagactactacgtaacaccaacggcaaccccctggtatggttacaacgataagtcgttgcaactggcgactgaacctgtttgcaccacaccagaatgggagaacctcgtgttttaa

SEQ ID NO: 243628 - DNA, 660 bp, Klebsiella pneumoniae
atgaagaaccataaattttacatggcttgtctgcgcgatacagtgggaagcaatatggcgtttcattgcgttgatggtgctggatacactaccgatattgataaagccgcagtcttttcgaaagaagaagcccagcgcttctgggattcagcccgtgagtttgatgtgccagtttcccagtattgggtaagcgctctgtccgattttcatgtggactgccagtacgtgccgactttgacaacgcttgttgatggctgcacccgctatgttggtttcattaaggggcaatgggatggtaacgatttatactggttgtgtgatggatatatcccggtaactaattttcataacgcgacaatttatgacaaacctgatttaagtcgcgaaaatgttgtctggataccatttgaccgggcagatgcagtgaaacgccgcacgttcgccctgcgcctctttgacagacgcacaatgattcaggcaaaagggttaaaaatgcctgaatggcttaaacgtcagcatcgtcgaaaacacaatgccaccggaaaggttcgctggaactgtccggggtgtggcaaaattcactggcagtataatccgtatgattttgacggctgtacacactggggttgcccggagtatgtgcgtcgttttgaagattga

SEQ ID NO: 243629 - DNA, 381 bp, Klebsiella pneumoniae
gtggatgctttttttaacagcgtgagttgggggtggacgatattcctttccattttgatttggggaggtgcggttgcagccatcattttctactacataaaacaaaacagccgccattattactattccggtttcccggagtttcctacgaccattgtcgttacattcgcggttgctatggcatggctgggagcgttacctatcctgaatgctatggctgatcagtatcaatacggttcactggttggtgcgtcaagagaaattctttccgatcagtacaggcccgtttacggcagaggtggtttccagttctttgttttcttcatcattgtcctcgctggtgggcttatcacttattttcgccgggacagacggtattaa

SEQ ID NO: 243630 - DNA, 237 bp, Klebsiella pneumoniae
atgattaataaccgcatcatacacctgctgctgttgctcacgttgttggccgtgtcgcttgcgttataccggctcaccttatccatttccggtggcccgttcaaagcagtcatgatgcctgtctccggcgttctgggcgcggcgggcgtcgcgtggttgtttcagttacttctgatcacaatccacaaatcacaaatattgtgcacgcagattttccgggggaaaaatgctggataa

SEQ ID NO: 243631 - DNA, 279 bp, Klebsiella pneumoniae
atgaaggtaaaagaccttatcgcccttctccagaatcaggatcaagatgcggaaattgtcattgccgggttcgagacagtatgcagcaaaatggtggctcagcccgatatggttatcccctgtctatccgtcgcggctacccctgattgttatgaaggtaacagacaattatcaaccagtggcgaaccgtctgtgtggattggctggagcggtgactatcgcgctgagggacacaggaatgtgctgaataacccagagtattatgacgaggacaaatga

SEQ ID NO: 243632 - DNA, 405 bp, Klebsiella pneumoniae
atggctatgaccaaaaaagaacagactgagtttgaaaaggccagaagttatcgttctctccgctttagcgactaccccaccagcaccgacttagatgccaaatcgtccgatgccgggctgatagtcggttttgctataaatgtcagccgcgtgttctctatgggaacaatcagtagctatagcccggcagtctatgcggcgtggtcagagcgcaactcacacggcaccggtaacggttcagatgaaaatagacgtcgttcctctcagggttcggttccgctatattcaacaaaggtacgggcacttggtgcgctgcgccgggagctggaagacaaatttgcagccctgcttctggaaatagacgacgctattgccgaagaagcattaaaggaaaaccaaaaatga

SEQ ID NO: 243633 - DNA, 189 bp, Klebsiella pneumoniae
atgaatagtatgctggtggagaaaagacaacaagtacccggtatgactaaatgtacgtgggaaggaatgcccgtcacggtgatcgatgtcggttatgccggaaaaagtattattgagtgcttgaaggataccccgctggaaaatatggaacttggaggaatcaatccttttgatgaaatgatcgaataa

SEQ ID NO: 243634 - DNA, 192 bp, Klebsiella pneumoniae
atgaaatctatgacatttgaagatgcaaaatcaaagctgctggaaaacgctataggccgtaacgactatgcaaaattaacaacgtggcaggagttgagtgaagcggcggaacaggaaatctgttttgcagaggaacgtattcgtggactacatgatgttgctacacaagcgaacgaaaatgaagagttttga

SEQ ID NO: 243635 - DNA, 750 bp, Klebsiella pneumoniae
gtgagcgtcacagtcagaaaggccattatccagaacgtcaggcagtttcgaacagtgcctgctggcagctttctctggctggatatacccggtgctgatgattttattgagagccgtgaagtacggaaccttgacgccctactggagaaatacggaaaatcggaagaactggtggttcatctcgatacgccggaaggtgactttgaagacagtttccgcataaacgtttgcgacctgatcaatccaccagccctgccctgcaagactaacggtgcgattgaagcgcgggagattgtagtcacgtcattcggcgctaaaaaaatagagaacgtcgaagcactggtgacattttacgccggttatctgctggagaaattcagggcgagtcatggttataccggccctgacccgatagttaaaacccgctggcatacaaagtcatcatggggtggacgtaagggcataaccatatcgccgggctatctatatagctcaaaatctgacttttttggattcacgtaccgcgaataccggcacgttagcaagtcaccattaatcggtgactttatttcgctcaaccgcttaaaccacgttaaagcgctcgtggcccatgagctggcgcacttcctgcaacggaatacagaatatgcctcattgcctgcgctggactaccgacgaagccacggcgaaggttggcaatacctttacactgtaacgcgagcagatcttaaccgcttcgtcagcaactga

SEQ ID NO: 243636 - DNA, 279 bp, Klebsiella pneumoniae
atgaagctgactaacgcccagatttacactctgcgtcgtttagccagcggaacccgttatactctgcgcggcgacaataaaaaggcgcgcgaatgcagaccgtgtgtcagaagtcgtttcggtactgatgatatatccgcaccatccattcccgtgctgattcgacttgggctggtggatttcgcccgtccggggccaaaggtacactccacgttttatccggtggtacttaccgaagcggggaagcaagccgctgccacaatgaagattaaggactga

SEQ ID NO: 243637 - DNA, 171 bp, Klebsiella pneumoniae
atgaaaccatatggccgtttttattccgttagcggttgtacctgtgcattatgccgctctcgcggataccgcaaaggtaatgcctacggcgacgctctgcgggccagtaaacaccgtgctcgtcaggaatcaaaacgtgaaattaaggatctgattcatgaagctgactaa

SEQ ID NO: 243638 - DNA, 213 bp, Klebsiella pneumoniae
atgaaaagatacaccatcattctgagcgatcatgctggttatgccgattatcatgtgctggcctcagacagggccagtgccattgcgaaagcagtcaccgaacactgtaagaatgacagtgaagacgaacgtgaagaacgtcagaataagcgctctcatcaaccagagccaattttctcgtatcgcgggtggtgtaagcacgcgaaaaaatag

SEQ ID NO: 243639 - DNA, 675 bp, Klebsiella pneumoniae
atgccttaccttgaacctattaaagcgcttcaaattatcacctcctggctggaggacaatatcgcaatggagtctgaaattatctttgataatgatgaagacaaaaccaacgccgaaaccctgcttccagccttacagcaggcactcacgctattactgacgctggaaggacatcagacaagtgaaagcaaggctgtttctgatacaaaattgcgggaagattttgaaaaacgaaaccggggccgtagcggggaaaaccgctatgtcgtggacaacaacacagggggctactatctggccgaatgtcagggctgtggggaaatattcccgagcaatgaatgtcatggcggtggcccgatagccgacagtggagatcatgacgacggttactgtccactctgtggtgaaaccgacccggacgaatgtgttaatgcagctctggcgtggaatgttcagcaaaaacgcattctggagcttgaaaatgcgctgatgctgctgaaaggcaaaattctgcggatcaagttcagcgactgcggctacggtgccgtacagcacatgtctggtgcgggtaacgactattgcaatgggttcgttgacggaacccgaaacgcgatcagtattgtgaaaaaagccagtgtcgaatccggcgtagtcgtccagattgaggaagcatga

SEQ ID NO: 243640 - DNA, 195 bp, Klebsiella pneumoniae
atgtatacgctagttctggttatggcgcttggtttaaatgaaggggttacttcccagaaaattccgggttactccactttggcagagtgcggcaacgcaattaataatatttattcgccaaagaatgattcatataagcaatttaaagcagtttgtgttccctccccttccggtagcgaagagaacaatccatag

SEQ ID NO: 243641 - DNA, 558 bp, Klebsiella pneumoniae
atgaataaagctttatatttgatcctgctgtcagtttttgttacttcatgcacagcaaaaaaaacaacaaccgaagatttatcagtttcgcaaactcaaacagatgtgtcgggatatcttgaagaggctgcttatcgtgatagcaccccattcaaggacggcatgtatgaaaaaatgtctaagctgaaaccttccgaatacgtcttttttttatccagtctgcgtactcaggttttggagaaaccgacaaaagaggcattatcagaatacattttcgccgaaagagtttttattgaatccaatgagttttttgacaactcagacgaattgaaaaaattttacaaaccaaagccggatgatattcacaaagcgaaagtgcgcttactgagaaaagccgactccacaaaaactgttatagactataactacatgcactttttgtacttctcgatgcaggcaggagcgggttccagcagagaaaacgctttggaatatcttgctgcgaaagagattgtcattaaggactggagggagcgaaaaaacgcagaaaacagctag

SEQ ID NO: 243642 - DNA, 582 bp, Klebsiella pneumoniae
atggaaaatcaattcgaagtaaaagcagatgaaggagtatcaaacgaccgtctgcaagaagcgattaacagtatgagcttttggggaagcactaccggtattgaacttgacgaaatcattatggtattcagcgaagcgttgcgtaaccgcagggcgaaacaatcggaagacattgtacattctggccgtttgcctgttgaacatataggttacgtgacccgtgatcgcaaaatgatgatcttcaaagacagtccgtgcatgttgccggaagatgtaagcacgctggataaactggttgtcttatccgggcaactgattaaaccagaggaagatatcctgtcagaaaatgttgccctcaaagcagaactggaacgtgcgtgcggcttctccgtggatacccctctgacagaccgtcgtttactggccgttcgcgccgatggtgtggacgagtatgcagcctttcaggatgctgtagccgaaaaatatgccaaatcctctccgggatgttatggggaggaatctgcgcgatatgcagccacatctgcccgaaaattttcgcagagtttacgaaaaaatgggtaa

SEQ ID NO: 243643 - DNA, 252 bp, Klebsiella pneumoniae
atggctgactggtggctaccaatgccaatgttgacagttctggctcgcattaagcgtggcgatgtgctgatcggggacagtaatggccgttactactggaaagcagacaaaaaacgctgtagccctactgcaaaggcgctggtaaatcggggccttatctgccagaaaggttttaacggggaaatgtcgattacaccatccggccggaatgaactggcgtctaattatacccgcatcccagatatatcctga

SEQ ID NO: 243644 - DNA, 1059 bp, Klebsiella pneumoniae
atgagcgatatcaacgtacaggaaatttttgctaagtctcaggacaactctgttattggcgagctggcggacacaatctcagcaatggaaaagaaaccgacatctcttcgtcagattagcgaccttctcaccaaagcgaaaaaagataacagcagcatccagtttgacgaagccgatgtgggccgtaacaacggctacagagtttctccgtcatggctgtacgttgagccaggattcaacctgcgcgacctgaacattgagcaggcagagatgttcaaaggtatgtggctacgtggtgcgcgtatcccggcaattctggttaaagtcgtcatcctcaacggtgttactcgactgaaaatcatcgatgggcatcaccgctttgctggcctgatggcagctatcaatgaaggtgcgaacatccctacagtgccgattgaagaatacaccggtaactctgcggatgaaatttttgaaatgctcaaaagcgcacagggtctggcgcttaaacctatcgagcgggcagaaggtttccgccgtctgcgtggctggaacctgagcattgaagatatcgcggcaggttccggcaacaatgttcaaacagtacgccgttcgctgattctggtcgatgcagaagagaacgttaaggcgctggtgcgcgaagagaaagtatctgctgatgtggctatcaacctgctggtggaatgcaaaggcactgagcgcgacgtatataaagagctacttgcgtcactggaagaagcacaaaaagcgggtaaaacgaaggttacagcccgcttcgttaagtctaaaaaagtgtcggttaaaccgaaggttatccgtgaaacattcacgtccctgctgccagcaagcaaccagatccgctctcaaattgagcgtgtaaaaactgatgatactacagaccctgacgcggttagcatcaacatcccggcagacgccgcccgtatgctgctggccgttctggagcagtatgaggcgagccagaacgcgggggcagccgaacaggaagagagcgccgatgaaagcgccgtagaagagcaataa

SEQ ID NO: 243645 - DNA, 861 bp, Klebsiella pneumoniae
atggaacaactgagtttcaatgaggaaaggttaaattttacaacggctgctgcaacaatagttattgagacggtgaagcatcctgcgctcgtattggtcatcgggcgaccgggttcgggaaaatcaacgctggcggaagcggcttgccggaatggctgtttcgagttgattgacgtacaaactacgcggccaaaagactataaaacgattttgccgaaaatcctcgacacagataaacatctcatcattgatggattagaccttaacgttcaggaatcagaagtggtactgaacacactgagaagcctacaggcacaggggaaaggcgcaatagttacgtctatgttttgtggcgactccccagtcacccgtctgttcacggcaatgttctggatagaaaatgaatcaccaaggatcgatggacatattcgctttaaaagaattttgagccttgatgaatacgacccgcgagggatgaattactcccggagccttacgactcagacctctatctcggatgtagaacccacagaaccaacgctaaccgcccctctccgtaacgctcgccggaaaaataaaatagcggcgcagacacccgaaagtaagttacaggcggagcacaagtctctcgcggaagccatcatcgctgctggcctaaaaacaggtttgatctcgtcccctgatgagctggcatttgatagccacgaccgcgacgttattgccgataccatcaagtctgctgctttggattcaggtgtaatctccgaatctgctgatttcactgtcgatgaactggtcaggatcgtacaaacgatggcagacgtgtgtgcttccggcaatggtgaggtgatatctaactga

SEQ ID NO: 243646 - DNA, 207 bp, Klebsiella pneumoniae
atgaaaattgaaatcacccccgcacaacttgaagccattagggaactgacggatgattgcgcttcaatgataggttgcggcgaagacgactccgaccgcatctggttaaagcgcattcggcttattgatcgtatgcttgcgaaaaacggttatcagcgagatttttacagggaagtggtcactgatgctgacgaggataaactgtag

SEQ ID NO: 243647 - DNA, 315 bp, Klebsiella pneumoniae
atgaaaactgctgatgagctggtggaactaaccccggcgcagttgaaagcatggaaaaagctgcaaacggcggtgaaagagttcgtgagcgccggtggacagttttattccaacctcgacatattgtcgggttataacgggaaatacgttgcaaagattgagccgggatgtactggtgaatgtcaggccgatgactgcggtatgccgtccattacaaactctggtttttgctcttacgctgacgatgatgcggggctgttttttaccccagccgggaaaaaattgttaagcaaaggcgctgacgatgaaaattga

SEQ ID NO: 243648 - DNA, 420 bp, Klebsiella pneumoniae
atgttcactatcggcaaaaaaacatttgatatggcaaagaagcgcggctttgagttgacgcttgaagaggggctggcttctgatggttcgctgcttctgtgcttctgggaggaaggtcaggactctgaatggctgttcagctaccaacacaccggccaccagcttgtctggcatggtaacgtctacgcacctgaacgtatcgttaatcacctgcctaaagttattgacgatgagtacgagcttcgggacatgattagtgttcttggcaagctgacgtcacagaaataccgggcttcgattaatacttgtcataaaaaagtatctgcatggaatagctataagcgccctaactggattgaatgcgaacgccagcaactaatggggaatgtatcccggttcggagcgggaaatctgttttga

SEQ ID NO: 243649 - DNA, 303 bp, Klebsiella pneumoniae
atgtttacagtcggaaaaacaactttcgatatggctcatcgtcgcgggttggcactgacagtcgagagcgactgtactgatgacggctctgccctgctctgcttctgggagcgcgatgaagagtcggagtggatattcagctaccgatttgatgatcgagggttgatatggaatggtaacgtttatgcgaaaagctttctggtaaagaccatgccgaaaataatttctgacgaggctgagctgcgcaatgtagtgcgtatgttaggaagtaagcgtctcaacaggtggttgaacaagtcataa

SEQ ID NO: 243650 - DNA, 639 bp, Klebsiella pneumoniae
atgctgtatatgctgacttgtttagtgattatggtgtacgtgatgtatctgatggttacgacactgaaagataagcttgaaaatttggatgaccgccgggttttcaggccgggagcgttaaccactttcgcaacaattggtgcggtaatactgctgttaagcccgctgtacatgacgatggtcagtgattcccttagtcaaaatgcctcactattcacacagtgggccgggcttgctggtggactgctgttggtcggggtttatgggtggttgtttctgaaaagacgtgccttttcttccggtcttatttcgatttgtggggccacccttatttttatttttgcgaacagtttgctgtttgtttcatcctcaaataccggcgtgcttaatttcggttttatcagtcaaatgacaacaattaatgatgtcgaatgtgaaagcggaatgatggccgtgaacctcgcagataaaggacattcttccgaatggcgctgcccacaaggcttcgttctgctgggaatgtccagtaagccattcattccgtggcctacgtacagcacgggcaagagtcttgagcttaccgacgccattcataccatgatggacagcgcacaaactgctacagagaaaaaagactga

SEQ ID NO: 243651 - DNA, 321 bp, Klebsiella pneumoniae
atgagagtggaattttctaaataccgttgggtgatctgcgagtgttgtgaaggtgaaggcaagaccggccaccctgctttcgctaatggcatcacatccagcgaatggaacgaatgggatgaggaagatcgtcgaaattatatggacggaatgttcgatgtcacttgtgaacactgtaagggacgcggttccgtcaaagtacctgatgtatcccgtatgacattcgctgaaaaacgtgagctggtggttattcggcgaaactttcgtgaagaccgggagatcgaacgtattcatgctattgaacgggcgatgggggcgtaa

SEQ ID NO: 243652 - DNA, 333 bp, Klebsiella pneumoniae
atggtaaagcgttatgttccagatgcgggcgatcttatctggattgattttgacccggtagccgggcatgaacagggcggacaccgccctgctgttgttttgagtccttttgcctacaacaacaaagttggcctccttctgtgtgttccatgcacgacgcaagttaagggatacccctttgaggtcacgttgtccggcagcaaagaaggcgtagccctgtcagatcagataacctgcgttgactggcgagccagaaaagtgacccaaaaatccacagtaagtaagtcggagcttgcagaaatccgggccaaagcaaaggcgttgattgggtaa

SEQ ID NO: 243653 - DNA, 246 bp, Klebsiella pneumoniae
atggctcaggtaatagtaaaaaaatggggtaacagcccgtcagtccggttgccagtagcagtgatgaaagcggcatcgctaaatgtcgatgatactgtcgatattgaagtagaagatggtcggatcatcatcgtccctgcaagaccgaaagaatattcccttgatgcgctgctgtctggtatttcctccgataatctgcatgacaaagtggattttggccctgcgaaaggtaaggaattgctctga

SEQ ID NO: 243654 - DNA, 558 bp, Klebsiella pneumoniae
atggaacatagcggatttttatttgtcattacaggcctgagtataatcagcgcgatctactgcatgtacgagatgcaaaaaaaagcgattaagacgatgagcgtacctgctgctacgttactgattattgccgcgttaagtagctatacggtttatacagaagcaccaaaaatggagaatggtgatgctcatctgaatacagttcttgagcatcaccccttaccgaaacccgtgaccaaggatcgtcattggcaggggctggagttggcgtacctcaatgccacgattaaggctatcgagtctggacgcgcaattcctgatgagggcatggaggtagcaaaaatcaacatgtggctttacaacaaagaaatggccggaaagcttaacgttgacgattgggatggaaaaggtcgcgaactggatattagccgagttctgcgatatcaggaatggcagaagtgtgaaaatgaagtttctaaaaaaccgggcgatccgagagtgtgcttcccaccgtggtcgattgccagtggtcatgtccatacgcctgatgttgagtga

SEQ ID NO: 243655 - DNA, 276 bp, Klebsiella pneumoniae
atggacagacttggagtgggtgctgcattcgcgatttccgggctgatcattttcgtcagcagcggtagcgttggtgacaagggtattatcaacgaggcaattaatgcgtttctggttgatagtcatccctttgcgctggtggcacggattggattcggtctaatgatgttggggacgcttatgttgggttcgtggatttttctaccggggaagcccgcgagacacgccgaagtgaaccggccaaagcaaagcgacaaaaacagcgaacagcggtaa

SEQ ID NO: 243656 - DNA, 687 bp, Klebsiella pneumoniae
atggctcaggttcagagaggtaaaacggttcccgttcggccatcagcgacgtatttcagctatagccccgacgacgggtatgaggagcatgactccccggagaaggcaaaagctgcggcagacgctgcaattcatgcttatcggggtgaagcatgtgatggctggcctgatgaagtgaccggcgttacgtggggtgtggtggcacaacgagcggcaaagtttggcgagcgtaagcgcaccaatgaagacgcgcatctttctccagaaattcaaacggtctgtgactactatcttgcgccggaagtgaccgtaccagcctcactccccttccctgcaacgaccgcgctgcggatgtttgccgaaatgcttgcctgcgaatcaattaagtcaggaaatgatgatagctggcgtagtcgtgccagtaatgcagcggttgaatatgctgatatcgttgatgcggaaaatatcgcagccggtcttacccctctctctccaccagcagatctgatgccgcggatttatgcagaggctcgccgggcatatcgtcagtaccgttctggtgtgtcagggcaaactgtcacggatgctgataaccctgactttctgttggttatggctgcgtggcagatgtttgtcgggctgaacggtgagcgtcaggacggtaaaaaaccggagagtagtgactga

SEQ ID NO: 243657 - DNA, 537 bp, Klebsiella pneumoniae
atggatgtttttgatggttcagtgaaacctctgggcgtaaacgaagtgaagttccgtttcatcagaattacaaggtttctgccggggcggtttccgaaaagttcagacttccgtgccagactttggggggcggcgatcaggtttttactcaaaatgggttttacggtcggccttgtagggtatcccgctgtaggtaagtcatacctgctcgcccggacattgccagaaggttttattgacggtcgagaactggtggcgaagaacaactgggaaacgccggtgccattcccttccgacaagatcccgtccgggcctgtaggcattgatgacggaaatgtgttcgggaatgaagctttgttatcggcagcggcgaccctgaaaaaatgcggcgttgtgtttactgctcaacgcctgaaaaatgcagagagcctcgcggcaagtttaatggcgcggcgtgtgctgattttttatatcggtgagtatgagtattttaagtttgaagttgcggcacactatgatcggcgcaggaaatcctga

SEQ ID NO: 243658 - DNA, 687 bp, Klebsiella pneumoniae
atgaacgaaaaactattattccgcgaaacagaaaatggaaagccagtgtatcaaatgcgtatgctggacaactcacccgaagcagaacaatgggtggaagtatctgaacgggagttccatagcccactgaaagacccttccgtatgggagaagcgtgtactgtatgcaacttcttatgccgggccaccagccccggatgcagcctttctgaatgaagcgcagatgtgcgctttcatccttgagcaaataggcagtatcgaagcggatgatctcgacagcgacactgtagagctgcgttttgagctgaatggggttgataccggaacagatgtgtcaataaccgactatgcagcacgatcttcgggcgtaattgcccaactgttgtcaatgttgtcgcataccaaacgtgacaacgtagcttgtcacacggatgatattgcctttgaccatttcgctacagcctgtaaagcgaagcttgaaaatgcccgagtgaaaggccgtgggggctgggaagacccggaaaagtgcagtaatgaactgctggcgaaattgctggtggaacatctgctaaaaggcaacgccggtacgttcgaagatgtcgctaattttgccatgatgctccaccagcgcggtgctgatccgcaagttctggctgatgcggcaaaaaacgaggcaggcagattctag

SEQ ID NO: 243659 - DNA, 438 bp, Klebsiella pneumoniae
atgacgaacattatcaaggcaatagttgacgccgcagattatcagagaatgatcagtcacaaccaaaaccctgcattcggtcagtttgtggtcgcaggctacaacggcggcccggctgaaagcaggctcggttactgcgtacaggtcagaaaaaaagtggggcagtttggctctgacattgtgttcctgcggcacgcgagcggcacgctgaccgcgcatgaaaacaactgttatgttgccgtgactgaggagcaggaagcactggcccgctccgtctttaaattgctgccggatgatgaagaaccagaaaaaggatattcagatcctgccggggtgcatgaaacgggttttgtcattgaaaattcagcgtcaaacgcatcaacgggcgggccatctgtagctatcaccgtatattcccgaaaagaagatctgcaatga

SEQ ID NO: 243660 - DNA, 864 bp, Klebsiella pneumoniae
atgcataacaagcatgaaattcaggcattggccgatcagatcgctagtgcgaccaacgacctttccaaagctcagcaagcgctacgagacgataaaaaacgacgccaatcatccctgcgcggcatgttcgtggactggcttacatctacacccgcagagaaggaagtgcaggaaaaagaagaaagactgtccgtgatatcggcggaggcttcgaaaaccgcacagaaatggattatcaacgaagctgtctccgggctgcaatcctcaccagaggatattcgccgacatgccgaacagtgccagcgcctcaataacgccaataagcggcaagaacgtatccgccgactactggatttggcccgagcagcgcataacaagctggaagaagccagcagcgattgcgaatcagcatcaacgacagaactgctggatctcgcttcgaccaacaaggcactatctcttttgtctacgtttgaaacgtcagacgcagccgattcagttaaagaagcaactgccgcacttaaagccttatcgcaagctcttccaaagcgagcggaggccaccgaattcgatatgccggatgacttccttgatcttgccgtagacctcgccttagcgccaacattagacatattttcgttcttcaatatgcagagtctggacaaagcggccagtcagtgccgggaggcgtctaaaaagctggccccgctgctttcacaccttcaaaatttgtacgctgaaacagcggcccgcgtgacgacagagcaagccgcgctgcacgctatcgaagccccttacctgcacgccgcagccgctcttataccaccgactatccgcgttcaggtgccaatcagcttgaaatga

SEQ ID NO: 243661 - DNA, 231 bp, Klebsiella pneumoniae
atggaaaaatatttagagctggacaaaaaaatcatggtcaaaatcggggataacccggtgcccttttcccttttgtttgtacgtgacagtgatattgcgaatgaatgcaaaaaaattgccagcgaagagggaaagacgaaagaaccgtaccggattcttgatcgacgcctgcaagcgctgcgcaaagctggggtgattcgcagtacgccaaaaggatgggtaaaggtttag

SEQ ID NO: 243662 - DNA, 1275 bp, Klebsiella pneumoniae
ttggaattgctttataccaccctactttaccttattcagccgctggtgtggctgcggctgctgctgcgcagtcgtaaggctcctgcctatcgcaaacgctgggcggaacgctatggcttctgtcagaacaaggtagagccggatggcattctgctgcactccgtttccgtcggcgagaccttagccgccattccgctggtccgcgccctgcgccaccgctacccttctctgccgatcaccgtcaccaccatgacgccgaccggctccgagcgcgccatgtcggcgtttggcaaagatgttcatcacgtctatctgccctacgatctgcccggcgccatgaaccgcttcctgaacaccgttcagccgaagctggtgatcgttatggagaccgagctgtggccgaatatggtggccgcgctgcataagcgtaagatcccgctggtgatcgccaacgcgcgcctgtccgaacgttccgccaaaggctatgccaaactgggcggctttatgcgccgcctgttgagccgcattacgcttatcgccgcgcagaatgaagaagatggtaaccgcttcctctctctggggctgaagcgcaaccagctggcggtcaccggcagcctgaaattcgatatctccgtcacgccagagctggcggcccgggcggtgacgctgcgtcggcaatgggcaccgcaccgcaaggtctggattgccaccagcacccacgacggtgaagaacaaatcatcctccaggcgcataaaaaactgctggagactttcccgaacctgctgctgatccttgttccccgccatccggagcgcttccccgacgcccgtgagatggtacaaaaggctgggatgagctttactctgcgcagcaccggcgagatcccctcctccagtacccaggtagtcattggcgataccatgggcgagctgatgctgctctacggcattgccgacctcgccttcgtcggcggcagcctggtggagcgcggcggccataacccgctagagccggcggcgcacgccattccggtgctgatgggcccgcataccttcaacttcaaagatatctgcgccaagctgcagcaggacgatggcctgatcaccgttaccgatgccgattcgctggtcagggaggtgtccacgctcctgaccgatgaagattaccgtctgtggtatggccgtcacgcggtggaagtgctgcaccagaaccagggcgcgctgtcgcgtctgctacagttactgcaaccttacctgccgcagcggagtcattaa

SEQ ID NO: 243663 - DNA, 249 bp, Klebsiella pneumoniae
atgtcatccgtaacccggagcgtcgcgacgggcgcgaggggaaagcggcataaccgctccggattattcacccggataatctttgccgtcaatatcctgatccgcagcctgggcgcggcggaaaaggcggcggatcgggttgcgctgcgccgccagccgccagcgcaacttttgcctttccatgctgctaacgtattgttacaaaagggggaggcggcgatgatcgcctttgatggcgaggaggcgtaa

SEQ ID NO: 243664 - DNA, 741 bp, Klebsiella pneumoniae
atgggtggctctcgaattactgttccagggtatgtaggtgatatggggttaggttttgatcctatagtcagaaggggattgaagtttcttaattttttcggcgagtcagctgataaaaccggtcgaaatctggcgccggggggcgtggctgcaacggtactgggttcgcctgttgtgcagggaaatggcgtccagtttacgcctgccggaacattgctggatacaggcattctgcaatctgctgatttcacatttttcacaatcttcaactgtccgaccctgtcgcagattctgctgctcagcaattttaacggacctcgacagtcaggctcaggcaccactcaaggtgtagtgctcagaacgcagcctggctcgacaaatatgacgttgaatttttctgttaacactatcaacgggagtgcatcgacacagcgcacggtcgcgctcagtggattgcaggcgaacgcaaactatttagtgtgcgcgcgttttaaatcgggacaaaaaatggacttccaaatcctgaacaaagctctgtcagcagagaaaacaacggacatgggcgaccctgctgatttgggggcaaaactgcgtatcggtggcagttaccagaccgacctggctaactccgggattcacagaatgtctgcgctacacaatgtcgcgttgaccgatgatgaaatttccaaagctggcgcgcagtggttagcatgggccaatgctgtgggcctggcgctttag

SEQ ID NO: 243665 - DNA, 489 bp, Klebsiella pneumoniae
atgcagttcggaaaagtgatccatcgtgcgattgaccgtcgtcagaactggcgaccgctgcagccgctgtctgtaacgttgagcgggacgcttattcgtgcagatttcctcgtatggagtccgccgcttcagttccggtcgtgctatgtgggttccgtgccaacactgtacgccgcaagagggttccgggtcactgatgacgcaggcgaagtttctgttacgcgggttgagattgttgctgatacggtagtcgacatcacgctgggccgtgaaacgaccggtgatgtctatctctggtatgcaagccagactgccagcaatggtaacggaaatctgttcgacagtgacgcaacggtcgctgttgcgaattacgaatatcacgacagcacaggccagtatccggaatcaaatattaccgatttggtcaataggccgtatccactaaataacccctgcgtggcattccgccgcaaggcaatcattatctaa

SEQ ID NO: 243666 - DNA, 324 bp, Klebsiella pneumoniae
atggcattcatatctcaactgggaacaataccaaagcgtagcggaagagtgccaggttctaagttcgtttcgtttagaaagacaaaatctggtgctattggtgggcttattactaaggacactggtctgcgcggaaccaaaatagacattcagattgatgaggataataaaactatccgtcttggcgagtacgagaacggagtgatggtaactcaaagacagggcgtattcagttgctcggttagcgtatttaatgcagtgggaaagtgccgaatatccctgactgatggcggggacgggtggtggtacggaagttataaataa

SEQ ID NO: 243667 - DNA, 1032 bp, Klebsiella pneumoniae; identical to SEQ ID NO: 189859

SEQ ID NO: 243668 - DNA, 126 bp, Klebsiella pneumoniae; identical to SEQ ID NO: 221027

SEQ ID NO: 243669 - DNA, 276 bp, Klebsiella pneumoniae
atggggtttaacttgctgcgcatcgggaggctgatgaggctggatgtatctgactgcgaacaacgggattgttttcaccggctgcacattatgagtctgctgtggtttctggtaaccgactgcgaacaacggggttgttttcaccggctgcaaattatgagttttctgtggcttctggtatccgactgcgaacaacggggttgtattcacctgctgcacatcatgagtctgtggtggcttcgggtatccgactgcggacaagctgaggggggttaa

SEQ ID NO: 243670 - DNA, 1155 bp, Klebsiella pneumoniae
atgcctgtcgctcgtcatctgcttgtcgcttcactgtccctgtttgccgccgccgcgggcgccgcgcaaacccactatgcctgggtaggcacctataaccccaatggcgaaggtctgtatcgctttaccgtcgatgccaaaaccggcgccctgcgcgataagacgctggtgagctcgttgccgaatgtcgcgcagttaaccgtgtcgcgcgatggcaaaacgctgtatgccgccagtgaagtcgaaaaaggcgtggtgcaggcgtggcgcattgaaaagaacggcgagctgaccgcgctcaaccaggtcgcctccggcggcgccgggccggtgtatctctccctgacgccggacggtaagcatctgctggtggctaactatgtcagcggcagtatcgccgtgctaccggtgcaagaagatggtagcctggctgaggcggtggacaggcatcaggatgaaggcccggcaggcgccgaacgcccggcggcggccgtcgagggcagcttcgccatcagcgatcacaacggcccgcatgcccatatgatcgccgccgatcccagcgggaaatacgtctactctaccgatctggggctggatcggatctatcagtaccggctggatagcgccagcggtaagctgacgccgaacgatccgccgtttatcgccgcctcgtcgccgggagccggcccgcgccacttcgtctttacgccacagggcgacggcctgtggctgattaatgaggaagcgtcgacgctgaccttctatcatctggataagcaaagcggcctgctgcgtgaaggcaaaactgtctccgcgctgccggaagggtataaaggcaccagctttgccgccggacttgtgttgagcaacgatggcaaacagctatatgtcgccaaccgcctgcataacagcattgcccacttcacagtgctggccgacggcagcctgagtcaccaggaagatatctggacgcgtggcgattatccccgcaccctgacgctggataatcaggggcagtggctgtacgtcatgaaccagcgtagcgataatattacccgcttcagcgtggcgccgaaggatggcaaattaacctttgcctccgactatacgccggtcggtagcccatcgcagatggtgatatccgcccaaccctga

SEQ ID NO: 243671 - DNA, 633 bp, Klebsiella pneumoniae
atggatgcaatttcctggcaattattaatcgaaggcgcatggacgaccctctggatttcggccatcgctatcgccttcggggtggtggctggcctgctgatcgccctggtacggatgctgcgcctgccggtgatcgaccagctgctggtggtctatatcagcctggcccgcgcgacgccgctggtgacgctggtgctatttctgttcctttccctgcccacgatgggcattaacctcgacaagaacgtggccgccatcgtggcgctgacgcttaacacgtcggcgtttaacgctgagatctggcgcaatgccttccgcacctttccgcgcgaacagcgggaggcggcggagtcggtagggatgcgccgctggacctacttccgctacatcatgctgccgcagatgtggatcgagagcctgccggcgctggtcaatgagatgtcctttttgatcaaaggtagcccggcgatcgccgtgattggcgtggtggatctcacccgggtcaccaaccgtatctcctcggtcacctacgagccgctgtcgccgatcctcgccgccggcctgctgtatgtggcgatcatcggctgtttgttgaagctgcagggtatcgcggaacgtaaagccaggcgctga

SEQ ID NO: 243672 - DNA, 597 bp, Klebsiella pneumoniae
atgacagacgaaaataaaacaggggaagaagttacaaaatcccccggccgcatgaaaaaagcggtttatcatattaccggaattagtgatattcagtttatgtggaaatcactaagggaatctatcagcctgctcaatgagcgggcttctttcgttaagaagcaaatcaaaaatttggaagctccggacgaaaaatcagcttcgaatcagtcgtttgaggatgttgttaaaaagagttctatccccttagaacagcatctagctaaagccggtaagtataagaaatattggttatgttgcttctttatagctgtttttgttgccctgtttttaatcgctggctgtgtaaaattgattgttaatactgaatacaatgtaagccttctgaaggtgacattaacacttggtttaatgtttgctgtttgtatctactcgttcgtaaaagcaatgacttatgaatttttaggttggcaattacggaatgaggcccattctgaagaagaattcggtacattgagacattttattaacgataacggtgtgcgcaatacatttaatttcgaacaagctggccagattcggggggcgcatgaataa

SEQ ID NO: 243673 - DNA, 2196 bp, Klebsiella pneumoniae
atgaataagtcaagaaactcattggtcgcattgttgccgctatcgcttttcattaccccggcatattctgcagatctgggaattgatagtattacagaggctgctaaacggtctggtgatttgtcacgtcagatgctgcataccgtttttggtgaagtagtaaataatcctttcagtccgtcaggtgatgggttgttaaataacgtatttttcacagtgaatgaggttatcgccatattagcgctgatttatatggcgataatcagtattaaaaaactacatcaggcagggcaacttgggaagtttatagagggtgatgggaataatgccttcaattttgttaaaacaacattcggctggctccttttggttccaactgttgttggatggtccgttgcacaactgctcttcctgtggtgtgggtccatcataggtgtaggttctgccaatgttattgcagataaaacagcgtcggaactagcgagtggcaaagctgtttatataacgccagttatgccagaaatggcttctgtggctaaaggaatgttcgaaatgaacttgtgcgctcttggtgtcaatcaagggttagctcagatggaggcttcaggccaacattatgaaagtaatagccagatgaagtttaatactggagattctagttactcaatttcagttgacaatggttctgctgtttgtgggactgttaaattaccacaaaaacctacaggttggacttcggtattctccagtggttacgctgattctgtttatgcagttcaacagcaggctacagactcgctttggagtaagatgaagaatacagcagagcaatttaactctgcttatatgtctaaaatgcgttccggagatggacagctgcctgacgttgaaactgcaattcagacagcagcaagagattaccaacaacaagtacagcaagctgcagacaatgctgccggaagcaatgatatgctccagaaaatggagtcggatataaaggaaaaaggctggctatatcttggtatttattatcataccctggcaactgcaaacactgagctgaaggacgttgctaatctgaaacctattgtatcagggataagtggtgatggtgatgtaggttctacggactattataaaggtctgttccaggcatatcattcacaactgaaaaacagtacctacactccccctttaggtactgctgataatgctttagctcagaacattgacaataaaggcatcgaagaagcggcaaaaagtggtgatgctgattcgttgattaccaaaattttcaactttaatgttacttcatggcttgccactagaaactacggcactggcgatggatacagcgatgtaacgaatcccttgttgaaaatgaaagccattggtgattacacgatgtttactgctgagagtggtctagctgcttggggagctgttaatgtcgcaatgagtgttgcagatggtaataacgctgccggaatgggtgcgggattacttaatttcttcacttccggtaaggatattatcaagggtgtaattaaaacggcggctccgatcgtatacatgattttagtcgctctgttctgtatagggttaacgctttcaatttggcttccatttgtgccatttatctattggtttgtcgcaatggctgattggttggttactttgttgactggtatcgttgcatcttcattgtgggccgctacccatattaacattggccaaactaatgaggaccggtcaacgtatggatatattttcctgatagatgtgatgattcgaccgctgttgatggtaatggggttcatttttgcatcattggccattgtggctcttggcaccgcgcttaactatattttcaaaacagcaatggaaaatgtacaggcagattcaacaactggcctttggtcaatgataggtatcctgtttgtctatgcaaggatgtgtacaggtatggttgctagggtatttgcattaccagcaaggatgcctaactacgtcatcagctggattggtaacaagcataacgattcaattcttggtgatatgcagaatcatgttcacgacctgtttgctgcatttggtcgtggagctaaaaatacaggtggacgtccttctgggccgaagaacttcaacccaaccaatacggttgataaagacaaagatggtatagcgggggcgtga

SEQ ID NO: 243674 - DNA, 654 bp, Klebsiella pneumoniae
atgaaaggatattcgtatactgttgtcgataacaacatggctaaatcgaaaggtgttggctactatctgtcacgcctgtctgtagccataagtatagttattttaacaataagtcttccgttgactgtatattctggctttcttactttaggtgggagcctggcattggcgtggtttgttgctctacttgttttcgataccgtgctgatcacatatgttgtacgccaggtaaaaagtaaaggagtcaaaaaggttgttgcaggcatgagagtttatggatgctttaatccatcggctaaagaggaacaatacatgccggctcagaaaacatattttggtatagatatggactctggtgttgtagggattgctgccctttatgctgtacaggcctctattaagcaaaagagaattttatttgaggctgagacaattgaatcttgggaatatactgatagtaaacttgtcgtgaatctccggaaccgacacgttcctactgttgaaattattttgctcaatgccggtgcagcatatcgtcagctggaaatgttaaccaggatgcatgagcaacataaaaaatacaggggtgaaaaatatctccagtggcgaaagactatgcttgatgaaggttggatgctaccacgaacgtattga

SEQ ID NO: 243675 - DNA, 228 bp, Klebsiella pneumoniae
atgatgaaatcaggaaatttgataaggtatttgtggttttttatctgcgttgtcacatgcctggtgatggcgtatttatgcagcatggttaatccatatgatgacagaactttgtcctccgcctttaccagctttctgaggccaatcggggccgggtttggtacggcgattgtccttatcctggtcactcgcattgcgcaggagttgcggtgtttctgcaataaataa

SEQ ID NO: 243676 - DNA, 426 bp, Klebsiella pneumoniae
atgcttctggccatcgaactctatggggtctttgataatggcaccgcgctcttcaagccacgccgtaaattcatcttcaatggcctgaatatccagggggggttcttcgatcaccttattggggtcaaaaatccactctttcagccggctcaggttggcccccggctgtgcataccacaccttttcttccttcacgtagtccagagcattactgccatcagccagtttgccggccgcacgaattgcacgttggcgatcgtcaaagggaatactcagacgggttctttcagttgcaatttcaggtttcgccatactgtctacccctgtaggtatgttttatcgctgagagcgccggtaccaccacggacgcccggtaagttttttcccgcggataacccggagaatgacctggtacagcaccggtaa

SEQ ID NO: 243677 - DNA, 687 bp, Klebsiella pneumoniae
atggccggcagtcagctctgcagcttctgtcgctttatcaagtccaacgttttcgtctttataaatgtcattgtcagcaagaaagtaatgagtgctgtttggaaaggtgtctttaaggtggccagcaacttcaaccatgttgccggcattaaccgtcatgatcacaggctgattgatagcttcgctgatactggcagcggtcgcatatccctcggcataaagcaggttgtcaccatccttcagttgaccacccacaacgaaaaaactcccccatgcctggccgtctttttcaaggtgtttactaccgtcggaccagatgcgctcaagggtcctgaactcgccatcagcattaaacagggggatcacaacgttgccccgctcatcagctttaaggccgttagcggcaatgacttgtttgtttttcaggtatgccagatctcccgtggcatccggaagccggttatattcttccatcaaccggttagcggtctgatcaaacttatccgcctgcgctgcagctctttgttcacgccttgccgcagcatcagcacggagcatggccatttgttcagggttaggggctgcgccggtagatacccatttctgaatttcaccaccgttcttatagtccctgtaccaccctgcaggtcggccatccaggaaggcggcatacacccccttttttga

SEQ ID NO: 243678 - DNA, 876 bp, Klebsiella pneumoniae; identical to SEQ ID NO: 216438

SEQ ID NO: 243679 - DNA, 321 bp, Klebsiella pneumoniae
atgactgatgcaaaagcataccggcccgatggtggcgatataagcgaaggacgtttgcgtgagatcgcggacaacccttacggcgatgaagaaaaaagttggctggcaaaaactgttttgtcccgcgccagcttgacgccggtgggctacgttgacgcctgcaatctccgccgtatgcagcgtggtgaaatagactcggctgcaattttcctgtcccccgtaagcactcctgtatttaccgaagtgccgataaatctggtgaacgtggagttagcccttttgcgccgacactgcgatgagctggtggacgcactacactga

SEQ ID NO: 243680 - DNA, 183 bp, Klebsiella pneumoniae
atggctgattttgcttctacaaataaaaatgcgtcttttgaagcatggtttgagcaactgtgccttatggctgaaatcaacggcgaaaatgccggtgacaaaagagactgggaaggcatctatcaagctggcacacctgtcgattcagcttactacgacgcctttgggggttacgatgactga

SEQ ID NO: 243681 - DNA, 1008 bp, Klebsiella pneumoniae
atgtgcagcaaaattagtaacgttgttatcgctctgtttagcttgttcctcgttgtatcgttttctgccgaagccgggtataaatccagctacaagagttcttatcgctcttcatacaagtcatcatccagttcgcgttcgtactctgccccgtctacatcgtccagcagcaaatcctcatcttcatcgtccaccagcaagcctctttccaacggaacgaaagccgctatggctggcgctgcggtatcagcaggtacagtctcagcgtcagaaaagggttctggcggtttaacgggtagtaaacgcgtggaagcgacgggtaaatccgcaggcggtgcctctgtaggtggcgttgctgcaaaaaagtcagtgactggcgcggagctggtggacaagaagggcaaaatttccacaacaagtaaatcgtccgtaaactcctcgcagcgtattccgggaacctccgggcgtgattatgccgcattgagcaaatcagccccggataatgtgcgcactatcattcgtgaacgcgaacgcagtggaactgactggacgacactcgcaatgatgtactggatgatgagcagcagtaacagccatgcggcttccctgtccagtagcgataaagactggattcagcgtcagatcaaagagcaggaaagtagtggtgaaagccgcgaggaagctctcagtgagctgaaagctgccggggttgatacatcatcgttgaaggttgcagatgacagccatcacgctgataagccgtcagtctccttttcctatgatatgccaaaagcatttacggcgggtcacgtctgggtatttgttgttaatgccacgcaggatgataaaaaacaggcaccgtcatgcgagctgcaaggtgcgaaattcatggcagaaaaggacaagttatacgtcaagtggaaagctcctgaaactgtcgggcagaaaacggaaatgaaatgcacagcctttggcgtgaaagaagttaaaacgctggtgtctgcctga

SEQ ID NO: 243682 - DNA, 759 bp, Klebsiella pneumoniae
atgcacgttactcaggatgttctttcggttttatctgactgccagtttcaagccaaccagcttgtactcccggatcagcttgaccgttctctgtatgtgaagacgaataaagtcattgagctggccggggggaagtggaaccgaaaggcaaaagcccacttgttcccggataatgctgaggaacgtatcgagctggtcatcctcacagcgtcagtggataagccaaaagacgacttcaattttttccctacctcgcagaaagtgatccgccagatgctcgacagcgtttcccttcgggctggtgatcgggtgctggaaccctcctgtggtgacggacgaatcctgtatgccgcatatcaggagcaaccagacatcattctgactggtattgagcttgagcctgtacgagctgcgctgcttcgaaaaaatgagcttatcacgagcaccggagcggagctggtggagtgtgattttctgagctggaacccgacgaagaaattcgatgtcattctgatgaacccaccgtttatcaaatctgcggatattcatcatgttgatcatgctatctcaatgctcgataagggcggtcgtctttctgccgtgatgtctgcgggcgtgaagttccgtaacaccaaactgataaaggcgttccgtgagcgtgtcgccagtttgggcggggaattctttgaccttgaacccggatcttttaaggagtcaggcacaatggtgaatacagtgcttttagagctaatcctctga

SEQ ID NO: 243683 - DNA, 501 bp, Klebsiella pneumoniae
atgaacctgccaaccgttgttttcgtcagtctgactaatggtgatgaaattctttgtgtcaacggtgcgctgattatgcagtcagaggctgactattcagtgcatggtgttcatgaaacggcgaccacactggcgaaagcgctgggtgttaagctggtggagtacaacaacactcctgtccctgattatgacgaatggacgatagacgacgtgctgagcgccttgcccgaattgccgttcacctgcggtgaatgcgggcgcgtctatgacgattctgccgtctgtatgtcggacgactgccccggccacacaactctggtgtccgaagtcagtgaaaaccgggtgaacaacgtagtgaaattcctgattaactcgtaccagctcacgacagaggaagcggaggactttgccgaacgcggtaactactcctatgtgctgagcggaaaccttgcctctgagcattactttcaaaaaaagaaagcgactttacgggccggttaa

SEQ ID NO: 243684 - DNA, 360 bp, Klebsiella pneumoniae
atgaatattaatcctatccgtactgaacaggatcacgataatgctctcagcattgttgaagaccttctcaagaaatcgccagcagcagattcaccggaaggcgagctgctggaagtcatgattatgctggtggaggggtacgagaataaacactaccccctactgtcagtatcaccggtagaagcaatacgtttccgaatgaaagaactgggtttaagcattaacgatctggctccggcaataggtgatacacaaggcgtaagagatattttgaatggttctcgcgtcctgacgctgccgatgatacgccgccttcacagtcagtttggtattccgctggtaagtcttatcggcgtgtag

SEQ ID NO: 243685 - DNA, 267 bp, Klebsiella pneumoniae
atggccgcactaacaaataagcaggtattcgaattagaacatatcgcaggcagtcttgctcgcgggataaaattcattaaaagcgacaggatcggtttcgcttttctgcaagacaggccagcaacgaccacaagtgattatcaaacgctggacggtaaacgttcagcatccatgatggagaaatcgtatggctctgacctttgtgggctgtatgatgcgctgagagatctgcaagagtttattgcagaccataaacgccagcgctaa

SEQ ID NO: 243686 - DNA, 1194 bp, Klebsiella pneumoniae
atgaaaatactcgccactcttagacgtaatccttacatctacaacttctgccggactgtgctgatcatctattctgttgcctgtgccgggatcatcatttacaaacaggcgtttccggccagccgggcactggacgcgaacgcccgcgagttttacaacaaataccagcccccctctgagcgtgacacaacgttcaccccttctcttctctctcaccgcataatcgcactggatgccgatgatggaataatcggagctgcggccaccagcgatgcgctggcaaacgtgaatcactatctatcgactgttgctcgtcactgccattatgcgccggggggtaaggccgctgcggagtatctggactgcgctaacggcgtgctgcatgaccatttttattaccactctgctgatgatgctggtcggggatatgcagaacacaattctgactgtgatgccaataccttcctgatcatggatgcagcgaatgcggctggtcttccgacctatatcgtttacgcacccggccatgcgtttattgcgtggaaagatgattatggcaaatttcgctatcacgaaacgacgggagggaacaacaaaggcagtcccttcgatttcaggaacaggctgtataaaaaaacaatggacaggacttattacaccccgcgagcgtatggcgaccctgtaattcttgcaacctatcgggctttaacgtcgtcggtatctgggcgcggcggggaactatcgacgctgataaagcgttatcctgacaatacattgatagagagtgcgttgttccgctggaagcgccagcatggaactctttcacctgacgacgttacccgtatagaaagcgccctgataacagatatcactgattctggactgtatctgtcactcaccgacttctatctcagggcgggtacacgagagcgggcgcgagaagctttcgaccgcgtaccggcacgtgactgcggtaatgagtgttacgagtacggtattcgcctcgggatcactaaattcagactgatgaaccctgtatggaaaccatactctgcatacatgagcggtcgcggtgtgagcgcgaatacatggacattttggggggtatggccgaagttgcttattctgctggtggtgctggcgtttatcattcgctgggtattgaccgcaaataatccagagcaagaaaactga

SEQ ID NO: 243687 - DNA, 243 bp, Klebsiella pneumoniae
atgccgcaggatgtcatcgaaaaagtccgggcagctctcgctgcaaggaatcttatgctgatcagtaacctcgctcgtatagtgatgattctgcccgagcgtggcagggtaaacgtaatggtgcgtggggctgatggccgtgaagatgcagcaacgctgacgcttgatgaaaatggtaacttaagcgttcagttgtcggatgagggccggaacgtgagacttcttacccgcagaaaaaagtaa

SEQ ID NO: 243688 - DNA, 531 bp, Klebsiella pneumoniae
atgttgtcacacattttgttttggtttaataaaattactggccggaggtgcgccctcccgaatctgccggtggaaaccactgggtgtgaaggacaattctggcaggatgtaagcccatccctacactggttgttcctcgacatcgatggagttcttcacagggctgaaaatggtagccttgaatttatgcctgtccttgaggatctgttattgcaacaaactgatacgggaatcattctttcgactaactggcgcattggcgtcacccgtgatgctattctccgttactttccaccagccgttcgtgagcgcattgctggtgctaatcctgatctggatggaaaagttgtggaatatgtccggtggcatgaatgcatgtccgttgttgagcggttcggacttgagcgttacacgtttatagatgatactgcgcgacttttcccaccaaactgtccagatctgtttctgacatcacgccatcaggggttaaaccgtgaggcagcagtaacactttgtcgcaggttctcataa

SEQ ID NO: 243689 - DNA, 357 bp, Klebsiella pneumoniae
atgggttatagtgatctgaaagcaggcgtactactggcgtgtgcgaaaattgcggacgagatcggctctcagccgtgcattaagaatatgctttcaagcgcaggtttgtccccggaggggatgggtgattaccttgagattgacgtcgcagtgatccgtaatatcgtaattggatttacggatgcacctcttggtattgatgcggactatgagtttatttgcctcagtgaagctgacggaaaagtttttgcgcgttctccatgtggtcgtttcaatgtagacctttccggtaattcgataacagaagcgaatgccttggttacaggctggaacaaacagcttttaactggtcgataa

SEQ ID NO: 243690 - DNA, 921 bp, Klebsiella pneumoniae
atgaaagtttcgagaaagaacgtgcgtatctcggatgatttaatctcccgagtggacgcggagctatctcgcacaggtaggacgcgtaacgctgagttagttgccttacttgaagaggcaataattgaaatgaaatactccagaggatacgcgcttactgatcctgaactaataacagatgatgaaaatataacattgtctggggggggttcgtaccaaatacggataccgcagcttttggaacgggtaattgtagataacgtccctgggttaattgaattcacgagggacaaacgtcattcgaatgaaacattcagtgagaaagtccgttatctccttttgcgtggcttatcgtctcgtggtgctgttgttgctgtagagcttgaatcgatatcaggtggagtttatcaggatgaagaaattgaaaagaagtttatcgcttataaaaaaggtgataaccaacggcttgatcagatgattttcattggtgaaaaatttaaagcatttatgaagcgaacgcagggccatgttctcctttttggggcatcgggaaccgggaagagtttttgtacaggtttttataaagctgccaataaaggtgtatgccattttttagatttgatgccacagggtatgagaagcacaacccccagacgagtaatccttttatggtcaaacgaaaaaaaatataactttcataaaacccttgttttagatgatgctcactgtcttgataatgattacctaaatatttttttgaaaaaatcagacaagaaaaacgtccgtgttgttttgacgtgtcagtttgaaaatgctttcgataaagaagttttggattcgataagtcacaaacttaactgtaacctggataaggaaggtaacgtcacatggattagcgagattaaaggggtgaagatttga

SEQ ID NO: 243691 - DNA, 480 bp, Klebsiella pneumoniae
atgtccgaagatattgttgctaaagatctgaaactggcagtaaatcgactaatgagaaacttcatcaagaaagtcggagcaaaagatgaacctcttatatggggattcaaagcaaacgcatcaattcaaaaagacgcagccgctgttctctctgagtgcattgatcggataaaagtacgatctgtaaaaatattgaacggccaagtgcatatggatggcggtaaatatccgcaattaaaagggctggagaaaggctctgtcgtgttcatcaccaatgctgatacatgggatcaggatgtgcttctgcgagtagcaatccagtcatcccaatccgggtctaaggtactactcggattcagtgacccatcgcgcttgtctataggtatctatcagttcctagttgcacaacaaataagcgaaaattatgagctttcccattgggctatcaatatgtcgatcccaattagagagatccgataa

SEQ ID NO: 243692 - DNA, 429 bp, Klebsiella pneumoniae
atgaggtatggtgagtatgttgaatcgctaaggaaggttgttgatgaattggataatgctgtgctcgttctcattcaggatgcgaacgtattgcttgaggagttctgggtggacgtgaaggctcggaatgagttcgctccgtttgcgttcaatattcagcagcagaaggctacatatcgaattcgctggggatcattgtataaaccaaaaactcgtgctggtggagagtctcgacgggtacaaatgaagcacataaacaagggtaaaggcgaccagtattttatatctcaattaaaggggtgtccgccttggtttgaagtgctgtttcacaagtacgaaacacaactaaccgagatacgaaaagccatacgatctaaccgtgcaattcggatgcgagtatcgaaggctatcacgcattacgaaaaatag

SEQ ID NO: 243693 - DNA, 1020 bp, Klebsiella pneumoniae
atgacacaagactcgaagttcatagtcggtttggatatcggttacagcaacgtgaaaatagcttgtggtagcgcccaatcatttgaaccatcggtatcggtttatcctgcttatgctactgcggaaccggaaacagacgttgcacttaccaaaaaaagtgatgatgaattaaaagtttaccctcacgggaatgagtggcgtgtattcacaaatcgtgtcgggcatcgcgaacttcatgagaagtaccacaccagtgaaatgtacatggccctcttttatggctcattgattaaagctacaaatggccgtagcaacatcattgatgtactggttactggacttcccgtgcgaatcgcaaactctgatgatgaacgtcaacagctttgtaaattattcaccggcacacatgaagtggcacccggcaagtttgttacagtaaaagaagttgttgttctttcgcagggtgtgggaatcatgaacgatgtccttaatcgagaaggcttgatctccgatgatgacattgagttctcaaatattcttgttatcgatccggggtatttttcaatggattacgtaacattctctcggggagacaggaagcgagagttcagtggttcctctctgaatgcaaccagtgtcatcattgatgaaatcattcgcacattggaagatgagttcccggaagaagggactcaggaagctgaacgtatcgagacagcatttcgacgtggtgataaaactttcaataacggttttcgcaatgtagagattcagcctctcgttgataaaatcactccacggattgtcggaacagttgtagctgaactcctaaaacgtacacgctccatcggccccgttcacattatcatttctgctggtggtggtgctcgcttctatgaccagtcaattagagatgcattcaaaaacgctcgtgtaattcagagtccaaacgctgtagcgagcaacgcaatcggctactggcactatggggtcgaagaactcaataataacgaacagtaa

SEQ ID NO: 243694 - DNA, 678 bp, Klebsiella pneumoniae
atgcttctgaacagcggagtattgctgacggggaaagaagcggaaacaatgcgccgctggtggctaacacaagaaaacggcgcattttggggtaagttaagttttaatggggtagttatgaaaaagttgcttatgactctgtgtgtggtcacgggggttatagcagtggagtcacctgcgaatgcggctatcgtcgatcttcgcggaactgcttgggaaacttatggtaagggtgagtgtggtcttgacccttatttaatgtatgcaattgctttatgggaaagcaaacaaagagctggtggtggcggttgggttgcacctagtccttgggcacttaataactctgtttatggggcttactatcccaccagttatgaagatgccaaaaaggctcttgttcgctacatgaaagcaacgccggttactgatataggcatttcacaggttaactataagtggaatggtcactatgtttcaaaaccagaagaccttctggatatcgaaaccaatatcaaggtgcaggcaaaagtcctttgcgctgctatcaaaaacaaccctgacgacatcgaactagcaataggaagctatcacacgccgaatccaaagctacgtgctaaagctctaaattatgcccgtaatgttttatatatttggaagaggttaattgaaaatgattaa

SEQ ID NO: 243695 - DNA, 525 bp, Klebsiella pneumoniae
atgattaaagaaaatatttcatttttgatgtgtgctggatgcattgaaactcgtgaaagcagtttctacaaaagccctttcaatttttcagaagaggataaacttattctcaatgataaagaccaaagagctgagcttttcaatgtggttgaggggttgtctttaccaatcttcatcattgaacatgacccatacaaggctacgaatcaggtagataagtttgcaagaatggactcctatattttaaagcttgcggtgctgatttatagcgtaaggcttaaaataaatgagattggggattcagagcgtttcctctggacaggctccgaagaagcgttttcatttctctccaaaatggatcatgacggggttatcgattgcctgataaaaagggagatctcaattcgaccggtttgtgaactctgcgacatactcaatggtcactggcaaatgcaacaggccgacggccatcatttgatgagtcggtatctgcaactccgttataagcattggagagtggcatga

SEQ ID NO: 243696 - DNA, 498 bp, Klebsiella pneumoniae
atgagtccaataacaaagaaagaagcaaactccctgatcacgaagatggtgaacttgggtttcagaaaagtgattatttgctcgtcacttggtgcgccagaacgtcagattgacgcgctcaaaaagagcagtgggcaagaggatgttggtcgcggcaggttgaagatagcaaccacttttcttgtgatgcgacaagataaaattgaagcaactaacttcatgactatctacctgagaatcgcaaaagaccccgagaaggtagtggacatccgtgagatcatcacagcgtatgagatctatttaaaactacaccataaatttcggcctcggaattcatctggtatcatcatagatgcaaacgcagcttggatactggctcgtgattacagaacagaagagataaagatggtgacatgtaaccactgtgcaagccacttcatctcgccatatgaagacagaccgaaacacaaatgtccgttttgtgacaacggaacctga

SEQ ID NO: 243697 - DNA, 777 bp, Klebsiella pneumoniae
atgagaatgaaagcactaacggttcttacggcagcgataattttgagtggctgtgccggtgggaagggaaatgacattacccctatgcctgtagacagttctccctccatcgccttgcagtatgcaagggcgatgaacctgcgtttaattactgattacgataaaggccagtatgtcattttcaatgaagataccgggaaatcactacggcctcttaaagaaccggtcgtagttggaacaaaaggtgaggtcaagtcgtctggaaatggttctgctgacgttatcgctggctttattacgcatacggcatttatccctgctctaagcgtattaacatcacgagcgccagttccattctccgatgggatagctcgtgttgctacttggcagggaggcgatgctcaggcaaacagtcgaaaactggggagtctcctgaaagaaaaactgcctctgtttgatgggtttgctggcaccggatactgtagagatggtatcggctatacaacagatgtaacacgtaatgtcaatgcaaacggcactatgagtcccattgacacaacaaagcttccgaaaccacctttcaatgctgcgtcgaatgttcaaattatgcatgtcagtgattgctttaacgcgttatcacaacgcagacaaaatcaggctagggtcatcgagtttagtcagtcattaggcgaacagtgggctgttttcgttccgggaagcacagaggttccacctgtgatttatcgaaatgggacggcttatttttttgaaaaatag

SEQ ID NO: 243698 - DNA, 2733 bp, Klebsiella pneumoniae
atgaaaaaacttttccgtgagcggtggttttcgatacccatctgcacgctgtctataatatctcacctcgggctaatcagttttgtaccttacgcaatcgcagccgatagcactgcaaatgcaacttcaacaaatcagaaagcacaagatgccgtaaatttctataacacgcttcccggaatttcagccagtgggcaagggacggtgacgtatggaagcggccagactgttgaccttaattctgtgtaccctgaccagcaaggatcatcaacctcccttgactcattaaaatcagtctatggcgatgactcagccacaagcaaactgggttccaccacaggtacaacactaactactgaggattccctgcgtggtgatgcatatcgcacaatgcagaacgtctccaccaaaacatcttcacttaaagatactgattctattttcaatacacacaaagacttcctcgaaaaccagaatgagtacatgagcctgctcggtgactgttcgaaacaaacaattctcgatccgaaagaacaggttaatcatatccctgactacagagaatgcaccagaactgtcagtgtttctggtacatataatctttcccacccatatgttgccggagtcctttctcatagctctggccctgcaaatatccaaagttgcggtgatgactgtataactctttgggtcggtcaagtaggtaatgactattggtcaggcaaatgtacaatttatgagcaatcaatggcggttcgagtctataacccagaagctataacgtcagcaaaaatcacctatgcgacgtgggatgactacatgcagatctatctcggcgaaaacaaagtatggggtggcccgaaaccggggatgattgacgcggggactagcggcaagcgacgccctggttcttataatagcccagaacaatttgcccccgagactgccggtgattgtgagctggataccagttggagagttaatccagacgttgatgtgacgagcaatttcaaagcagctaaatctggtgatgaacttacctttaagacacgagtttcagtaaccggaaacggcgaaggttacgccaagttagaaatacgttttgacccaaacgcggctgtcacaaatgatatttggtcatccgataacgaaggattcgatacgcttaaacaagcaatcgatcaggggtactgccaaaactactctgcaacttgcaatgatagcgtcacaccagatgcaaatggatgtgccatgataaatggcgctttagtttgtgaagatgacttggtagcctctcctgtccccggtatatctaaattttgccgtagcgcgaccgtcgttgctaactgcggcacggcagaaggcgtaaataatacctgccagcaatacgaagatgccagttgcaacttcattaagagtacctgccttgatggctcaaccgggaatacaagcggatgctggcaagcaagtgaggtctgggattgtggcaaagacgttactgtaccttctactggtagccatgaagaataccaatgccccggaggtgtacagtgcatcaatggtacatgccttgctcctactactgaggagagtggtgacttcgctacagcagccgctatgctgcaagcagctacctatgctcagaatgagttggcctgtgatacaacgggagaatcgaataacgatgcctcaacctgtcaggtattcaaaggcgaacctgcggtgtgtaaaactgctatgggtggatgggttgattgttgcaatcagcctgtcaatgtaagctggattcaatacctccagcttacgtattacacactaaaagtgacggacgcggtatctgttcaggctgggatgtttgagcagggaaaagggatctttgatatgggttctgaacttgccagcaatgccttcgatgccatcacaaagcctgcaatgtctgcatttgactctttgaccggtaacgcgggttctgctgtggcagaaaaggtttcggacatgggtatatcatcagccatcaatgaagccgtcggagaattgaccaaacaagttgcacaatggactttggatacgttcggttccagtgtgacaaatatgctttttgaagctggtggaagtgccgctggagaagcagcggttaactcagcaggggaaatgtctgcatcagtccagctatcatcgacactcgtatcggctgtatctgttgtaggttatgcctatatggcttatcagattgccaacattctcgttaatatcatctgggcctgcacagaagatgaatttaagctggcggtaaaaaaagaaacaaagctggctgtgttcattgatagctggtgtcagacgaaagttctgggccagtgcatagagaagaggtcaagttactgtacgtttaactcgcaaattggtcgaataatacaggaacaaggacgtcaacagttaggactgaactgggggaatgactcaaaaaacccggattgtcgtggtctaacccttgctgaatttggacagatcgattttaacaaaattgacctttcggaatggataggttcgctgtacgaagctgatctgttacctactgctgatagcgtggatttagaaagcataacaggacaaggtaatgttttgaatattgacggtactagacaaaatacattagaacgcttccagagtggtgttgatggtgtagatgtgcagggaaccaaggaaactctcgaagagcaaatgagggtgaaataa

SEQ ID NO: 243699 - DNA, 207 bp, Klebsiella pneumoniae
atgtatggtcttggtttttacgggttggttcccccattaaccgcgaaacctgtatttcactattcaaatgttgatgggccgtatacgggcaaaaaacaaaaaacagaatctttgccaatgacaccgcgggttttcaaggaaaaactgatcactgcgggacttgctttggcgtctatccccgtcatatttatgattggtgtgtcataa

SEQ ID NO: 243700 - DNA, 3213 bp, Klebsiella pneumoniae
atgagcgagtggaatatatatacagtcgggagcgttgattttttatacaacgttctcaactctatcgcgatgatgcttaacaatggtacgtattcagatacgttccgcatttcagcattattaggggttattgggattgtcatagcctctgcaatatctggaggtaaagttctttcatttggtcagatggctgtgtgcattgttatgtacatgcttttctttcaagtgtcagcacgagttaaccttgaagatctgactacaggtgagtttagggctgttgataatgtgccttggggccttgccgctcctgcctcgattatttcaacagtggggtattccgtaactgaaaatatggagcaagctttttcaactccatcaatgacagaatacggagcgcttgatccattatttacccttactgcttactacgacgctcttaaagatcctatgcgctggaggcttggtactggaggaagcaacccagatatcgcagcatctgtagatagctacgtcagaacatgtgttataaatgatataaacagaaatgcaaatacatatgcccatatctggagagatggaggtggtattgatgctgtaagatcaaatgatctctccacttatgtcgttttatatgacggtcttaattcaaatgggccacaagtaaaccccagaaatgcatctcaatatacttgttccgaagcctataccaagcttaaaaatcaggccgcaggttcatatccaactttagttgctacttctggccgggttatgtctgcttatgggcgatgtgacagttgctcaccggagactaaagtaaccgatatgatggatttctataacatttcatcttcaaatgttagagacttccagcttcaaatgctgatgatgcctaacatcgcaaaaatccctcaagatgcatatcttgattcattcaaaggtacagcagcagttactcgtgcacagacagcaacacaacaagcatttcaatggtcatccggtggttcatctttcctgtactggatgtcctctttcatgccaatttttcagggcgttatttatgcactaactccatttatggcctttttgcttggtcttggcgtaatgggtattcgcctgataatgaaatacttcttgattatcgtttggactcagacttgggtgccattggctgctgtgatcaacctgtatatgctcacaaagatgcaatcagattccgcatcaattcttgctttaacatctggagttacaagcgttggaacagtagcatttaaccagttatacgatctgattatttctactcagaaaaatattgcccttgctggtaatctgtttggactcatccctgcgctgggtggatttattgtctggggtagttcaatcgcgtttaactctcttgcaaattcagcggctgcaccatctcctgccgatacgaaggttcttgcacctgacatgactaacgctcctgcattaaacaacagaagcgcagaatattctcattctccaatgtctggtactacactaactggtgcatctggtgtcgttggtggtatttcaatgagttcaattgcacagtcaagtatgtccagtgcaagaaacgaactacaaagcgccagcttgcaagagcaagctgctcgaaatagtgcggtacaaaccctcgcagccaataagcaaaacggcacccactctcaggcccaaaacaatgcgttaatctcttcgatgaaacagaacttaggttctgattatgctattgcagaagactttatgcgcaaaaccggtggtgatgcgacagatgctctgaactatatgaatacgctggctaatcaagccggtgttgatgcaagtgctggggttggtgctggtgctccagttggccccaaagctcaggcgggagcatcaattgccggttctgcaaccagccttacgactgatcaacatggaaacaaaatttcgtcaaatgaaggaggtggtaattcagagtcttcaagactatctaatggtgtaagcgcagatttagccaagaatcttgggagcactctaaccgatgtgctcagtaaaagtagtgagtttggtgtctcatcatctacagggacaagttacaacgaagcttatagcaatctacaaactgccagcaaacagttttccgaagcagagacatttagtcaatcttctgctattaatcaaacaattagctttgatgttcttggtcagaaggttaatgcagtacaagggcttgatcagaaaataacgcagataggaaatactattgaaggatttgcaaaaacccgagatcaatatgcatctcaaatggttggcaatggtatgaactctgataatgctcatgccgctgcttctataatggcacttaaagacggcggacaacttcatcaaattgccggagatttaggcttcctttcaggaggcaactctccagaaattaacaatgataaggcaagcctaaaccggggcgtttcaggtaacgctgagggtgcgacgcagcagatcggtgctatcgaaggtgcaacatcagcaggcgtagcctcaacccaatctcaagctcattcaggtatatctaccgtaggttcaaacagcaatcccggaactgttcggccaaatgtacaagctgactgggatcgaaattctgatctgggcgggccggttcgttctcataacaacgaacacaataatgtcgtcgagtatcagcagagtcgttctgcggcagggatggtcgcaacttatcagccaaacaatatcgctcgtgacggtatgcggattgtaaataacctgtcatctcgtttgaacaatgacaaccctacaattcaacacgaacgagcagtagctcatcaggttgcgactgataatggtaatagttatggtgctcatgctcttgcagaattttacgcagcaggtaaagctggtgcatcaggtgctgttctcgatgctttccgtgaaaatgcgatggcaacaatcatggccgatactggcggggtcaggcaatccgacggttcagttattggtgggaacaaagaatacgctgcacgagcagttgcagccgtggaatccacttttgaacgtcagggcgctaatgaccttaacactctgaatatggctaccaaaggtctatgggccgcaaaaaatgcagatgaactcccaagtaatgagaccaagcattcttggggtgaagggatcaccagccccagaagtaatgggaactaa

SEQ ID NO: 243701 - DNA, 1452 bp, Klebsiella pneumoniae
atgaaaaagtgtttttccgcttataagcctgatagaaaatttaggttaaccctatccgccgcactcgttatgtgcgctggtttatttggcgttgttccgactgtaaatgcagatagcattaatgaccagttaaataacatgtttggctctatgtccaacaccacaaaccccggagactaccgaagcgttacacgtgaaggctacactggtggtggatttactttgcggaataaacttcgttcgctcactccagttaatattcaaatgcccagtgctgctggtggctgtggtggtattgacctctttggtggctcgttctcattcataaatgctgatgaatttgttcagatgctacgtaacatcgcagcaaacgcagcaggtttagctttccaacttgcactgaatgctatggatgctgttcttgacaatgctatatcccggatgcaggcagttgtacagcaaatgaacgatttgaccgcaaactcatgccaacttgcgaaaggattgctggttgacactgcttctgcattcggtgaggaagcaaaagccgctgtatcatcacagttgtcatcaacaggtcttacagatcagttcgatgcttttatgagtgaaaagaacggcaagaagtcttctgttgctcaaaaagaagaatcagggaaacgtgaagcttgtaaagactacggtaatttaatgtggtgcctccttaacaatggtgaattctccaaccagttcgtaggttcgcagcagcagcagaaagagttcatcatgtctttaaccggtacatacattgtaccaaaagatatttcaacagatgatactggcgctcttatcggtggcgctccccataaaattgcagcgcttgacactgccgacgctcttgaagctgcaacaaacggtaattcttcattttctatttatagttgctcagacactgaatcttgtcccaaccctcaacaaactcaaatcgaaattgatggacttgctaccaaaatcattaatttctttaacaatgatggatacctagacgcaatagtcagcggtactggtttatcagaatctcagcttcaacaggccaatttcttcaacactaatggtgcgtcctctactgccacgtcacttgcgcggcatgaccttaacatggcgaaatcatatatcagtgaaattgcacctgtacttgcttataacgcggcttatcagtatatgagcgacatgctgactgccgctgataccggtgcaagaattgaaatttcaaatgacaatccagccgcgccttactttcagaagtgtcaggagcttatagctgatgctcgtaaacggttggcaaattcctatcaggcagcagccacacgttacggaggggcaagtaaaattgtcgaattaaaaatgaagtatatggatgcattgccgctccagcggtttgagcaggatcaatcgccattaagtgcgcaataa

SEQ ID NO: 243702 - DNA, 1071 bp, Klebsiella pneumoniae
atggcctataaccatttcgtgaaaacagtgttggctcttattgttagttgtactttctgtgcacatgcgttagctgatgacggccagcaagaaatcaaaactagtggtgacgtttatgctggaggtaaaaacttccagaaagaaaaggctcagggctggttttggaaaaaagacccaccacctccccaagaggatgttaagcaagaaccactacaaaaagaacaacatgatgagaaacaggagaaagaggtaacacaaccatctcctgttgttccagaagcgcctgcgactaaaaatagtcccgcgcccttttccgttgcttggttcagagaaaatattcaacagatacgtgaccgtgctatagacgatcccacaccggaaaatgtacgtgcatacttattagcacaacgtatcatgctcgataaagcaagccgctataaagatatggcccagattatatcaatcacagaccctctcatagacgagactggacgtcgttccacatcatcttttggctctctaactcaatcagtatccgcagaagataacgaaagagatgttgctcgtgaaataggcaaaaaggctgggcttttcttcttttttaaaggggaaggatgcactctatgctctaaacaagcatcaattatgcagacgttcagctacatgactggaattcctattatacctatttctattgatggtcacgatcttcccggaagtccattcccaacagttaggattgacaatggtcaatccaaaaagttgcaaatacggaatgtacccgcgatagcattggctatccccccagatataacccgcatcgtttcatttggccccatcagcgcggatcaacttatcaagcgcacagttcttattgctcatgatgctggaatcgtgtctgacgaacgctataaaagtacgttacctttcaacgataacggttacatcgattcagatatcctcaaagatatgccagaagaatatatgaaaaaccctgatcagttcatcaaatatattcagaccaaagcaggctatgctcctgctgatgccgattcgcaggaaagaaaataa

SEQ ID NO: 243703 - DNA, 198 bp, Klebsiella pneumoniae
atgacccttgaagctgtgtgcacagagttaggtgtgactaaaaacgccattgttcataagataggtaactcaaaattccagcatcatttgattttccgaaagctgtttcactctcgtgtttttcctggcaagaacacagctttctggacggataaaatagccaaaattctgattgaaggaaacaccaatggcctataa

SEQ ID NO: 243704 - DNA, 192 bp, Klebsiella pneumoniae
atgcaggcattaataatgcacaaggtggttctgcaaaatatggtttcacctataagcctcgaattctatgtagagactcaggattttgccacgaaagcaaccgccaaggcacggataaaaggggacaaaacgggggggaaaaacattttgattttgaatggaaagattttgatgagcaaagatgatatctga

SEQ ID NO: 243705 - DNA, 183 bp, Klebsiella pneumoniae
atgtctactaacaaccttcgtttcgtctctctgctgttcatcttcatcatctcgatgattgtgatatttcgtggagagtctctcggtataaaggttaacgaagaactgattattcggttcttgatctttatttcccttcccttttctcttgtgaaagcaaagaagaaaaagaaggataaatga

SEQ ID NO: 243706 - DNA, 390 bp, Klebsiella pneumoniae
atgaacatgcttgatgaagacaagatttatggttttgtgtcaggagatatgcaattatggcccgattctgattctaaggatcgacaggatttattgctgattgcaactgatatggaaacgataaaaatacttgcctctaaaggtattggtaatcaccagaccagttttggtgtgacactaaatgaatcaaaagcgttaatgcttggcactaggctcgcctattgctgttcgtgtggtcgattttctgacagaaagttagacaatcttaaagaaaagattgtagaagatggtgtgagtctttgccccagatacttcaatcaaataatgtcagaggctgtgcgtttcgttacgcttgaatctgatttcatgagacagcagtcaacttggtaa

SEQ ID NO: 243707 - DNA, 237 bp, Klebsiella pneumoniae
atgagcgcagaaatcatcgatcaggccaacgagttagcggaactccagcgggaagccgccattgcgaaatgtcgcatcaatcatgcggcagtttcagctactcactgccgcgactgcggggaagagatcccagagcggcgccgggaacttgtggcgggctgccagcgctgtgctgattgccaggaagagtttgaagaacgtggtaagcatttggctgtaacgagaggtggaagatga

SEQ ID NO: 243708 - DNA, 567 bp, Klebsiella pneumoniae
atgaaagaacgcggaatgatttttaacggggaaatgacgcgagcaattctcgacggccggaagacgcagacccggcgcccagtgaaattccctgtgcatgataaaaaccttgggtgcgaactggctggcaatgaactggccggggagctgtcggcagggaactatctgagcagcgcatttggcaagccaggcgaccgcatctgggtccgtgaaacatggaataaatatggcggactcctcacctatcgcgcagaccacgactggattggtgatatgcgcaaggaaaaggtttgcactgccaagtgggtgccatcaatccacatgccgcgctgggccagccgcattctgctggaaatcaccaatgtgcgcgttgagcggttgcagtccattgcccttggggatatctgcaaagaggttggatgcggtctttatgattttcgacctgccactcatggctttcaggtatgggaggagttgtggaaatccatctatggcgccgaaagttggaatgccaacccctgggtttgggttatcgagttcaagcgcgttgaaggtggtgcagcatga

SEQ ID NO: 243709 - DNA, 558 bp, Klebsiella pneumoniae
atggcaaagctcaccgacaaacaagagctgtttgcccgtgagtacctgaaagacttaaacgctacacaggcggccatcagggcgggttacagcgaggattctgctgcctcacagggatgcgagaaccttataaaacctaatattgcaaaacgtattgctgagcttaaagctgagcgaaacgaagaggtgggcgtagacgctgcctacgtattgcgacggctggccgaaatagaccagatggacgtgctcgatatcctgacctcgactggagagctaaaaccagtaactcaatggccgaaggtctggaggacgacgctctccgggctggatgtcatcgagatggcagcggagggaaacacaactgcgctgcttaagaagattaagtggcctgataaggtgaagaaccttgagttgcttggaagacatgttgatgtgcaggcgttcaaagataacgtcaaaacagagcaatcagggattcttgaggtagttaattactcaccatctgattacgcagcggcacagaagcagcttgaaggtaagttgaccgacctggactaa

SEQ ID NO: 243710 - DNA, 177 bp, Klebsiella pneumoniae
atgagcaattttactatctatactattggtgacatagagttcgtctataaagctattaacgggatcgcgttgatcttttccagtcatggttcaaatgagtggctcaggcttgcttcatatgctgcaacaattggcctgttttataaatccctgcggtgggtccttgcccccacataa

SEQ ID NO: 243711 - DNA, 1227 bp, Klebsiella pneumoniae
atgctaatccagaaagcgtataaatacagactcaacccaacagatgcacaggcgcaacgactgcgtcagatgtgcggctgcgcccgttttgtctggaattacgccctggcagagacccagcgcattcttgaggccggacaaaaactcccttccgcctttgagctgaataaaatgctgacaggatggaagaaattacctgacctggcgtttttatctgatgcctacaccgacaaccttcagcagaaactgaaagacctgcatggggcctggaaacggtgctttgataaaaagctggcagcgaaagcgcccgtgttcaaacgtaaaagccacggcaatgactctgttcgtttcgtcaattttgacaaatactgccagcttgagtacagacgcgttaagttaccctcggggctgggctgggtgacattccggcagtcccgcgccgttgtggggaaaatcaaaaacgcaacggtcagccagcacgctggcggctggtatatctcatttcaggtagaaatggttgtcgaacagcccgcgcacccgtctacgtctgctgtcggtctggataccggtgtcagcaagctggcaacgctgtcagacggcacggtgtttgaacctgtcaacagctttaagcagaaccagagcaggctggcaaggttacagcgccagcttgcccgtaaagtgaaattcagcgcgaactggaagaagcagaaagcaagaatttcccgcttacattcgcatatcgccaacatccgccgcgattaccttcacaaagtcacaacaacagtcagcaaaaaccacgcgatgatcgttattgaggacttgaaggtttccaacatgtcaaaatcggcagcgggtacggtagatgagccggggcgcaacgttgcgtcaaaatcaggtcttaaccgggcgatactggatcagggctggtacgaaatgcgccgccagctcgaatataagcaacgatggcgcggcggtgaggtgctggcagtaaatccggcatataccagccagaaatgcgcctgttgtggtcatacagcgaaggaaaatcgacaatcgcaggcaaaatttgtttgcacggtatgtgggtacgaagcgaacgctgatgcaaacggtgcgcgtaatattttagcggcaggacatgccgtgcttgcctgtggagggaaggtgcagtcagaccacccaacgaagcaggaacctgacactgagcgatcagcggtcacccactaa

SEQ ID NO: 243712 - DNA, 153 bp, Klebsiella pneumoniae
atgtgtgccatcagaaacaataaaaccttgtgggatgacaaacccagccgggccggaaaactgaatcggtaccgtggtagtgccagcagttttctggcccgggatacctgcctgctgtgcgagaagctccagcatggcgaggttagcctttag

SEQ ID NO: 243713 - DNA, 363 bp, Klebsiella pneumoniae
atgccccaagacgcctgccacgcgaaatcttccaccaaattactgaaactaaacaaccgcattgtcctggcgcacatcgcagatagtaaacgtcacgatgccgatgacagtaacattgtccagggcttcaccctcgatcgcttcaccatcttcggtaatcagcgactttcctctcaatgtggcaagttccgtcccgccgccgtgctggatcagaacctgacttccctgctttggcttcagggagatatccagcacaacgtaaccgcagaaatcctagagcggaacacctacagccttagcccacgccatccactgagtggcggcttttgtaatttcatcatctgtcaacgcaacagtgtgtaa

SEQ ID NO: 243714 - DNA, 360 bp, Klebsiella pneumoniae
atgaccctgaactttgcggtaaacactctcaacggtagcgtgtcgacgcagcgtacagtcgcgctcggtgggttgctggcaaacacaaactatttagtgtgcgcgcgttttaaatcgggacaaaaaatggactttcaaatcctgaacaaagctctgtcagcagagaaaacaacagatatgggcgacccggcggatttgggggcaaaactgcgtatcggcggtagttaccaggctgatctaacgaacgcagggattcaccgattttctgctttacacactgttgcgttgacagatgatgaaattacaaaagccgccactcagtggatggcgtgggctaaggctgtaggtgttccgctctag

SEQ ID NO: 243715 - DNA, 465 bp, Klebsiella pneumoniae
atgaacccgataattacggcacatcaggaaatcgttatcgaaaactcggttcgctatatcgagttactgaaatcagaagcgacaaaaattctggatgaatactgggagacctggaaggcacgaaaccaactgatatcccagaccacgtatgcaaacggggggaaattcatgcccggtcgattcgcaccggtgtttaaaaaggtcggctcatcgcaaaagctgacaattgtatggaaagatttttcgcccaggttcaaaaacaaaattgaacatcatggcgtggttgttaaaccaaaactcggaggatacagcgttagttgttttaaaaatgccctggactgggaactggagatgatcctggaaacagaaaacaaaattaaaccgatccgtgaactactcgcggaataccatcaacgaaaactggccgacatcaaaagactagaaaaactgaagaggttaatataa

SEQ ID NO: 243716 - DNA, 258 bp, Klebsiella pneumoniae
atgtcacagtggaacatcgcagccaaatcgaaagacgagcaggacaaggtcaacgtcgacctggcagcgtccggcgtcgcgtacaaagagcgcctgaacatgccggttgtcgccgaagtggtagccagagagcagcctgagcacctccgagaatacttcatggagcgcgtccgctactaccgtgagcagagcatccagctaccccgagcatccgatccgcgctatctggaaatggctgagcagaacgccaagaaatag

SEQ ID NO: 243717 - DNA, 270 bp, Klebsiella pneumoniae
atgatatttgaagacagacaatgtctctttgagtctgacgagaaccaggtcatcagaggttgcaatagcctctggatcgacaataacgatggcgccggcgggagcttgagcgatgccagtccggcccttgattatgtaagcgcggaaatgttcagggagttcgctaaaccaggatacataatcgccagtaaagccatcaaaatcataaaccttaacgtttttagagacgtcgatagcctgcagaggttggttagaatctccgtatattga

SEQ ID NO: 243718 - DNA, 639 bp, Klebsiella pneumoniae; identical to SEQ ID NO: 185447

SEQ ID NO: 243719 - DNA, 801 bp, Klebsiella pneumoniae
atgcttaatgatgactacgacggtggaaagaaacttattccggttttccaggagcacctcaacagagggacccggggagtggaaagcctgctggcagaacagattatgttctgtaataagctcttgttaaccaaaaacgacagattacccttctatgttgttactgaggtagccagagccatacatccccttaatccgcaggttgcaattatggccgtgccctggggaaatttacagctggatgaattgctttccatgccggattacgattttcatcgggtggcgttacttatcgatgagcttcaggatgcaattgatgcagttttgtcggatgaacccgacaaaaaatatgatatttcgtggcgggtcattgaggatgaccgtccatttcatccgcagcggctgtgggatacctgccatcgcttcatgggcgcaggcgtttaccgcagcaagggttttttctggctaccgggaagggatgacctggcattattgtggaaccaggcagcagggagcatcaatctcgaattcataagctactggaaagccggggtcctgactcacactgataattcattgacaaaggaagaacgcgcagctatccgtcagcaactggcaaaaatgccgggcagatttggtgaccggcgctgccgcctgactgttattggcgagagcggcgaaattgacgattttgccctcgcattgcgccagtgtttactcactgaagaggaaattctctggtggcagcagggggggattttccacgatccctggcccacgaaagtggcccggctggcttaa

SEQ ID NO: 243720 - DNA, 381 bp, Klebsiella pneumoniae
atgactagtttcattaatctcaccacttaccttgccagcgatgagcaacgtaatctgggcgttattgacgtcgatggaaatgttgcatcagctctgactgaataccttagttttcattcagcaccacaaagaggtgaaatgctgattaaagcaaatgctatagctgatattgcattaaatcttagtatcgagtacagaacgccgaacgttttaattaacgctaaatcgttctttcttcctactctggtttctgctctacagaaaaaaggtttagttcctttttatacctttgctcaacgctccatgattgttaaagacggtactgttatggataaggcatatgtgcataaggcaatagtcgaatgttcgcctgaatcttaa

SEQ ID NO: 243721 - DNA, 1032 bp, Klebsiella pneumoniae
atgactaacgtaaatactatcgctgttgacgctttggttcgtaacgctcctgtatctccggcgctgtttggaatcaacatcccagccaatcagaaagttaagcactacgcaggattcccgcaaggtcatgcattccaagactatgtaccagctcttgatgcagattatgtgtttgaagccagcgttcgtcaggctaccctgatgtggtttaacttaccgatgggtcaatctctttggttatccggccctactggttgcggtaaaagtagcatcatcgagcaagttgctaaccgttttaactggcctgttatgaaagtgacagccttccctgaaatggatatcagcactcaaatcggtggtcttcggatcacaactgatcctatgaccggtgatacaaaaaccgttttcgttcttggccctctggctatggcgtataaatatggcatggtttacctgctggacgaatatgaccagcttgaaagttcttgtgctaatgcttttaatactgttcttgaaggcggtaatttaattatccctgaaacgaatgaagttatcaaaaagcatgaaaacttccgttttgtcgctaccgccaattcgattggacaaggtgacactaccggtatgtatggtggcgttaaaatgcagaacacggccaaccttgaccgttatatgtttgttaacactacctacatggctccagatgttgaaaagaaaattattgctaaatacattcctgacgatcttatcgccagcaaatttgtacaggtcgctaatgagatccgtaaacaatttgtcggtactgaaatttcgccagacgatgttaatgcaatgaacgtttctcgtctgtctgttacctgctcaacccgctcacttaaagcttgggtttctcgctttgctattatgcatcacgcgaaaatgcctaaagccatcatcacgtcgttcgatttccatattggtaatcgtgctcccgccgatgagaaaaaagctctgcataccatcgtagagtcagtgttcggtgatttagcaagttaa

SEQ ID NO: 243722 - DNA, 1419 bp, Klebsiella pneumoniae
atgactaatgcatccacaaatgtaaacaaagttctagagtctcttattcttgtttctttatctgaaatccacggaattagtggccgtaagaaattgaaacgtgaagatttcggagaaggagttgatttgccacctgatgtaatcgtgtctcttggctccaaaaaagttattgacccaaagctactgaatccctttacgcagtataaaaccaaagctcatacgctttgttctgctgtcggtattcgtttccttggtggttatgcagttcccgctgatcgtgtcaatgacctaatctctgctctgaacgatgttaaaacagagttttacatatataaaaatgttttcctgcaatcagattttgatagctggatagacaaatgtgaagaaaagtaccgtaagattcttcgtgatggtgccagtgttgatctagagtatatggacagccaaatacaatttggttttacagctattcatatcacgccatatggtaacgaagtaattcaaaacggtattgccggacagattaaaagcctgactgatgaagtttttgatgaagtatccgggttagttgatggcttcttgaagaatttgaatcaaaatgccttcacgcagcatactatcaacccgcttcgtcgtactgctgagaaactcgcatcacttggttttatatcagacagcgttaataagctcgctctctatatgaaagaagtgcttaatgatgttcctgtctctggcaaagtaactggtcgcaaatattctgacatcctgtctctcttaaataaccttcgtgatccgcaacgagctaaatcttttgttgatttactcaatgctgattcaacgattgcacagtcagttgccgatgattttatcgacttgtctggctctgctggaattgtttctgctgatcctgttgctcctgctactcagtccgtacctgtcgtcacgtctccttcatcagctcctgtagctgttgataatcatatcgtagatgccagttcttacgtgcctgatgaaccttatgctgaaagcgcttccgtagttactgctgttgaagtagcacaaggctctgaaactgctctagctcagaaagaagaaacaataacaccagaaattgttgctcgtgctgacgatggttttgccactgatctgccttccggtgatgaagtgattgttgaacctgttgttgaaagttcaccagctcctgttgctgatgatcttgcgcctgcttcggttgaaggtttccgtaacgttgtcgttgttgatgggccgcttttcaatgatgccaaagttcatcgtgatttgcctgaccataacggtattgaggttgttgctgttgataccccagaaaacgcagacgttaataacgctgtgatttcttcggtattcgacgatgaagaagacggggtttttcttttctaa

SEQ ID NO: 243723 - DNA, 1701 bp, Klebsiella pneumoniae
gtggccgaggccatcctgaccatcaacagcggtatcgatcggctcaatgccaacctggaagactcgaataaaaagcaggacgaattcaacaaaaaagccgggcaaggtcagggttttattaatcaggcaaaaaaggatgccaaagaacttgctggacacattaaggaagcgacagccagccttctgtcctggggtggtattgtcgggatatttaccggcgtcctgggcgttggcggactgttcggcattaaccggctggcggccaccaccggtgcccagcggtttacttctctcgggctcgggacgagcatcggcgcgctggattccaccgccataaactaccagaaagcgctgggtaatccggcggggacgctgggcgctatccgcgattcccagatggacctgtcgaagcgctggacgtttcaggcgatggggattaacaatcccgaccaggacccggcaaaactgctcccgcagatgatccgcaacgcgcgcgatatcttcgtgcagaacggcagcacgctgcagggcgcacaggcgcacggcctgacaaacttctttacgctggatgacctgaaccgcttcaaaaacatgagcgatgaagagatcaccgccatggagaagcgcgcgcagcaggatgcgcgcatgctacaaattaccgaccagcaggctcgccagtggcaggattttaacgtccagctcgactacagcagccagagcatcaggaacacgtttgtgcgcggcctgggtccactcacgccgcagctgagcaaactgtccgatgcgctggcaggtgctattgataccgtcctgaaatcccccgaactcggcaagtggattgatgcgcttgccggcggcattgagcggttcggtaactacctggcttcgccgacgttcaaaagcgacgttgagtcgtttatgtctggcgttgagcggcttgggcgcgtcatcatgaaagtgctcggctggctcgatggcggatcgtcggcgatggacgatatcaagtccggctcctcattcctgaataatgacgtccagaccgatgccggcggaaatcacttcgtaaaaggcggactcagcgatccgaacacgccagcggtttcgaagtggctgacgcgccatctgtacagttggactggtacggcccctgccgagtacgaccagtattttctggatgcagccaagaaatacaacgtcgacccgcgctggcttaaagccatcgccgcgggggaatcttcctgggatcagaatgctgtcagcaaagcaggcgctaaagggttaatgcaggtgatgcctggcaacttccagccgggagagaatccatttgacccgcgggacaacatcatggccggcgcgagagtatttaaagatggtctcgactgggcaagtcgtaatgctggcggagattttgacgaagcattgcgttattacaatggtggagtccgccgcggcagtgcggaaaacagggcttatcccggcaggatcagggaaaagtatgctgcgatgtatggcgcgccgaagagcaatgatgctaccggcgtcgatagttcagagattgccaagaacacctcgaaaactaaccagctcctgcaacagatcgtagatgggaaaggcggcagaggcgggagcggtgacgttgttatttacaacaacactggcgggaatgccgtggtaacttcagcgcaattgggggcgaggtaa

SEQ ID NO: 243724 - DNA, 972 bp, Klebsiella pneumoniae
atgagcgaaataatggatttaaccgtcatcgaaataaaaccagagcaggctccgaccctgtaccgggctggcggtcttgacgcttacctggagcagattcgccaggccgtgaacgaggttccggacctgaccaccaagaaaggtcgtgaccgtgtcgcttctctggcggcgcaggtatcacgcagcaagtcggcaatcgaaaagccggggcgcgagtacctgaaacgccttaaagaggctgtgcgccctgctgaggcggaaattaagcggttcgttgacgcatgtgacgagctgcgcgatgcgacacgtaagccgctgaccgaatgggaagccgagcaggaacgcattaaggccgaagaagccataaacgcactgcatgccgaagcgctggtgatgaacgagaacatcgatctgcagcgtgcggttcagttcgaagctgaccacgaaatggccctgctgatgaatgacgctttcgaccgtgagcaggccgagaagaaagcagaagccgaacgccagcgcattgcccgcgaagaagagattaagcgccaggcagaagagaaagcgaagcgtgaagcagcagaacaagcacagcgtgaaattgacgccgcagccgccagagagcgcgaagcgattttggccaaagagcgagcagaacgtgaacagcgagaagcagctgagcgtgcggagcgcgaaaagcaggctgctgttgaagcggaacgccgcaaagcacaggaagaagccgatcgcgtccgtcgcgaggcagagcaacgcgaacaggcccgcctggctgaggagaaacgtaaagccgatgagcaggcgcgacgcgaagccgacgttaagcaccgcaaggctgtgggtgtcgaggttgttaaggctctgatggccaataccagccttacccgggatcaggctatcgaggtactcaccgcggttaaagacggccgcattcctcataccggtatcagttactga

SEQ ID NO: 243725 - DNA, 762 bp, Klebsiella pneumoniae
atgacacagtttcaacttgcattaatcgccagagaagttgatggagaagtcatccatcttcgcaccaaagacggttacatcaatgccaccgcaatgtgcaagtctgcagggaagttacttgctgactatacccggctaaaaacaacacaagatttttttgatgaattatcccgcgatatggggattcccatatcggaattaattcaatcatttaaaggcggaagagcagagaatcaaggtacttgggttcatccagacatagcaattaacttagctcagtggctatctccaaaatttgcagtgcaagtatcgagatgggtgcgtgagtggatgtcaggcgaaagagcgccggccgaactcccgatccatcttaagcgatatatgacaaaccgaggcagggttcctcatacgcatttttctatgcttaatgaactgacgtttaacttggttgcgccacttgaacaggcaggatatacgctgccagaaaaaatggtccctgacatttcagaaggtagggttttctcgcaatggcttcgtgaaaacaggggtgttgagccgaagacgttcccaacatataaccatgagtacccagatggccggacattcccggtacgtctatacccaaacgaatatcttgcagatttcaaacaacacttcaacgaagtgtggctgcctcagtacgctcctaaatattttgcagaacgagaccaaagggcattgacgttgattgagaaaatcatgctgcctgaccttgattcctaa

SEQ ID NO: 243726 - DNA, 294 bp, Klebsiella pneumoniae; identical to SEQ ID NO: 226585

SEQ ID NO: 243727 - DNA, 249 bp, Klebsiella pneumoniae
atgtttaaagaaaaaatgaaccttgaagctggctacactcttttggacaacggcacagtcaggagagggcatcaagctagccgcatagaccgaagttacattgtccttgacgagaatcagaacaaaattggcacagctacagtgactgttatcgagcaaaccaagccaccatttaaggaagatgttcatattgtgagaaaggaccttgaagggaatgtggtactggatgtgcgttatgtagatgattaa

SEQ ID NO: 243728 - DNA, 831 bp, Klebsiella pneumoniae
atgctgcagaagatagccaatgctggcaagtcccgcttcctgttaagcgatggcctggcgacggtcaaccgtgaggggattaagccatggaccggtgtgatcactccgcatgagatggtggaggagctgcagagcggatttaccgtaccgtccgacgatgattttgatggcgtcgacgtgacgtacatcaacgggactacctgggcagaggagaccgttaaatgccggacgcctgataatcccacaccggtgaaaatcgagaactacaaactcgatggggtactgaatcaggatcacgcctaccaaatcggaatgcgtcgcctgatgaaatatctgcagcagcgggtgacgttccagaccactaccgagctggacgcgctgtgctacaacactggcgatcgcattgtgctgacggatgatattccgggtaacaacacgatttcctgtctggtggaggcgatgacaacggctggtggcgtgacaacgttcaccgtcacggagccgctggactggtcttacgaaaatccccgcgcgctgatccgctatcaggatggctctgcatccgggctgatggtggcaagcagggtggatgattttcagctgtcagtcccgcacctgagcgagtttgatgatccgatgaaggttgacctgtcgtcggcaaccattgagccgatccgcctggtgttctgcggctcaacgcgccatgtctacgacgccattgtagaggagatcgctccgcagtcagacggaacctgtcaggtcaccgctaaagaatacctcgaatcgttctatgcctacgacgacgctacataccccggcgacgtcgcgtaa

SEQ ID NO: 243729 - DNA, 231 bp, Klebsiella pneumoniae
atgcgtgtgcttatcgcgccttacacagacgataacgacgctttgaacctccctggctatgtatatgtcaatgttaagcctcaaacgtgggtggcaggtgattcagcattaaaaaatccggcgcgaattgtcccactggaaattcaggaacgcgctcgtgacaacatgcagcagcagcaacgtagtactaaaggcgtaacggcgaatggggttaccggtagttctttctag

SEQ ID NO: 243730 - DNA, 261 bp, Klebsiella pneumoniae
gtgaatagcgtcaaagacaagatcatgcaggtaatgacagagggagcgaaccagcagaagcaatgggcacatggggaatacccttatcgcatggccacctggaatatccgttgcgcgatggagcgcaagttccccggggtgaagtggaagagcgcagaactgcgcaaagcgctcatcgaactggcgaaagaggggctggtatccaaatgtccccacgagagccgcattggtcaggccgtctggcgtctggaggtgaagtga

SEQ ID NO: 243731 - DNA, 642 bp, Klebsiella pneumoniae
atgaccaaatcaaccataaccagagagcgcttggaacaactcgctgataacaacactatctgcaaagtttcatgggatgagcggatcgaactggcacaaatcgcgctggccgcaatggacagcgagccggttgagatgcctctcgactacctgcagggacacaaagacggcctggagtgggcctcccaactggcagaagccaatcaccctgagaccggagactggctttacgatgaccctatcgagctggcaaaagctattcgcaaaggtccagatatgccgccagtgcagccggtagcggacagcgagccggatcgcaatcctgtgctggcgtatgccgacagttatcgtgatatggcgaaacaaggcgtcgagtcagtcccaatatggagcgtcattaccgacatagagcgaaacatagcgccgctctatcgccacgcgcagccagcgccggtagtgcctgatgatgtgctggccgcattacagaaggttgctcgaatacgcctcgacatgaatgacttcgacggcgatcgccgtggcatcgctgattgcctgtgtgatgccgaagaggcgctcattgaggtagtaaaccgccgcgccgccatgctcgcagccgccccgcaggaggtgaaaggtgaatag

SEQ ID NO: 243732 - DNA, 756 bp, Klebsiella pneumoniae
atgcgaaaaacatcgcccgtaaagtttaccctggcgggtgagcgtttgttacaccttgctgaaatcgtgcttaatgcaatggaggaagccaacagggatctttataagttagcgctcggaaaacagggcgcgctccggataacccttgagtgtcacacctgttatggctggttactaccggtgatggatgagtttcgtaagaaatggtctgaggttgaaattgatatattgcctggttttcagccggatccaataggtcttctgttgcaagacagagctgatgttgccatcgtggatgaaaccgagcagacagatctggtgaggtacagctctttatttaaatatgaaatggttgctattttggcaaatgaacatcctttaacgcgaaagccttggcttgaagcggaagattttcgtggtgaatcgctcatcacctatgcagtaccggatgagcgcatcgatctttgtcgaaaagtacttaaacctgccggcattccaattaggagaaaaaccactgaactcaccatggctatcattcaacaggttgcctgccagcggggtattgccgcattgcctatctgggcagtatcagaatatcttgaaaaaaaatacgtcacagcaaagtcaatcacggaaaataaactaatttcagaagtttggcttgccacactaacagagaacatcgacaagggctatgttaatgactttattggctttaccagacagcgctgcttgcgcttattagatgaaatctaa

SEQ ID NO: 243733 - DNA, 948 bp, Klebsiella pneumoniae; identical to SEQ ID NO: 134297

SEQ ID NO: 243734 - DNA, 369 bp, Klebsiella pneumoniae
gtgctggcagacaaaaattctcagctggctgcggagaatgtggcgctgagggcgacgagcgatgatcgccgcatgttcatcatgaacggggtgcagttaggttatatcaaggtgccaacagttgaaactgacccggcactagaaaccattcgtattgctgtatctccgcaagatccaacccccgccaccgatcgcatcgtagccgggattaaggctgatggggtggaggagttttcgaaaactctagagggggccgctgacatttgtggtaagtcaaaagcatgggaggcgcaagaaaatttacttgattttgcgtcccgtggattcgaattcgccaagcagctgcgcgacggaggcagtcatgactga

SEQ ID NO: 243735 - DNA, 294 bp, Klebsiella pneumoniae
atgtggagaggaaccgatcgcaccagaagccagatgatactgaccgagtatagctatgacccaaaatccaaagactccaaatccgtttacctggtgcggcataacagcctcattcatcagactgttctggagcagcatttgacgatagagcgcgatagcttcggtcgtttcaagccgactatcgaactgaaagactttccggaaggacttagcgaccgcgagtcgatgctgaaacttgccgactggctgcaccgtttaggtgtggcgatcgaggataactggagtcaaccatga

SEQ ID NO: 243736 - DNA, 360 bp, Klebsiella pneumoniae
atgaccctgaacttttcggtaaacactctcaacggtagcgtgtcgacgcagcgtacagtcgcgctcggtgggttgctggcaaacacaaactatttagtgggcgcgcgttttaaatcgggacaaaaaatggactttcaaatcctgaacaaagctctgtcagcagagaaaacaacagatatgggcgacccggcggatttgggggcaaaactgcgtatcggcggtagttaccaggctgatctaacgaacgcagggattcaccgattttctgctttacacactgttgcgttgacagatgatgaaattacaaaagccgccactcagtggatggcgtgggctaaggctgtaggtgttccgctctag

SEQ ID NO: 243737 - DNA, 558 bp, Klebsiella pneumoniae
atgaacaatagcgttaaaatctataccagccaccataagcctagtgcttttcttaatgctgcaattatcaaacctctgcatgtcggcaaagcaaattcttataatgaaattggttgcccaggagatgacactggcgataatatttcctttaagaatccgttttattgcgaactaactgcgcattattgggtttggaaaaacgaagagctagccgactatgtcggttttatgcactatcgccgtcatcttaatttttccgaaaaacaaactttttctgaggatacctggggggtagtgaaccatccatgcattgatgaagaatatgagaagatctttggattaaacgaagaaacaattcaacggtgtgtcgaaggtattgatatcttgctgcccaaaaaatggtctgtcactgcggcgggaagtaaaaataattacgatcactatgaacggggtgaatacttacacattcgagattatcaggctgccattgccatcgttgaaaaactatatccagagtatagtacagcggctttgttgaataaatcgaacttttgctga

SEQ ID NO: 243738 - DNA, 360 bp, Klebsiella pneumoniae
atgaccctgaacttttcggtaaacactctcaacggtagcgtgtcgacgcagcgtacagtcgcgctcggtgggttgctggcaaacacaaactatttagtgtgcgcgcgttttaaatcgggacaaaaaatggactttcaaatcctgaacaaagctctgtcagcagagaaaacaacagatatgggcgacccggcggatttgggggcaaaactgcgtatcggcggtagttaccaggctgatctaacgaacgcagggattcaccgattttctgctttacacactgttgcgttgacagatgatgaaattacaaaagccgccactcagtggatggcgtgggctaaggctgtaggtgttccgctctag

SEQ ID NO: 243739 - DNA, 705 bp, Klebsiella pneumoniae; identical to SEQ ID NO: 8686

SEQ ID NO: 243740 - DNA, 564 bp, Klebsiella pneumoniae
gtgggtgcggcggaacttctcgacgatcatcgacttgccattgttggtcgggccaaccagcagcaggttgggcatgcgttgcttgtttggccacgcataaagggcttccagccggttcagcgcctcgactgcgcgcggatagccgatccagcggtcggcgcgaaggcgctggatgcgctcgtccgccggaagacgggccaagccctgggccgccggcagcaggtgggacaggtcgatgatgggatattcgtccacggctaccactcctcaatctggtcgaacggtttggcgggtggcaagttgtctgcctgcgggtcggcaatatccgtatccggcggaacgggcttgtccggccgagctgatgtcttgaggtgctggcggcgatccgcgtcacgccgcgccttgcgtgtggccttctgcgcgctggtcacaatctcacgcatctggccgatcatgcggaacagcgccgactcatccacctgttcgcgcccttgctgccgcagtttcgccagcgcctgccgttgttcccagagggtgacagccggatgcgacaaggtacggtag

SEQ ID NO: 243741 - DNA, 282 bp, Klebsiella pneumoniae
atgaccggcaccgtcggcagccaggcaccgtatcagcaggtaacgctgaccgtgaatctcctgaaaacccaggggctgggcgaaagctaccggcagcgatttttaaccgacacgtcgctgggtgaaatcgtggtgacgcccgatgcaacgacgttcggcaatatcacgctgctcaactgctacctggtcaacttcaacgagctggctttcagcgggatggacccggcttttgtggtaaccatcagcggctacatggtcactaacgacaacatgtgggtgtga

SEQ ID NO: 243742 - DNA, 417 bp, Klebsiella pneumoniae
gtgacctacgtggctaaatacgaagagtcatacgatttcagattcagcagtaaagtagcttacgaaatgattcgtgattcgctttatctgttgacctttaatcgcagcaacctccagcaaagaattgatgagattttatggatactttctgatgtaaatcaggatgacatgtgctcatttacaaattgctgccgtatgaatggattagacccctatgagattaggttgagtgttatgcattgctggaaaaaagaattggataataagcgtttgattctccagtctccagatagccgtcgttacagcaagtcttatattgcacagtatattgatggtgaaattgcaggatacgaaaagtacaaaaaagctttctatcatctctaccctcatgaggctgcgaaacgcaagtgctcctga

SEQ ID NO: 243743 - DNA, 225 bp, Klebsiella pneumoniae
atgaaatttatcaaattaagccaaaggggaacggtagagcgccagggcaaatatggctgggagcctgaaacagtctacgagcctgtgtttgttgccgcagagcatattgtcagcatgtatttcgctggtctgacaatcctgaaaatgacctccggagagcgcattgacgtaaaagagaccccggaagaaatcatcgccatgcttaccgaaggagcctccaaatga

SEQ ID NO: 243744 - DNA, 336 bp, Klebsiella pneumoniae; identical to SEQ ID NO: 139380

SEQ ID NO: 243745 - DNA, 1173 bp, Klebsiella pneumoniae; identical to SEQ ID NO: 139381

SEQ ID NO: 243746 - DNA, 378 bp, Klebsiella pneumoniae; identical to SEQ ID NO: 146978

SEQ ID NO: 243747 - DNA, 123 bp, Klebsiella pneumoniae; identical to SEQ ID NO: 139695

SEQ ID NO: 243748 - DNA, 276 bp, Klebsiella pneumoniae; identical to SEQ ID NO: 139610

SEQ ID NO: 243749 - DNA, 336 bp, Klebsiella pneumoniae; identical to SEQ ID NO: 139380

SEQ ID NO: 243750 - DNA, 459 bp, Klebsiella pneumoniae
atggcggcgtcaggggtgagcgccagcgacaaactggtagttgttattcagctcggatacaacgacctctactacagctatacgcctcagcagaccgttgatgcgcaggaattcatgatcgccaaatttaaggagaaaatagcgaattcccgtttcgttatttctcaccaggcatttggctggtcaggggtcagcgcaccgcagaactggcctgactttgccaaatggataacggagaagatcaggaagttcgacaatcgcctgagcgaaaaaataattgtggcgcctgcatgggcacagctgagctacaaatacgggatgaacgaaactatcacagcaaccagtgatacgggcgttcagactgtatctctgcctgacgacgtccaccccggagagcttgggggagcgcagtggggtgatgctctggttgctcctgttctggcagcctggaatttatag

SEQ ID NO: 243751 - DNA, 378 bp, Klebsiella pneumoniae; identical to SEQ ID NO: 227033

SEQ ID NO: 243752 - DNA, 351 bp, Klebsiella pneumoniae
atggctatgggcgaaaatgactgcgtgtcgatgcgcgccccgggattttcctcgccggggatgcgcagcgccatgatccgccgccactgcgtttgcaacgccgcatcacgggttaccgccgcctgcggcgggcgcagatcgcgccagagcgccacgccgcctcccgacagccccattgcgagcaggatcggcagccccgtccaggtgccccgaaggttaatccgcatcagcgcgcgctcccgtcagggtaaaactgaactgccaacgcccctcggcgtcgcgctgggtcccgccggcttttgccggcgcgaatcccgcgacgcgagtcagcgcagcctccacgctggttag

SEQ ID NO: 243753 - DNA, 660 bp, Klebsiella pneumoniae; identical to SEQ ID NO: 229470

SEQ ID NO: 243754 - DNA, 306 bp, Klebsiella pneumoniae; identical to SEQ ID NO: 101521

SEQ ID NO: 243755 - DNA, 360 bp, Klebsiella pneumoniae; identical to SEQ ID NO: 101522

SEQ ID NO: 243756 - DNA, 288 bp, Klebsiella pneumoniae
atgtccgaacaactgattggccgatgggggccatacgaccccaaaacgcccgaggacaagaagaaagcccgcatacaggcgcagaagcgccgagagagtcaggccatgcagcaggcctggctagacaagcacaagagctgcgcgaacggctgcggcaagcctgtggccttctatacggactcgccttctttgtcactcaagcatggcgggtgctgttcccttgaatgtgaagaggcttggaaggccaacaaggggtcggttccggctgagggcgaaatgacaccctaa

SEQ ID NO: 243757 - DNA, 141 bp, Klebsiella pneumoniae
atgagcgaagccttatcattggttttgaggagccagaaatttatctccatccaagtgctgcaaatcagatgcgagatattatttatgaattatcaggaatgtcatcacaaattatcgccacaacacactcaccatatttaa

SEQ ID NO: 243758 - DNA, 462 bp, Klebsiella pneumoniae
atggaaattgaaaatgtttacaacgtattttcaaagataaaaaatgaatattgcacggagataagctcaacattaaacttaaaaaacaaattaatatcttatatcaacaacaatgatttagtaagcgcagcagcatccgcttctattatagagaacaacctcaccatcgacctctcacatttcaatttaaaacttgagtgcaaagagtctcttaagctttatgacttcccaccgattgttgcttcgtgtatagaaatgcatttctttttaagagaagaagatatatttcactctgtgttaaaaatattcataacgcaagacggctatatcgtgaaagatgttttctcaagcgattatatttgtaagacagaaaacgaataccgtgggaaaaaagttttcgaagaaataatatcatcacttattgataaaggacatatagtgttgacccctggacaacaatga

SEQ ID NO: 243759 - DNA, 246 bp, Klebsiella pneumoniae
atggcagacatcacaccagcagaacagatacgcctgaacctgctttcaatcctgaactacgatacagcagctgcagctaaggctattgcattcgtacaggacagtcagttgaagtatcagattttcatccagcagtacaaccgggttgtaaccgaatctgaagtggttgcgaagaccatcaaagcgattcaggaagccaccgaagcgctggcgctgtttgatacagcctcagagcagattagctag

SEQ ID NO: 243760 - DNA, 555 bp, Klebsiella pneumoniae
atggatgctagttatatagcttatgaaacgctcgtggctaatcgcaatgcagctgagtgggcgttttggtcaatgattactgcatttattagtggcactgcaagcgtagtcactttgatttttgcttatagagccctgacaacctggcgagagcaagaaaaaacaaaagtaaaaatggagtttagacttgcgatcaaacaattaagagtcgccttgttaaatatgccactaaaccttgaccgagatgaacttgaggaagagagggagcaggttattgtgaggtggctttttaaagatgtcgctctcataagtcagcagatagatgctggagagcagaatgtgcagagatttgataaccttcttagcatctttgacgcctgccagtcgtcttggcttgctactgagcacttatttgatgggactcaacttgctagagactggataatattcgaagacgacttcgaacattatatcaacggcgaagggactaaggcaccattagtgcagtcgcttaataaaataacatcttcacgatttgtctttgattcaaaataa

SEQ ID NO: 243761 - DNA, 753 bp, Klebsiella pneumoniae
atgagaatcaagatcaaaggagaaatcacggcagaacgcctagcggaagcactgcacgcagcagcagaaaaatacgaagctgtgaggccggggcacaaggtctatggggccaatctctacctaaccgccttcgatgctgatggtctgccgttcgatctggtagaccatcgcggcgaaccgctttcgatcaccatcgaggccaagtctggcgaactggtaaaaccagcactcacagcagagggtgaagcacaccgacagaaagccaaagaggaagcacgaaggcaagctgaagaagcggaagctgaagcacagcgcagacacaggcaagccttagacgaatacgaacaggagcggcaaaaacgacggaaaaaggaagccgaagcaagaaagcaatttgaggacgcgaacgcaatcactgccgaactcttgaaaaccatgccggaacgcttcatcgacgaactgaacaaaaccgtgcaaggcgtttgggacgacctcaagccaaccgaaacgcaaggcaagaagaagggccagccgaaagcgctaccagtcttttccatccatgcggacgggctggtgctttccgtcgagacatggaagaacccgcgccgggttctcaatccgctttgcacactccagcacggcgaaatagccccattctggatgcacgaagcgtggttagaagccatgaggcggatagtcgatctgctggatacgctcaccgcagccccggcagaggccctagaaagccagtag

SEQ ID NO: 243762 - DNA, 639 bp, Klebsiella pneumoniae
atgagtgacctagacgacagctttgcaaagctgctcggcaggcaacctagtgacgcggagcggcaaagtctttaccgggttcgggatgcgctcggcctgaaaaacaatgatgcgctgtggctggtgctcatggccttgcaacactaccaaggccagtatgagaagttcccgcaagcgatagcacaagcggccaaagataccttggtcaatttcaaggtaacggcggatgcaaccgtgaaagcatcagcggaagcagccaaggcggatttggcgcaagcggtagcagcagcagcgcaagaggtcgcgcacaacacatcggcaaagcagatgtggcagtgggcggcgggctgcatcgcggtggccttcctgtgcgtcggcctgttcggctggtacatgcacagcagcggcaaggattcgggctatcaggccggatacggcgcgggatacaccgaagccaaggacgagaaagcggcggcggcatgggccaacacgccagaggggcgcttggcctaccgcttcgcgcaaacgggaagcctcgccagcttggcgaagtgcgataggccggggtggtacgtcgaaaaaggcgtgtgctacgtcaagcccgcatcggatggcacctacggatggaggttgccatga

SEQ ID NO: 243763 - DNA, 684 bp, Klebsiella pneumoniae
atggcgaaaagcatttacctgatcggtggcagcaagggcggcgttggcaagtcgcttgttacgatggcaacggttgattacctgcaagagcgcggcgaaagcgtcttgctgattgagtctgacacctctaacccggacgtatggaaagcctataaagaaagcacggaaacggagcttatcaatctggatgaggcggacggatggattcagctagtgaacctgtgcgatagcaagccggatagcgtcgtggtaatcaacacggcagcacggaataacaagggcgtgagcgcctacggtgaaacactgaatagcacgcttgaagaactcaagcgcaagctggtcacgctgtgggtgattaaccgccaacgggatagcctcgaactgctaaaggaatacatggacgcaattccgaatgcggatgttcatgtggtacgcaatggacacttcggggaagaaaagaagttcgagctttacaacggctccaagctgcgcacggcggtagaggaacgcggcgggaaatcggtgacattcccggacatggccgaccgtgtgagcgatgacatttacagcaagcgcatgagcattgcggtagcactcaaggaactgcccattggcaaccgtgcggagcttacgcggtggcgcaacgaggccaaaaaggtattggaggccgtagtccatgagtga

SEQ ID NO: 243764 - DNA, 357 bp, Klebsiella pneumoniae
atgaaatacacaacagagcagctagaggctatcgcttcaaagcttcgtgagatgccgccagtcgaaaagaagaagcaggagcacagcaagcaagaggccgtgcgcgtgctatccaaagagattgccgctttgcaaaagcgtggatacacgcttgaccagatttccgagacgctgcgcggcgaaggtctgagcatcgcaaccccaacgctcaagagctacttgcagagagcaaagccagcgaaaaaagccccggtgcaagcaccgggagacacacccccgccccgcctcgccgataagaagcctgcggatacatcgaaggcgacattcaccccgaaacctgacagcgacgacatttaa

SEQ ID NO: 243765 - DNA, 312 bp, Klebsiella pneumoniae
atgccatttgaaacgcaggggccggaaccgctggacgccgttatcaatgtgcggctgaccgcagcggagaaggccagattgaaagaggacgccgaccttgccgggttgagcatgtccgagcttgtccgccgccgctacttcggcaggccgatcattgccaacgccgacgccgtgatgctcaaggagctgcggcgcatcggtggattgctgaagcacatccacaacgagagcggaggcgtttacagcaaggaaacagccggggcgcttgttgcgctcaaggactacttcaggaagctaaacgatgatcgttaa

SEQ ID NO: 243766 - DNA, 2673 bp, Klebsiella pneumoniae
atgatcgttaagaaggttccgaatccgaagaagtccgcgagcaaggcgcagcgcatcggccagcttaccagctatgtccgttcgccggagtcggagagtccgcaggaaaagtgtctgtatgccggggcgcggggtttcatgatggacgaccccaagagccagacggcagagatgattgcactctcacaagaagccgtgcgcagcaaggacaccatcaatcactacgtcttgagttggcgcgaaggcgaacagccaagcccggagcaagtagaggaagcggttagcatcttcatggatgagcttgggtggaaagaccaccaagccatctatggccttcattccgacacggacaatatccacctgcacatcgtcatcaatcgggtgcatcccgaaacgctcaagattgttgagaagaaccgtggatttgatattgaactggcacacaaagccattgcacggattgagcacgcccaaggctggcagcgtgagcaaaacgggcgctatcaggtgttggagaacggggagctaggccgagcgccatacgacccggaaaagccacgccagcccgaccagaagaagcgggacatggagaaccgcaccggggagaagtcagcccaccgcatcgccatcgaggacggcgcagccatcatcaagcaggcgcagacgtgggagcagttgcaccgcgagttagcagccaaggggatgcgctacgaaaagaccggcagcggggcgaccgtgtttgtcggggatgttggcgtgaaggccagcgatgtagaccgcaacgccagccttgccaagatgcagaagcggctaggtgaataccagccagcgccgcagcgtcagcaggtagcgccgcgcgagccggagccgatcaagccagacgtgccgggatggaaggactacatcaccgggcgcaaggcacactacgccgagaagaacgcggacaagctggcacaggacaagcggcaggagcaggagcgcaagcaacttgccgagcagcagaaggcccgccgcgatgaactcatgcgcggaaactggaaaggcaagggcgaagtgctcaacgccatgcgcagcgtgattgccgccgagcaggccgcagagaaagcggccttgaaggagaagcaccagaaggagcgcgagcagcaccggcagcggttccgaccctatcccgacctggagcagtggcagcggatgcagaaaagcccggagcttgccgagcagtggcgacaccgggccagcgagccgcagcgcatcgagggcgaccgcagcgagccgccgacgccgcgagacattcgcgcctatcagcctgaaatcgtgggccagcaggtgcattacagccggaaggaagaagcggggcggggcgggggtgtgtctttcgtggacaagggcaaaagcatcgatattcacgactggcgcaaccgggacagcacgcttgccgcgttacagctatcggcgcagaagtggggcagcttcaccgtgatggggaacgacgaatacaaggccatgtgcgggaagttagcagcagagcacggcttcaagatcacaaatccagagcttcaggagagcatccagcaggagcggcagcggatacagcaggaaagggtgcaggcgatgaaatcggagcagctaaagcagttcgagcggtacgcggaagcggtaggcgcagagcgttaccgggtaacgtctatcaagatgcgcgaggacggcagcaagcaaaccttcatcctcgacaagaaggacggcatcacgcggggcttcacaccgcaggagatcgagcagcgcacgccggagatgcagcgcctacagcgccggggcgaaaacctctactacacgccgctatcggacaagaagcatcacatcctcatcgacgacatgaaccgggagaagctggagcggcttatccgcgacggctaccagcccgccgccgtgcttgaatccagccccggcaactatcaggccatcatcaccgtgccgaagctggggacggcccacgataaggacgtgggcaaccggctgagcgatgccctgaaccgtgaatacggcgacccgaagctatcgggagccatccacccgcaccgtgcacccggctacgagaaccgcaagcccaagcaccagcgggaggacggcagctatcccgaggtgcgcttgctcaaggccgagcgccgggagtgcatcaaggcgctggccttgtccagccagatcgacgccgagtatcagcggcaagcggccttgaaggcgcagcagcccgagcgcagcaaagccaagcccgccttggagcttgcagcggccagcggcagcgcgatcgacgcctaccagcggcattatcgcgacgtgctcaagcggcagcgtggcggcgaggtggacttgtcccgcttggattccatgattgccgtgcgtatgcgcgtcaccggccacgatcaagccgccatcgagggcgctatccgccagtgcgccccggccacccggcagaaggacgagggccgcgactggaacgactacgcgcagcgcaccgcccgctatgcctacagcgccgcaggcgaccgccaagccgccgagcttgggaagtaccgccagcagtgggagaagctggaagggcgcgagcctgtacgccagcaggagcaggccaaggcgcagaagatcgagcgcgataactcgccggggatgagtctttaa

SEQ ID NO: 243767 - DNA, 225 bp, Klebsiella pneumoniae
atggcaacagcacacgttaatcagcgggttcagaagcatcgcgatgcattacgcatggcggggcttcgtccggttcaaatctgggtgccggatacgcgccgccccgacttcgcggaggagtgccgccgccaatgcctgcttgtggctcaggccgacagcgccgacaccgccatgcagcagttcatggatgaagccttggcagacgtggacggctggacggaatga

SEQ ID NO: 243768 - DNA, 324 bp, Klebsiella pneumoniae
atgcgcggcgaccttgtgaccatcgccatgcagggcgactttggcaagccacggcctgcgcttgtggttcaggccaaccagttcagcgagcacggcagcgttaccgtgctgcctgtcaccagcacacttaatgccgcgccgttgctgcgcgtcacggttcagccgagcgcagagaacggtttgcagaagccatcgcaggtgatggtcgacaaggcgatgacggtgctgcgcagcaaggtagggccagctttcgggcgcatcgacgcggacgcactgcttgaggttgagcgttgcttggccgtgttcttggggattgcgaaatga

SEQ ID NO: 243769 - DNA, 327 bp, Klebsiella pneumoniae
atgaaaacgatctacaccattcccgccccggattccttgggcgcgatgatcgaggtctacggcgagccggaaaacgcttggtacgagtggcgcatcatcgacggcgggcgcaccgtgcgggacaccggcacggaaggccacagcgcctttcagggacgccagtacgggcaagcagagattgccctacgtgatgcgctcatgttcgcttctggcctgcccatcgacggcgacacgccgaccgatgccgccagtctggaagcgggctatgccgccaaggcgaaggcagaagcggcgcggcagggtgcgggaacacccggcagcgcctaa

SEQ ID NO: 243770 - DNA, 879 bp, Klebsiella pneumoniae
atggctttagacattatggcggccttcaccaatgagccgccagaacttgatttcatctggcccggattcttggccggaaccgtgggcgcacttgttgcacctggcgcaactggcaagagcttttttgctcttgaagcggccatgtcaatcgcttgcagtgtggcaggcggcgaccttgtaggactggccccggcgcacaccgggcgcgtggtctatctcgctggcgaagatccacagcccgcccttgtgcggcgtgtccacgccatcggccagcacctcaaccagtcggcccgcgaagccatcgctgagaacctgatgcttgagccgatcatgggcaagcggttgaacgtgatggacgaggcgcacttgcgccgcgtcatcgactacagcgcaggggcgcggctgattgtgctggacacattgagccgcattcacagcctcgacgagaacagcaacggcgacatggcccaccttgtttccgtgttggaacacatcgcggcaaccaccggggcggctgtcctgtacctgcaccacgtcaacaagggcagcgcccgcgacggccagaccgaccagcagcaggcagcgcggggcgcgtctgccctgatcgacaacgccagatggtgcggctatgtcgccaagatgacggagcaggaagccgagcgcctgagcgaccggggctttgatcgtgcgcccatcggcaacgagcggcgcggcctttttgtccgctttggcgtgagtaagcagaactacgacgcgaccccgctagaccgctggtatcagcgacacaccggcggggtgttgctgccggtagagctacaggagatcaagcgtgagagcggcaacaaggggggcaagggctatgactcagcagcgtattaa

SEQ ID NO: 243771 - DNA, 1314 bp, Klebsiella pneumoniae
atggggtgcgctcgtagtatctggaatgccaaggtagaagaagagcgttattaccgaacctatgcccgtaaatattgcaccatcggaacttacgcgcccatcgaccagaccacttcacaattcaaatccaaagagctttctccgtggctaagtgaatgccctagtcaaatcttgcgtaatagcgcggttaactggtatcaaacttatcagaaattcatgagcgggaaatgcggcaggccaaagcgaaaacctaaaacggacaaaggaagcatttatcttacccgtgaagtgttccgtttcgaccattgcgatgacggcaacgtgcgcctgtttattgggacaaagaccaacaatatcggttatctgtcctttaaggcacatggcaaatttgagatcccaaactcgctttatgtgagaaaagagcgcggccactattatgtgtcattctgctatgagcaaggacagcctgatcgcaaactaagtaccaatgaagagcacttagcttttctgcaaggggcgaccagagaatatctggaagagcacaccatgggtgttgaccgaggcgtggcgatccccgtttgtgctggcgaacaaacctatgatttcacccatagccagaaaaagaacatgagcaaagcagaccgctatatcaagcgattgcagcgcaaactggcaaggcagcaaaaaggctctaaccgcagagccaagaccaagcatcgaattgcggttcatcatgctaaaaaggctaacatacgaaatgattttgcgcataagaccagtcggttattggttgatagcagcgccaaaatcattgtgtttgaggcgttacgaaccgcaaggatgacgagaaggccgaaagcaaaacaggatgaacaaggtcgattcatatcaaataaagccaagcagaaagcaggactgaataagtctattcttaatgtgggctggcatgtgatcgagacttacacctactacaaggcttattcatccagcaaagcggtatttaaaatacccgcaccaacaaccagtcaggagtgcgcaaaatgcggtcacactcatcccgacaatcgcaaaacacaagccctgtttgtttgcggtaattgtggaaatactgacaatgcagatcacaatgcatcactggttatcaagaagcgggcaattaacttaattttggacactggaacggtgttatctggcgatggggttctgcgaactcagtcggatagtggacgtggaggcaatcgtaagactggccgagccaaaagctcaaccagcagtgctcaacgaagcgtcaaaaaagaaaagctggccgcttag

SEQ ID NO: 243772 - DNA, 357 bp, Klebsiella pneumoniae
atgaaagagacttgtgagcagatggattgtgagctactggagtttggtggagaggacgatcacatccatatgatggtgtccgtacatccaaaattggcaatctcaaatttagtcagcaagttaaaaggtaaatcgtcttacatgatccggcgagagtattgggacagggtaaaaacaatgctttggggcaaccatttctggtcgccaagctactgtgtggtttcttgcggaggggttgccctcgatgttgttcgggagtacatcaacaaccagaacgaaccgcccagcgaaaaagccatgaagacatcacaagccttgagtcaaaaaatagcgtgcttaggcagggctagatattga

SEQ ID NO: 243773 - DNA, 288 bp, Klebsiella pneumoniae; identical to SEQ ID NO: 182627

SEQ ID NO: 243774 - DNA, 942 bp, Klebsiella pneumoniae
gtgcgtaactgtcgcgatctttccgattttggcagggaaattcgcgagacggttctgcgcaggacgcacctcacggtcggcgtcggcatagcccagactaaaaccctggcaaagctggccaatcacgcggcgaaacagtggcagcggcagaccggtggagtggtggatctgtctaatcttgaaaggcagaggaagttgatggctttgcttccggtggatgaggtctggggcgtcgggcgccgcatcagtaaaaaactggaggccatggggattaaaacggtgcttcaactggcggataccgatatccgttttatccggaagcattttaatgtggttctggagcgaacagtgcgggagctgcgcggcgagccatgccttgggcttgaggagttcgcgccggtaaagcaggaaatcgtgtgcagccgttcgttcggcggccgtatcactgaatatcatgagatgaggcaggcgatatgcagctacgcatcacgtgcagcggagaaactccgtggtgagcaccagtattgcagatttatctccgcatttgtcaaaaccagcccctttgcgctgaacgagccgtactatgggaacagcgcaacggtaaagctgctaacgccgacccaggacagccgggacataatcaccgctgcgacgaaatgtcttgatgcaatctggcgagatgggcatcgttaccagaaagcaggggtgatgctgggcgatttctacagccagggagtggcccagctaaacctgttcgatgataacgctccccggcagaacagcgagaaattgatggaagttctcgatcatctcaatgcgaaagacggacggggaactctgtattttgcaggacaggggatccagactgcctggcagatgaagcgagaaatgctttcgcctcgctatactacgaggttctgtgacctgctcaaagtcaggtga

SEQ ID NO: 243775 - DNA, 855 bp, Klebsiella pneumoniae
atgcgttatattcgcctgtgtattatctccctgttagccaccctgccgctggcggtacacgccagcccgcagccgcttgagcaaattaaactaagcgaaagccagctgtcgggccgcgtaggcatgatagaaatggatctggccagcggccgcacgctgaccgcctggcgcgccgatgaacgctttcccatgatgagcacctttaaagtagtgctctgcggcgcagtgctggcgcgggtggatgccggtgacgaacagctggagcgaaagatccactatcgccagcaggatctggtggactactcgccggtcagcgaaaaacaccttgccgacggcatgacggtcggcgaactctgcgccgccgccattaccatgagcgataacagcgccgccaatctgctgctggccaccgtcggcggccccgcaggattgactgcctttttgcgccagatcggcgacaacgtcacccgccttgaccgctgggaaacggaactgaatgaggcgcttcccggcgacgcccgcgacaccactaccccggccagcatggccgcgaccctgcgcaagctgctgaccagccagcgtctgagcgcccgttcgcaacggcagctgctgcagtggatggtggacgatcgggtcgccggaccgttgatccgctccgtgctgccggcgggctggtttatcgccgataagaccggagctagcaagcggggtgcgcgcggcattgtcgccctgcttggcccgaataacaaagcagagcgcattgtggtgatttatctgcgggatacgccggcgagcatggccgagcgaaatcagcaaatcgccgggatcggcgcggcgctgatcgagcactggtaa

SEQ ID NO: 243776 - DNA, 603 bp, Klebsiella pneumoniae
atggcgcagctggatatggcaacggagggagggaacatctatggagtctgcccgtcgtatccattccccaataaggatagcgggcatctgaccagtaacggttatcgctggatggacatgtttttcggcaaggtcatgttcagggttctggttcttggtgagggatgggagccgttacactgcacaggcgttgaagttcaggatgattatgcactccttaactatgcagtcccgtatccgccactgcagtgggggacaccatatgatgggcgaacagctaaaacgtatgctgataaggggtatcgggcgactgatgcaaatggcgcgctggacattactgccgcagagattgttgctgatacggtggtaaaactgacattttccaggcgagtctccgggaaaatcaaaatctggtacgcagataaaacatcacataacggaaatggctgtctcaaggacagcgatccattcctggcaactgaaaattacgtgtataccgcaggtagcggccaatatgcggacgaaaatattcctgaacttgtagataaaccatacccgctggaaaactgggcatgggcacaaattatcgagacaactgtatag

SEQ ID NO: 243777 - DNA, 924 bp, Klebsiella pneumoniae
gtggcaaagcaaaagttcagaatcaccaactggtccacctacaacaaagctctcatcaaccgtggctccctcactttctggctggatgatggggcgattcaggcctggtatgagtcggcaacgccttcatcacggggaaggccccagcgctattctgatctcgccatcaccaccgttctggtcattaaacgcgtgttcaggctgaccctgcgggctgcacagggttttattgattccatttttgccctgatgaatgttccgttgcgctgcccggattacaccagtgtcagcaagcgcgcaaagtcggttaatgtcagtttcaaaacgttcacccggggtgaaatcgcgcatctggtgattgattccaccgggctgaaggtctttggtgaaggcgaatggaaagtcaaaaaacacggcaaagaacgccgtcgtatatggcgaaagttgcatctggcagttgacagcaacacacatgaaatcatctgtgcagacctgtcgctgaacaatgtgacggactcagaagccttcccgggtcttatccggcagactcacagaaaaatcagggcagccgcggcagacggggcttacgacacccggctctgtcacgatgaactgcgccgcaaaaaaatcagcgcgcttattcctccccgaaaaggagcaggttactggcccggtgagtacgcagaccgcaaccgtgccgttgctaatcagcggctgagcggaagcaatgcacggtggaaatggacaacggaatataaccgtcgctcgatagcggaaacggcaatgtacagaatgaagcagttgttgggagattcactgacgctgcgtgactacgatggtcaggtagcggaagctatggccatggtgcgtgcgttgaacaggatgacaaaggctgggatgccagaaagcgtgcgtattgcctga

SEQ ID NO: 243778 - DNA, 138 bp, Klebsiella pneumoniae
gtggtcatcggcggcctgattatcggcactatcaacaacggactgaacatcctgcaagtacaaacctactaccagctggtggtaatgggcggattaatcatcgcggctgtcgccctcgaccgtcttatcagtaagtaa

SEQ ID NO: 243779 - DNA, 297 bp, Klebsiella pneumoniae
atggctgctcagcgaaaactgcccgcgcagtgcaccgttctgcaggttaatgctggccttatagtgcccgttctccgccgctatccggtacagtcgttcggtttgcgcatcgacgctcttgtcctgcttcagcagattatttttctgcagccagcgggcatatttaaacaggacatcggtatcagcggacgcctcaggaataatctggtgtttacaggtaaacgccaggttggcattgatatcggtcagcgggttcaccggcacatccttgtggatgcttttctggtcacagcctga

SEQ ID NO: 243780 - DNA, 1068 bp, Klebsiella pneumoniae
atgaccgccgtgaagcacgcttttactgaactcccgaccatcgatatccgcgatctggccggcgatgacctcgccaggcgtcaggcggtggccgacgccatcggccgcgcggcgcgcgaggtgggctttttctacatcaccggccacggcatcgacccggcgctgatcgccggcgtccgcgaggcggcgaagcagatctttgccctgccgatggaggagaagatgaactattacatcggccactccaaaagccataagggctacgttccggaaggagaagagatctacggctccggcaagccggaccataaagaggctttcgatatcggcttccaggcagcggatgaccatccgctggtgctcgccggtacgccgctgatcggcgccaacgagtggcccgatctgccggatttccgcgcgcgggtgctggcctactacgacgcggttttcgccctcggccaccgtctgttcgacgctttcgccctcgcgctcggcctgccggaagggtatttcaaaccgatggtgacctgcccgccggctaagctgcggctgatccattacccgttcgacgccagcgtcgaagatgttcccggaattggtgcacacaccgactatgagtgcttcaccctgctgctcgccgaccagcccggccttgaagttctcaatgaagaaagcgtgtggatcgatgcacctcccgtcaaaaacgccgcaggagaagaggcgttcgtgatcaatatcggcgacatgctggaagtgctcagcgctggcacatttgttgctacagcccaccgggtgcgcaaagtgccgcaggagcggtactccttcccgctgtttttcgcctgcgattaccacacgctgatccgcccgctgccgacctttctcgccgccggcgaagccggtgaatatcaggagctcagcatcggggagcatatgtggagccaggccctgcaaacctatcgctacctgcgcgaaaaggtcaatcgcggtgaacttcagctaccggagcgcgcgcgcggcaccaatacgtttggccatttgaaaaaacaggctcagcaaaaaaacccctaa

SEQ ID NO: 243781 - DNA, 807 bp, Klebsiella pneumoniae
atggacaagcatccagacgatttactgaccggcgacggcgatccgtttaaaggcgatcctaactttatggcctccctggcgcggggtctggaggtgattcaggcgttcacgccgcagcggcccctgctgtctatctcacagatcagtcagaagaccggcatcccgcgcgccgcggtgcgccgctgcctgtataccctgagcaagctggggttcgtgtatgccgaagacggtaagaatttccagctgcggccgcggatcctggcgctgggccacgcctggctggcctcgacgccgctggcgcgttcggcgcagccggtgctgcggcatctaagcgaaatgctcaatgagtcctgctccatcgccaccctcgacggcgacgatatcctgtatatcgcccgcgcctccagctcgcggattatgaccatcgacctggatatcggcagtcgccttccggcgtgggcgacctcgatgggccgggtgctgctgagccatcagccggaggagaagctcaacgatatgctgggccgggtgactatgatccgctataccccacagacggtggattcggtggcgaagctgcgcgccgaactgaaacgggtgcgtcagcaggggtatgccctcaacgatcaggagctggagatggggctgcgctccctcgcggtcccgctgtttaacgctcaggggcaggttcaggcggcgctcaacgtcggggtgcatgcgggccagatgacggcccgcgagatgatcgagcgcgtgctgccggagctgcaaaaagccgcccgcgagctgacgctgcttctgcgctaa

SEQ ID NO: 243782 - DNA, 657 bp, Klebsiella pneumoniae; identical to SEQ ID NO: 136777

SEQ ID NO: 243783 - DNA, 1203 bp, Klebsiella pneumoniae
atgaatcaggcatttatctgtgatgcggtgcgtacaccctttggccgtttcggcggtgccctggcgacgatgcgcgctgacgacctggcggcgctgccgctgaaagcgctgctggcgcggaacccgggactggatccctcgcgcattgacgatgtgatctttggctgcgccaaccaggccggggaagacaaccgcaacgtggcgcgaatggcgctgctgctggccggcctgccggagagcgtgcccgggagcaccatcaaccgcctgtgcggttccagccttgacgcgatcggcgttgcggcgcgggcgattaaaagcggggagacgcagctgatgatcgccggcggggtggagagcatgtcccgcgcgccgtttgtgatggggaaagcggagagcgcctttagccgcagcatgcagatggaggataccaccatcggctggcgctttattaacccgcagatgaaagccctgtacggcgtgcattccatgccggagacggcggaaaacgtcgccgatgagtttgccatctcccgtgccgatcaggacgcgttcgccttacgcagtcagttgcgcaccgccgcggcgcaagaggcggggcgtttcgccgatgagctgatcgccgtccaggtgccgcagcgcaaaggcgagccgctgctgtttagccgcgatgagcacccgcgcagcacctcgctggaggcgctggctaaactgcgcggcgtggtgcgcgccgacggcagcgttaccgccggtaacgcctccggggttaacgacggcgcctgcgcgctgctgctggccagcgagacggcgctgtcggctaacgatcttcagccgctggcccgggtggtcggcgtggcgacggcgggcgtggcgccgcggatcatgggctttggcccggcgccggcggtgcgcaaggtgctggcgcagaccggcctgacattaggccagatggatgtcattgagctgaatgaagccttcgccgcgcaggcgctggcggtgacccgtgatttgggcttaccggacgatgccgcccacgtgaaccctaacggcggggcgattgcgctgggccacccgctcggcgcctccggcggccggctggcgatgaccgcggcttatcagctgaaacggaccggcggtcgttacgccctgtgcaccatgtgcatcggcgtcggacaggggatcgccctgattattgaacgcgtttaa

SEQ ID NO: 243784 - DNA, 390 bp, Klebsiella pneumoniae; identical to SEQ ID NO: 136782

SEQ ID NO: 243785 - DNA, 285 bp, Klebsiella pneumoniae
atgcttgagtatgtagccataaccgtggccgccgtagcgggtgagcatggttttcaggaagacgtcctgcgacagcagaatttgctggatgtagccgtcgtcaatcagctcgcggatcgcgcgggcgttctcctcgtcggagggcgactgcgccgactcgtcggcgtagtattagctcatgccgatcatgtcgtattcgagaaacgccccgcgctgtgccagttcgcgctggtagcgcttatcggcaaagctgggattcatatggcacagcacggtatggcgtaa

SEQ ID NO: 243786 - DNA, 201 bp, Klebsiella pneumoniae
atgcgctttcatgttgtgttaactcaggtgtcttcgggcggggagccggcgaccaaccggcacaacccctacagtattaatccaggtttactggatccccgacgccgcgggttaaacggctactgtatgtctggtgagtttctgtcgctggtggtcaatccagctccgcaacccctcccgaagacacctactttcttttag

SEQ ID NO: 243787 - DNA, 846 bp, Klebsiella pneumoniae
atgaaaaagttaatcatggccgccatcgcggtcgcttcgctgtgcctgagtaatgttgcggtatctgcggatgtcgtcatcactactggccagcagggcctgacctataacgctgtatatggtgtgaatctcgccagcgcactaagtgaatatggttacagttcgacggtgatccccagcaaaggctctctggacaatctcgataaagtggccagcggctctgctcagatcggtttcacccaggctgatgccttccagttctggcgcagtcggcacagtaacgaagcgcagaaggtcgacatcattggcgaactggctgatgaatgtgtttttgtcgcggtgaagaagggcggcaaggtcagcgatgaaggggatttaaaggctggtgtgaaaatcgcagtcggcgagccaaccagcggatcgtatgcatcctggcaatatctgcaggggctggaaaaggattacgccaaagtcgagacttatgccaaaggcggtgtgcgctctctggcgaaagtcacaactggcgagtatgacgccttcctctgggtatcagcaccggacaggtcgaataagtttctggaggcggttaatcaggaaggtagcggcctgacgatgatcgacatgaacggctggcacgtagacgataagttgcctaacgggaagccggtgtacgaactgaaaaaggcggtgaccgaatccggttggctgagcgattcgaaggtgaaggttccctgcactaagacgctggtggtcgccaataccgaggcgggcgatgacatgctggaaacggcctcgactgtcctgctgaaaaacctgagccgagtgctcggtaccaatggtaaataa

SEQ ID NO: 243788 - DNA, 2205 bp, Klebsiella pneumoniae; identical to SEQ ID NO: 229473

SEQ ID NO: 243789 - DNA, 240 bp, Klebsiella pneumoniae; identical to SEQ ID NO: 229784

SEQ ID NO: 243790 - DNA, 753 bp, Klebsiella pneumoniae; identical to SEQ ID NO: 229785

SEQ ID NO: 243791 - DNA, 870 bp, Klebsiella pneumoniae; identical to SEQ ID NO: 104001

SEQ ID NO: 243792 - DNA, 660 bp, Klebsiella pneumoniae; identical to SEQ ID NO: 229470

SEQ ID NO: 243793 - DNA, 732 bp, Klebsiella pneumoniae
atgcaatttaataaattgatgactgttatggttgtcagctctgcgctggcgttgtctggatgtagtgcaatgggaaccgctattaaaaagagaaatctggaagtgaaaacccagatgagcgaaacaatctggctggaaccttcaaataataagacggtttatctgcaaatcaaaaatacctccgataaggatatgagtggcctgcaggcaaaaattgccagcgccgtcacttcaaagggatatcaggtcgtcagtaacccggatacggcgggctactggatccaggctaatgtgctcaaggccgataaaatggaccttcgtgaatctcagggttggttaagccggggttatgagggggcagtgactggcgccgctcttggggcggggattaccgcttacaactccagttctgcgggagcgaccctgggggtagggcttgcagccggtctggtggggatggcggctgacgcgatggtggaagatgtgaactacaccatgatcaccgatgttcagatcgcggaaagaaccaaaacacaggttcagactgataacgtggccgtattacgtcagggaacatctggcgcaaaagtgcagacaagtacggaaacgggtaatcagcataaataccagactcgcgtcgtctctaacgctaataaagttaacctcaagttccctgaagcccagcctgttcttgaagaccagctggcaaaatcgatcgctaatattctgtaa

SEQ ID NO: 243794 - DNA, 531 bp, Klebsiella pneumoniae
atgatgattacgaacaaaatacttattgaggaagtggaggaactgaaaagtctactttcacaagggaaggctgaaattccatctttttgggagtgcctttggccaggcgtagtgttagttgcatggaatatactttgcgctgtaattagtgtggatactgtgtatttgtcaggaaagtatatgtttcatgttttggtttttcctgttggggtcagtaccattatgctcctgggcattgccagttcacgctctctctttttgtcagttcctaaaaactttagagaaaaatcgaatatatatcgctttttttctaagaaggttttgatttatgctgttgtgtacatggcagtgattatgttattagctatttgtaatagagtggtttatgacacgccattttcttttgcatttatggttattttaacgtctgttttttttggttttgtcatgaatctggattttggacgctatcagctatcattgctcacctctgcaataaactctttccgagcggaaaagttgggggggtaa

SEQ ID NO: 243795 - DNA, 1098 bp, Klebsiella pneumoniae
atggccagaagcaagatgtggaatgcggttgttgctaatgcgaaagccaacaacatcagtaatgaggagtctttccagcagttgatggatgattcagctaaaagtacgcagggcgttgatttatacggatctggtaagtggagttcaggggatcagctgtttggtaagctaggtaaatggggaactggattatctgctgaggccggatttaaaggcagtgtgggttgggcccacagctcaggtaatacagataacgttggaacttccggtcgggaatctcatgacagccggcatgataccagcagtcaggcagcgaaagactttaaggaagcatccgattactttaccagccgcaaaaccaccacatcgggcaatattaccgataataatgccagctcgcgtgttgaccagtttgccgcgtcactctccagtgccaaaaacagctatgaccagtatacaagcagccggacacgcagccatgagtacagtgagatggcgtcacgcacagagagcatgactggccagatgaacgaaaacctgactcagcagtttgcgaactttgttcagcatcgtgctccacaggatgccgaggccattctgaccaataccagttctcctgaaattgcggcgcagcgtgaagccctggcgcgtgaattcgtcaaagagcaggtagaacccagggttgatgctgcatatcaacaggggcgtgaaagcatcggacagaatatgactggggtgtcaggtggtggtgacaatggatcggtaatggccgactaccgacaaaattctggtcgtatcgatgctatgacgcaagatgcgggtattaaggataatgtggatcagaaagttggtgggatgattacagagaataaacaacagcatcaggaaacccgtgaaaacatacaacggcaaggcgcagaggtgaaaaatgagaatgctgaaatggaaaaggaccataaaacaaaagcaaatgagtttaaaggtgattataatgaaagaaagagtaaggtgaaaactttaccaggagctgactcgcctgctgagttagaggcgaaagcggcgaaaattcaaaaggattatcttgatggtaaaaggtaa

SEQ ID NO: 243796 - DNA, 585 bp, Klebsiella pneumoniae; identical to SEQ ID NO: 226848

SEQ ID NO: 243797 - DNA, 477 bp, Klebsiella pneumoniae
atgggtgtcagcgttggaggagataaacaaccagccattgggtcggtcctcacggacaccccgcatccagtcccggatagtgaatggctcgccgttcttctcaatgccctgcaggtagcgaatagccttgacgtagttggtcagcacggcacgaatggagatggccgttttctcaattttctcttcaaccaggttcgctgccggcgtgttctgcagataggcgcgcagcttgtcgattttaatggacagcatggtatcgaccagtttctcgtagctgcgatccttgtcttcacgcatcaggtacgcgccttcggcaaagatagtgcgaccggaaccctgccagaacgggtcttctttggtacccatcgggataagggtgttggagatgttgtcgaagtccggcagcgtcaggcactctttccacaaatcccaggccgcgcagcgcgagtccagcgggttgaggattttatccagtga

SEQ ID NO: 243798 - DNA, 393 bp, Klebsiella pneumoniae; identical to SEQ ID NO: 224058

SEQ ID NO: 243799 - DNA, 231 bp, Klebsiella pneumoniae; identical to SEQ ID NO: 227111

SEQ ID NO: 243800 - DNA, 297 bp, Klebsiella pneumoniae
atggctgctcagcgaaaactgcccgcgcagtgcaccgttctgcaggttaatgctggccttatagtgcccgttctccgccgctatccggtacagtcgttcggtttgcgcatcgacgcttttgtcctgcttcagcaggttatttttctgcagccagcgggcatatttaaacaggacatcggtatcagcagacgcctcaggaataatctggtgtttacaggtaaacgccaggttggcattgatatcggtcagcgggttcaccggcacatccttgtggatgcttttctggtcacagcctga

SEQ ID NO: 243801 - DNA, 477 bp, Klebsiella pneumoniae; identical to SEQ ID NO: 233594

SEQ ID NO: 243802 - DNA, 129 bp, Klebsiella pneumoniae
atggtctacgcgccgttgcaatacttccagtgttattatttcatgtggggtacaattggtttagcggtggttatgttggggttgatgtttttttcgttattagtggttatcttattacctcaatattag

SEQ ID NO: 243803 - DNA, 213 bp, Klebsiella pneumoniae; identical to SEQ ID NO: 95260

SEQ ID NO: 243804 - DNA, 198 bp, Klebsiella pneumoniae
gtgctgtgggccctcatggtgttgctgatgaatatgcataacgtgagtgaatcggcggccgggctggcgattgcgctgctgacgctgatcgtgtgttcatctgccggagaacgtgtgaaacgcttctggccgcggcatttctttgtgatgttctatgcagtgcacctggcggtactgggtattgtcatctcgatgtaa

SEQ ID NO: 243805 - DNA, 219 bp, Klebsiella pneumoniae
atggtccttttccatttcagcattctcatttttcacctctgcgccttgccgttgtatgttttcacgggtttcctgatgctgttgtttattctctgtaatcatcccatccactttctgacccacattatccttaatatctgcccgttgcgtcatcgcatcgatacgggcggaattatgtctgtagtcggccattaccgaaccattgtctccacctcctga

SEQ ID NO: 243806 - DNA, 348 bp, Klebsiella pneumoniae; identical to SEQ ID NO: 229422

SEQ ID NO: 243807 - DNA, 282 bp, Klebsiella pneumoniae
atgcgcgttgccgaaagcatcatcctcgatgccctcactcgcggaggatgcatcaaaaccttttaccgcatatcctcacggcaggctgctgaatcggccacgcggatacctgaggggtatattctggggtcgcccggcgagcgggaagatattgtgctctcgcgcgcggactttcatgcgctggagaagctgctggagcagaaggaaacctgggagcaggtggtcggtgtgacctgttttggtggggcaacatggcagctgagaccgactgtacagagctga

SEQ ID NO: 243808 - DNA, 612 bp, Klebsiella pneumoniae; identical to SEQ ID NO: 61245

SEQ ID NO: 243809 - DNA, 129 bp, Klebsiella pneumoniae; identical to SEQ ID NO: 243802

SEQ ID NO: 243810 - DNA, 1605 bp, Klebsiella pneumoniae
atgaagctgttaaaaggctcaccttatgctacaggatatttgcagagcggaggaattttatattgtggtgaacaagatttatactatggcaagaaaggcacctttactattagcttgtctcctgttcccgttcctgattatgttgtgggtactacttcaacggatacatgcaccgctaccactacagctagcaatccttcttatgtgtggacttgtttaattgatggcgtattgaatcagggcgtaacggatcagatcaaaggggctaatactgctactatgtcactaacctataacttcactagtgtgcatgagcattgtgtatttagatgtacggttacagatgaaaatggtaacagtcaacatgctgatgcatcctttgctattgaagcggctgctacagccaaagtccagagcgctacaagctcgttagcggttacacgctatgctaatggctctcctgttagtgatcagcttactgttattccttcccctgctgatgatggaacttacatgtacacgtattcgattgatagcgacctattcactatcagcgatacagggctaatcacagggctagcttcaactaatggcacctatacagcgtcctgtgttgttgtcgatctatacggcaatgaagcgcctactagtagcgcctttactgttactactgagtacgcacacttaacaggtgttagtgttagccctgctactttgtcagtggttgaaggtgatccggtagatcaagtattcactcttacccctaccccggcagatgatggaacttataaatatagtgcatcgttcagcggagctagtgacggtctgaccattacaaacaataatgatggtacgtttaaagttagtggaactaccacggcaacgggtaacgtagtgattgctttcacctgtaccgatagctactcaaaagcctataacgataacgctgttatcactatcaccgtaccagcggcacatcttaccagcgctagcgcttcacttgataacactactgctactgtgggtactgcttacaccggacagatcaccaccacctgtaaagatccagacgatggaacatataaatatacgtatgctctcaatggtcaatcgtatggcctgtctgtaagcagcacaggagccattacaggcacaccaacggcagcaggtacagcaggctttaaagtgacggtaacagactcgtacaacgccacacagagcgcctacgtgaatattacagtgtcagaggctgcaagcgccgctaagctgtctacagctacggctgtaaacccttcatgggttaagggatcagcagctaaacaggctcaagagtttaaccttgatgatcctgatgatggctcttatacctacacttggacagcgtttagtggtgatagcactggagcgggttacatttatccgggtaacagcactacgccagtaacgctaaacaccgcctatccttctcaaacattctattgggacactaacccacgagggggaaatacaactaacacaggtaatccaacggcgaaagttacgatcactgatacctataacaaggctatctcagtgaatatcaaaggtagcgtaacgctcagataa

SEQ ID NO: 243811 - DNA, 630 bp, Klebsiella pneumoniae
atggctaccgctaaagctcttgctctgatgaaagaaatagaacagcgtaataataaagcggctgctgagcgtatacggtcacttcatagagaagtagatcaagatgctattgaggccgggttaattgaatggaacaatgaaaagatcaaagagaatttaagcattatctctgaactaatcgccgctaccaaatatgagcaacgttggaaagaagctatcagaaataaagtaacacctgaacgccagcagaaaatcaatcttcaaaaagaaaagaaagagcttaaagaacaggaaaagatagcgcgtgaactcgcaaaagagaaagcaagacaggaacgtgaagagagaaaacttaatccacctcctaagcctcctaaacctcctaagcctgttaagccccctaaaaaatatcatcctcctattgatcctaaaacgggtaaatataaaccacgttgggtagcaagaggtaatagaacttggtggcaagtaagaagaattgttaatggtaaaattcaatacaaaaggatctatcgaaccagagaagaagcggagattatttctattggatggcaaagggaattattcggaaatgaagaggaatttctaacgatggaaaatgaaaaaagttaa

SEQ ID NO: 243812 - DNA, 192 bp, Klebsiella pneumoniae
atgaattgtttagaaatttgtaagctaattgataatgaactgattaaaaaatttggctctctttacaaggcaagtaaggcgctacagttaccacgtacaaccctacatcacctaagagatcagccctctttagctctggcttttcgtgtggctcaggctgctggtattactttaaaagtggaggtgatctaa

SEQ ID NO: 243813 - DNA, 885 bp, Klebsiella pneumoniae
atgaaaaagattttatttgcagcgtctatattagccgttgcttgttcagcctttgcacatgaaacagcttatacatgtagccgtgaagctaagaatggttttgtaacgccggatattgaatacgatcaattcactaatcacggcaagccatacatttacatgaaagagattgacggttcagaagcatattatcgttatgactctttagaggatttagaaaacgggggcgtgtatagctcagatcgtaaaagcgtaataagcataagcagtaataaaaattatccgcttatagtccattatcaggatgaaacaaaatcatttgaatatcattgtactttagacgatgaagtaaatagcgtgattgccgggagagaacagagagaagctaaagcagcggctgaggaacaggccgaacaagaaaaaatagatgctcaggtagcagcagaagcggcggctgagaaagcagcagcagctaaggcagcagcagcggctaaggccagagcagcggctaaagcagcagctaaagaggctgaaggggtagatggtttacttcatgatctggacagtgggaagggtaagccaaaagcacagcatgtgagtaatggcggctcttcagcagtcgatatcactcaatacgtcaatcaagtaagggcagatattgaggcgcatattcaggatgctgaccaatggcaaggcaaacaatgcaccgtgaagatcactatcggtagtgatggcgtgttgactagtggaagctctgaagctggcgatacagaattctgtggtgaagtgttggctacgctaagcaagatgcaacgattaccgcgcccgccatcacagggcgtgtatgaagcaatgcaaacaatgcatttagtttttaaactgtaa

SEQ ID NO: 243814 - DNA, 492 bp, Klebsiella pneumoniae
atgaaaatcaaatctctttgtgttgcgctgtctgctgtactggctgctactaccctttctggatgctgtactattgttgacggcaaatcacaggaagttgcaattaaaactaatgccccggcaatgtatacaatcagaaatgatgatgggcagattgtgagcacaggactagccccggctaatgtcagtctgaaacgtggtgatgctccctttacggtaactctacagcgtacagattcagcgcctatagctactggcgtgattcacgataatgctaatggttgggtatggggaaatatcatgtttgggggcattatcggcggtattattgattactctgatggcgctgcatgggacttagatacagcagttactgtaaacacgttggctgatcctaacaatcctaacggcaatgcacagaatacaatgcatgtggtacaacctacacaatctcctatcaccattaataactcaatcagcaacaaggcctga

SEQ ID NO: 243815 - DNA, 399 bp, Klebsiella pneumoniae
atgaaacgtataattgtactggctgtgatggcttgctctgtgttgactggctgtaaaggtagctttaatactgactctgcggcaaaagcagatcctgtattaaacttttcctgtgagaacatcgacaaggggcaagatccgcaacacctgtatttaagttttaatccagttacccggagatttttagacagtacaggcaaatcctttattatgactcaggataaagataataattctcaatacgattttaacttagggcaatctaatacctctatacaggtgttagggaatactgcgagctacagctttacttatagcttagatgcaattgctaaaagtcctgctttggctcagatggaatacatctatagctgtcacaaggtgcaagcggtcaaatga

SEQ ID NO: 243816 - DNA, 495 bp, Klebsiella pneumoniae
atgaatgcttcagattattcaagtgttactcatgctgtaaaagctgtttcaattatcatcgctattgcttttgctcttcagggtaaaggcgggatgaaaactaaagcggataaagttttaagcgctggtaaattctttatttggggtaacattggctttatcgctttcttccttgtgggctttatcacgctggcgttaactcaaaacctaagcgcctattatatgatctgctcagtggctgctttctgtctgtgcttcacagcgccagcggggatctattcatgggcggtgttattccgtagcaaggcaaacaaggcaatctattatccctttatgaacaagtggactatagcggcctttattctctctaacggtattatggctgctgtaactcaggtagccccaatgctttactttgtctggattccggttgctaccgttgtaatgtttatgagcaatcgcaagatcaaacaaattatagggatggctaactaa

SEQ ID NO: 243817 - DNA, 297 bp, Klebsiella pneumoniae
atgcacatcatctatatgctttttgcagcacagacgcttttaattatttttctctatcgggagctacggtatagcattgtaaggcttagtaactctttagattatgagagaaaaaccttagatatgattgctgatcatatccctgaaactaaaaggaaagtagcagaaattgaaaggcacactactagcaagttcatcaaggatcttgcttcagatatggcctttaaagacctacaaagagccaatgcttattggtacgaaaaagcggtagagcttggctataaggaagaagaataa

SEQ ID NO: 243818 - DNA, 927 bp, Klebsiella pneumoniae
atggtagatgtaaaagcaatctttgaacgtgttggtgttgaactggatgaagggatttatggtatgtcaccttcaccgcttccacgtatgaagcagttagtaaaactcatgccagcggtagaagatggtgaatgcaccttagcagatatcaacatctatctgaatgatatccggtctgctcgtattgaagcagatgctaacagtaagatggctagtgaaaagactattcgcaagtgctggaacctgcttaaagaagctaagcaaaagtatccacatcttgagaaatatcctttagctcaggctgcatatctgatccacaaaggggagacggttaagccagcacctatagctgtgccagtggttaacgctgtaccagagcaaatcaaagctaactcagacaactacgttagccttgtgaacaatggcgtagttaatgggaagcgtcttatcaatgagactgattttaatattcttgagcatatcaaggctacagatccagcgtattacaatacggtagctgttctaatcactgaagatctgagagctaaggcagaggctaagttagaagagtggctcaaggaacaggcagagcgtaagcgtgaagagctttatgctcagatgggtatcgtgttagagccgttgccagtggttcaggctgataaccctgctgaacttccagcggctgaacagacagcgtcagcttttacacctgctgagccaaaggctaagaaggggaaagaatcagatgctgattttctggatcgagtgaaagctctgatctgtgagaacaaggatctgaacaatgatgactatcagcgccttttagccctgaagagtaagaacaatgctgtagcggctgaaatagtggatctttgggaaacgtcaccagagacttcaccagaagccccacaaggcgataaaaagtag

SEQ ID NO: 243819 - DNA, 807 bp, Klebsiella pneumoniae
atggctactatcactaacttgaatgcacatgcattgatgaacagcgctaaagattatattaaagctctgcaagaaactaaaacaactatggttaaggttgttacagattggaacatttgcgtagctcaatctgacatgatcacctacaacttcccggtaggagaatataagcgtaaggctcatcttatcgctgattttgagcgtgttattgaacagcttaatgaaatggctttttctcctgtagaagctggtgaggccttatctgtatgcgattctaacgatacgcagattaataacgtttcaactactgaagaggctgtacaaatggttaatgttcttatcgctactaatgctacctttcgtgatgttcctgataatggcgtattctcacaagctggtacatcaccgcttagcctctattcttatttctggaaaactccagaaggtgaagcggctaatactgtagagtctaccgctttatctatgaatctattgcctgtgcaattcaatccagatgatcgggttcaagtgtggggagtggctaatacatgggaaagtgtaaatgatcttatctctgctcatgtgttagctagtcgccgtgtctatattcagaatgaaacagatgctgagcgcttagcggcctttgctttgtctctgcctcaagctgatttagctagcttcttacgcatgattcaaactcattgcaccgaagagttcactagtgaagtgttagccgcttttcatgcctctgtagagccagagatacaggaacggttaaacagcttattgcacacagcacaggcttaa

SEQ ID NO: 243820 - DNA, 456 bp, Klebsiella pneumoniae
atgaataccccaatcgactcttcccataaaaacctgcatctgggtttgctgttccatctggcaaaccagtttaaggacctgcttatcggccattactttgccgacagcggcattaccgcaccgcaatttaaggtattgattaatatatttaaaggtaacaccagcccggcagaaatctgcaagagcctgcagatggataccggggcaatgagccgtatggttgcacgtatggtgaagaacgacctgatcgagcgccgcccgaatccgcacgacaagcgccaggtgatcctggcccttacggcaaaaggtcagacgctgtgcaatacgtttcagaatgaagcactgaataccatcctcgcggacttaacggcgcgtctgacgcccgaagaatcccggcagctcgcagatattcttatcaaaatgctgcccgatgaattcacggccccccatcgctaa

SEQ ID NO: 243821 - DNA, 234 bp, Klebsiella pneumoniae
atgtgcggacgctttgctcaatctcaaacccgtgaagaatatctggcatacctagcggatgaagccgagcgcgacatcgcatgcgaccctgagccgattgggcgttacaacgtggcgccagggactaaagttttgctcctgagcgtacgtaatgaagagccacattcaacgccgttcacggcgctatgtgcaggggttaagggaaaaaccggtgctcatataagcccatgttga

SEQ ID NO: 243822 - DNA, 309 bp, Klebsiella pneumoniae
atgaccctcacccagttgcacgccgtatcaacgactaccggggcgggtgaagtgcccacgcagctcccgatcaacatcgtcatcacccatacgcttaacgctctcttcaacatcactagcccctttcgtggcttctgctttacgttctgccacagcaatactggcggctgctttctcttcggtatggtgctgctcggctttggcttctgccttgcttgttccgcgtgcatgaccgatgccgaacgcgccagcgatcgcacccaggatgacaaccaccagcccagcaataatttcaatattcactgctag

SEQ ID NO: 243823 - DNA, 792 bp, Klebsiella pneumoniae
atgtgggatactatttgtcagaatattaagcgttacgctattatttattccctgttggtgctgtcattcgttttgatgttgatggtttttattagctatgttttgatgttcggggcgcgtcctcttagtcactctattgaaaagtgggggcagtttggtgattatgttggcggtgtgcttaatcctagccttgcctttatttctgtgatgcttgtttgtttgacgctatattctacttccagacagtcatctattcagtcatttgaatctgtcttatttgagttattgcgatttcataaggataatttagcggaaattaaagtggtatatgatgggggtaacgtatatgtggggcgggacgctcttttgttatacattactgaagttaagtttaatttgcttaatattgtagatgactcgcttcccttagatgaaaggttagagcgttctgttaatatggtctacatggacggtgataattttgcgaatgttggtcattactttagaaatatctaccatatttttaagcatattaatgattcgaattatttgaccgggtcggaaaagactaaatatgcgaaattagtcagagcgcaaatgtcttctgtagaggcaggtgcaatgcttttgaatgggttttcaaccgcagggaagtctgcaaaaaaatatattgagaaatactctcttcttcagggttttagcttaagtaaaggattcaaaggtcagttgcatgatttaggcgctttaaagctttatgataaagctgcatatgcggataaaaaagggcattaa

SEQ ID NO: 243824 - DNA, 375 bp, Klebsiella pneumoniae
atgaagtatcaagctatatcgattttgaatccggcggtcgaaaatattttgaatggctctaaatccattgaaattcgctcatggcatcctgaaactatgccgttaaataatgtaattcttgttcagaataaaaaatatcttaaaaatcaaatggatgtggactttggggtggctatggctattgtcgattttgttacagtacgagaatggctatatgaggattacttaaagcaaaatcaagacaccactctcaataaaccttggtcttcaggttattttatgtgggaaataaaaaatgttcgtcctttacataaacctattccatgtttggcgaggaaaggtatttatacgttggatttggatattgattattaa

SEQ ID NO: 243825 - DNA, 546 bp, Klebsiella pneumoniae
atgttaatttttatcgccggagttcatggcgtaggtaaaggctacttatgttcattcgcaaaagaagagttcgaagttactcatgttagcgcaagcgagcttataaaaaataattctcagctaaccttcaatagcagtaaattgactgccacgccagataaaaaccagataatattacttactgcactaaaggaattaacatctaaaaaacaaaacattctactggatggacattttactcttataaatacaaagggtgatgttgaagaacttaagcctgaaatcttcgaaaaaatgtccttggatggagtgattttgattgaagagtcagatgagacaattagagaaagagtaatgttacgtgatagaactaaaattacttataatttaggtaaattgatagaaaccgaaagaaaaaacgccatatatattacagaaaagatcaaagcaccattgattattttaaaatctccgactaaagatgaattttttattgccctggaaaagttgggcatggttaaaaagcatgcccagtctaaactataa

SEQ ID NO: 243826 - DNA, 720 bp, Klebsiella pneumoniae
atgttaaatcttctgagtttgggtgaaaacgggtgggggacgctgatcctcagcgcaacgctgaccacgttgctgctgtcgcttgcagcgctggccgtcggtgctggcgtgggcggcgtcatcgccgccgcgaaattgtcccggcacgcgccagcgcgctggttcggcgccgcctggtcggtggtattccgcggtatccctgaattactggtgatctatctgttctattttggcggctcagggatgatttcatggctgggtcgcctgtttggcgcagacggctttattgaggtgccgccatttctgattggcgccctggcgattggtttgatctcctcctcgtatcaggcggaagtctaccgtgctgctcgcctggcgttgatgcccggtgaagtggaggcagctaccgccattggcatgccgcgctggcggatcctgcagcgcatcctgctgccgcagattgtccgttattcgctgccggggttgtccaacgtctggcagatgagcctcaaagattcggcgctggtatcagtgaccgggatggttgaattgatgcgcgccagccagattgccgctggctctacccgcgattatttcctgttctatctcatcggcggcggttgctatttgatcctgacgctgctctctaaccgcgcgtttacccgggcggagagccatctgaaccgcgcctggctgcgtcgcagcgccgcgcaggcgtaa

SEQ ID NO: 243827 - DNA, 762 bp, Klebsiella pneumoniae
gtgttttttaatcgttgtgttgtgcttgttgcccgccgaccccgcggacctttttttgcccctgcagggacatcctttctttcagcaaggcaagcgccgcaggacagggacaaaagtgacagcggggggttgggcgcatcaggaaatgttgtgcttgttgcccgccgaccccgcgggcttatttttgcccccgcaggggcatcctttctttcagcaaggcaagcgccgcaggacagggacaaaagtaacagcggggggttaggcgcatcaggaaatgttgtgcttgttgcccgccgaccccgcgggcctttttttacccctgcagggacatcctttctttcagcaaggcaagcgccgcaggacagggacaaaagtgacagcggggggttgggcgcatcaggaaatgttgtgcttgttgcccgccgaccccgcgggcttatttttgcccccgcaggggcatcctttctttcagcaaggcaagcgccgcaggacagggacaaaagtaacagcggggggttaggcgcatcaggaaatgttgtgcttgttgcccgccgaccccgcgggcctttttttacccctgcagggacatcctttctttcagcaaggcaagcgccgcaggacagggacaaaagtgacagcggggggttgggcgcatcaggaaaattggcgagaacgcaggcgcgcatccaggactggccgccaggacggcggccagagggcggtcgagacagggatgtcgagtccgcccgttccgccagatga

SEQ ID NO: 243828 - DNA, 972 bp, Klebsiella pneumoniae
atgacatatgaaaattttcacagtaatttaacgaatatattgaatggtgaatatgaaaaagaaattcatgattgggataaaataaaggcaatactattgcatattgttaaaaataactatcaaggatttgggcgcaacattgtcgattttattgatagaggaagttgggatcgtataactaaaattgattttaaagatggaaatagacagcttgaattaacatggaataacggatggttgtaccatgcttcaatagagactattttaattattgagcacgaaagagcattttttgtattaacaaaatcatattaccaagacaggaaaaagccaaataaattatattctgctcgttgtcggtcatatgagattgataaatttggccactatatggtagaagttcaacgtgttacgcgttccggtgaggaatttatacagataccaaatataaattgctacacgacggctataatgactcgtccaccaaatcgtgtacctgttagcaatcatgcatccgaattgctaatgcgtaacatcaatcttaacttagcaatagctaagtttgattttctactacaggaattgagtgatattaaagagtatgatagagatgcgttacaagaaaagggaaatacagcatggcgttatcttgagtatgttttgatgttagtaaatattagggctgaaaaggaatttgaagaagactatcaaaagttaatgcttgggagtttatcgagggtgatttattttctcggtctgcctaataacctgaagaatgacatcactctagctcaggagttattaaattcctgtagccatcatggggcgttagaattgaaaaaaaatgagttagaacaggcaatggaaacactacaacagttatgtcagtggataaaaggtatagattttttaaggtatcaaaagatatcaatggtaaatctattaatattaacaaaccattctaatttttag

SEQ ID NO: 243829 - DNA, 3060 bp, Klebsiella pneumoniae
gtggctgcgaaagatgatgtttctagcctctccgagaaatttctagaggcctcagaaagagtgttttattccttatggaataatagtcagcaagatttatggcattggttaatattggtttttatatttataattggtctttgttttattatttatttactgataaaagccattggaagcgcagttgagcaacttgctaagttagtcgaaggatataaatcaagcgggcttcctatttggctaaataaaaagaacaaagttagagttcgcagacggaagcagttttgtgcagtccttgatgctgatttagcttatctagcaaaagcagagaattggaatgatcaatactttactgatcttgaggctgaagtagaaactgagggcggatattatgcgactgctatggataagattaaaagaaaaaaatcattcggattgagaaaggaacgttcacttatccgcgctataacctcaagtacagaacgtgcgatgcaacttgttggtgagcctggttcaggaaaaagtgtggcattacggcatttggctaaacaattcgcagaacaaggcaggaagtctaatgataaaaatgcaattgtgccattatatataaacttacgtgagatggaggttggaaatatagatgaaataaatgcaaatagtgttcgtgattttgtgctcgataatataaggcgaggagatgcagatacttcagcctttgtaaaggaaaactgggacgactattgtgatcgagggttgtggttatttttatttgattcatttgacgaaataccagcagtgcttcactctgcggctggtagtaatatagttcacatttattctcaagctataagacaattccttgagggaatgggagaatgcaaaggtattcttgcctctcgagagtttaaagggccggaagcgttgccgtggaaaaaaatacgtatattaccactgagcggcgaaaagcaagatgaactgatccgtaattcgttccttagtgaacatagtatggatctcgtgcgtcaacatcttgccaattctcatagcagcataggtacaacgcctctatttttaacacttttatgccgctatgttcgagatgaacatcgagcccctggtaacgatcatgacatacttttacagcatatcgatcgattaacaagaagagaacctgaatatttacaaagaaaatataacttaagtcctgaagatctgatgattggtgctgagcgcttagccagattatttgcagaaaatgatacattgagccttgcgccaactttagatcaaattataaatgaattatctgacgaagatatcccaggtggttcaattgaacgtttggtttccgcattagtggattgtaaagttggtcgagcagatgttcctaatgctgcacaaggtgaccgacgttttgcttttgcacatcgtcgttaccaagaagctttatttgttcgctacttaatccatcatccagagacactctctgccacagaacttctcacagaggatcgttggagagagtatgcagttactcttctacaaattagtgagataaaggatgtaaaagagctgttagaaatggcaagcttgattctcatagagcgtgctgataatcaaaactatatcatttgtggagagtcacctcttcctgatgatttagtgtattttgattggtcttctgaagtcgcaataagaataataagtttacttcaggatggattagcacaccgctcaaacgatattccagattatttatcaacttctgtactcaaattcctaagcccaaggtgggaaagaggagactcttgggatcgctgtgaggtccttcgtttaggaggattgttacctgaagggaaattagttgaatatctcgctgaagctttcgagcatggtaccaatctagagcagatgaatgcgtttagacaagcagcatttgcatctgaactgccacaggaagcacaatctgttgttttgaaaatactttttaatcaagttcttacttctaaaaatagagccgagcagttaacactagaagcattagctgcaagatttccttcagagatgggggcggatgtagttgtttctcgcggaaaaaaattaagacgtaatttagagtggattaaaaaattagctcctagatttattgtgattggccatttattaatagttaatcgcgctctcgattatttatatgaatcgataaaaaactcaagagcactttcttttgatgatattaagaaagagtatccagattttagtgaagaactatatttgtcctcattgttttttacgttgtcagtgctgtttggaggtggtttaataagttatttaagagaacactccaatatggcgcttgctgcgattatattatcatctacattaatgatacttttttgtgtatttttttctccatatttagtacgctttcaaggaaagaagatttgtatttctgatattttctcttggtcattgagattccttgccagtacagtattgaggaggcgtttgttagttagcattttgtccggtagtgttttattgttagcaagtgcgttttttgggtactccttgcattggtttacaagaaaatacatccctaatcacgttattaaagtaggcgaagcaaccccaatactttgtattgttatcggtggggtgtttataatgacgattacttatctatttgttatggttaagtttacaagggaaactgtaaagctcaaagagcaaagtaaatttaatattgaacagctaaatgcagcaagaaatatgagaacatctgatttgagcattctgttttctgcaggtggttatgagcagttaatattttggcttaaaaatgatgataagttgctaaacaatatcaataatattcggacgttttctagttttgtacttagtgttttaaggcgcgaaaaaaatgatgggttataccctaaggaagcaatgccattatgcctagaaaatagaaatccaacatttagaggtggtgagcactcttatcatttcgggaaattacgacaaattctagaagaccgatttatagaatttatataa

SEQ ID NO: 243830 - DNA, 219 bp, Klebsiella pneumoniae
atggtgtgccgcgagtatgtcgtcccgggtggcgacagatctcccggggcaacatgggatctggacgctactcacggaacagataaccagaaaagcggtccgcttgcgctaacagagggaacctacactgatatagctggtttgacggagtccgcgaatcagtctattgatgtgtctaataaatatgtcacattgtgtgtgtggaagcgaatggcatag

SEQ ID NO: 243831 - DNA, 717 bp, Klebsiella pneumoniae
atgtcattcccggctataaacatgtgggattcaataggaaaagtgaccagtggttttacattgcttgcgctaatcataatcgctgcactttttgcatatagaatcaaaatggattggaatttaaaaaaccttaaaaattcgaaaggggacgagcgtgtaaggataattaaaatattatccgatagctatgagatagatatatcagggcttagtaaattacaacaatactcaatcgtaatggaacaactaaatcagaagagacagcgttattttttacagattatttcctttacaacatttatgctgcttttttctctcatagctttatacgcaatgtataaatataataaagacaagggtgagaacaaaaaagatattaatgatgctaaaaatagcacgaccaatcatcaacttcagacattaactacaacttcggtaacgcctgtaaaacaggtaatcaacaataatactataaacaatagtcacagcggtatgaagaataaggctgtaaacactgtcgcacaagatgaaaatttcattatcgataagaaatctaaaccactcgacgccatattggctgagataaagagcacaaaagataaagttaaattgaaatcattacagatccaagcaagaagtatactgcagccacaatatgacttcggaaccattagcattaagaaaaaaaaacactttcacgttcttaagcaaatataa

SEQ ID NO: 243832 - DNA, 675 bp, Klebsiella pneumoniae
atgtcagcttataaaagctcgccccacaacagttcagagacagaacttccgctgaatattgaagatttaaagcgatattcacgccagcaaaggcaggagatcaccggccggctaagaaaatttgcccgagagaactcagatcaaaccttcatgcgtaccgcgcatggcatgcgcacgtcgattgatgacgaaaccgcgctggcatgggggccaaaagtcaccgccgcgaaagatatgagcctgacgccggaagaagcagagcagcgctggcgcgagcagttacagctcgaagcgaaacggcgggcagataactatgtcgctgcggcttcggaataccaagagaaaaagtcagaggtagaattacttcaacagaacggcacggcagcgaacggcgaggggagaaattcaccgcagcgaggcattagcgggatctcgcaaacactgtcagatcacgtgatcgacgagctgcatagacgtaatatcgttctctgtgacggagaggttaaattgttagtcagcggctgtattctggctcgtggcgaaatggagtttgccatcagagaaggggagttaatagtggagcgccgattgtttaaacacgccaaccacgccccggcatcattgatcaaacaaagtgagctgcttgagcgctaccaaagggctatcaggaagtaa

SEQ ID NO: 243833 - DNA, 408 bp, Klebsiella pneumoniae
atggcattacaggacaaactgatcgacgcgctggggcgtttcgcgacgacattcaacagctatcgctacattatggcgatcaaatcggcgtttattaccctgatgccggtgatcatcgtcggggccttttcggtgctgatctccaatatggtgctggatccgaagaatgggctcgccagcttttcctcactctcctttctcgcggcgctgaagccgatcaccagcgcgctgaactacgccacgctcaacttcctcaatatcggcgccgtgtttctgatcggcattgagctggggcggatcaacggcatcaaaagcctgtttcccggcctgctggcggtgatctgttttatctgcgtcacgccgaccacggtggagatgatggtcgatggccagatgcacgtggtgtaa

SEQ ID NO: 243834 - DNA, 687 bp, Klebsiella pneumoniae
atgacagaaaatagcatcggcgtctttgttgggagtgagactaaattcaaaaacattgcaattgcaattaaattagttaatcctgcaatgcaacaaagacatttaggcttatttttaaagccagacggtgacaattctgtgaaattgttacatttggcgtggcacaatgattttcgtttggatgacaaaaacaatataagcactgattatttttatcttccaacattcaatggatgtgaagaaacattggctgaaatatttgtggattggttaatcaccgtatgggaagaaaatagagatggattaccctatagcattatttacaacaatacagacttggcgtttgatgctagtggtaaagtgcgtgagttatcgattggagaaggctttacatgttcaactttcgtccttgaatgtttcaaatctcagggttatgaccttattaaatatgaaacttggccatcacgacctgaagataaagattggtctaacacgatattttcttttttagaacaaacgggttcagaacctgcacatattcaagtacaaagaacacacagtacagttaccagatatagacctgaagaggtcgcggctgcagccagccttagtaaatttgatgaaaggagattatgttttgaagaagtaattccattaagctgtgatatcgttcggaaagtttcttga

SEQ ID NO: 243835 - DNA, 684 bp, Klebsiella pneumoniae
atgagtgcgataatagagagtgaaaattcggttctcaatgcgcagcgttatgccatcattaatgctttatcttctggcacatcttcactttcaaacgccagaaaagaaagccttataattgaacgacctaataactacaatcctgttgttttatttttaggggaagtagctaaaaataatcaccaggacttcaatcttgcatatggggcagtaaataaaaaaatacttggctttgataatttatatcaatcattaagtgattctacagactactcggtaactataaatatagtttcacgttcaaccaccaaagtaaatatttcttcagctgactctgatagttcatttgaaaaagatgaattaacttacaaagtaaaaacagtcttaagtcaagtgaattcccttgaaaaggataacgaaagagttgcaagccgttttttgatgagaagcattgaaagaaaattaaaagttaaagatgtgttttatcttaatgaactattgaaaaacatgtcagtaatggacttttcacctcgatgcttagtaagtgctttaaggtctacgtatagggttaagcattctcttttcatgtggagattcgcattacagtcagttgaagaaagactttctgctaagggattggatagccatgcctggcttatagggttgacgaatgacagaaaatag

SEQ ID NO: 243836 - DNA, 732 bp, Klebsiella pneumoniae
atggaatttaattctcttttagaatggacggctgaggggatgaggttttcgctatttactcctcatgtatctaccgatcacgatggttggtgggaaagttttgttggagtagcgccagcatcaaaaactagcaagccagctacgatggaaaccctctacaacggggagttcgaacaaggacttcttgagttaagggttttacctgatcgcatcgattggatttatgggccaattgctggacaaacgccattcgtaccctctgttggtccttttaaggtccaacttggattgttcttgaatgggttcaataaatggctagaagcatacggctgcacgtattctcgtttagcctttgctacaaccattttgaatgaaaccgaagggcgtgaaagcgggtatagcgagttgaataatgtattgccttttatgccattatcaaatggtaaatggcaagatttcttcctacaatttaacaaacccattaaaactagtattggccagcatgaactcattagaataaacagactgattaatttctctgttgccagctttaaatttttcgcttttccaaatgtggctttatcaccctcggagaaacactttgctcgtatcgagtatgatattaatactcatattgaagatactaatgagtttgataaattagattcgcttgagctgattgatagacttatcgatattattgatgctactaaatcagcctcggaggtgtag

SEQ ID NO: 243837 - DNA, 522 bp, Klebsiella pneumoniae
atgttaatgagtaaagccgagtatgcgcgtcatcgcggtgtaagccgccagacggtatatgactgggtggcgaaaggcgaggttgtgttgtcgggtactaaaatcgatgtagacgcgacggaacgccagcagcaacagcactcagtccccaaaaacgaggcacccactacagacccatggccgcatcgaacacgggagctaacttggtcagaatgctggaaagaaataaaatctggggatggtaaattccctgccccagataacgatgatggcctattagaagctgtttctgccgcggctgatgagttgggatatgatgtagagtttctcgaagaaggcggtattttccttgatacacaggatgcggaattttacttccaacgttatgatcttaaggagaatgccgaacaactactgctgacgttaaggcgcgaacttttctataccgctaccgaatgccctgatgagatagccgattggagtcccgaaggtataaaggcattgtctctttggcggaagtga

SEQ ID NO: 243838 - DNA, 951 bp, Klebsiella pneumoniae
atggataaagatctgaggcagatgctgctgacgctgcgtaaagagcgtgaagatttttgccagttgaggcgcgagcttcgtgagcagggtaatgactggctgccgtaccctgaacacttacgggctattccatgtggcgcgacaacccgtgcgggcactccgtgcaaaatgactacgatataccacaatggtcgctgtaagttacacggtgggaaaagcaccggggcaaagaccagggccggccgtaaacgtcagcgcgatggctatagggcatggctggagaaacagcgagacagcaaggcgggcaggaagcgaacgcgcgaatatacccgcgatatggccagaatttgtgcatcaaccttatcggagattgtagccagcgaaacggacagagcgttacaaccagtcgatggtattagcttacgcctttcaggtggtacgctggtggcagtgctgccgcatggccatagcatcgcggtaacgctgacgaccactagcccacgatatggtggcgcccgatggtggtatgtttgtccggattgcgggggacggaaagcctccctgtatcttcacaatgaatcactgtgctgtcgacggtgcgccggtcttcattacgccagccagagtgaagatgagatatctcgcttacggcgcagtgtgttgaagcagaggcatgatttatggggggatgattacccacctgcggacagcctgctaaatagcccgctcaagtttccgaagcctgccggcatgagatgggataccttcgagaaaaagcgctctcgcctgctaaagactgaatcagcttactggcggttgaaagaaccgagggacgctaaagggtttgcccgggtgatgcgcaaagctgaggcgtcaatgcgttcatttgaacgggcatcgaaaaaggctaacaccaggctatcagtagagcatgtcagggcaaaaagctga

SEQ ID NO: 243839 - DNA, 615 bp, Klebsiella pneumoniae
atgagctttccccatcgcggactactacggaagctccgccagccagcgcgtcatcggagccatgcccccttaacatccgtcactgaccttccccggttcacctgcctggactcagacatactgaggaggttgcccgtcgcactctttatccttgcttgccgcaagttggcagaagtcagcaacgcaagcgtgatggacgctgctgtcccggtgtttcgcatacatgtcaaaacacctccggcagtgcttacgtatcactgtcagctcctcctgcacggcctgtcagatcacataggccgtggtgacgttttcaacccacagaggcggattaacgggttcatgttcttcagcctttcagcactcaaccttgaggatcatcttggcttagtgatctcgcctcaatccccgttgtcagcgggttacatcaccctgcaggcatgccgcaggtcactgccgctcaggttctccaccgtcacacccggtgggattgttgggcttcccgtcatgagttaccggttcaatattccagacagactcgtggttcatttgagcgtccatgcccgccctgaactccgggcacactatacgtcacgtcgccgcaccacacctgattag

SEQ ID NO: 243840 - DNA, 264 bp, Klebsiella pneumoniae
atggcaacgctcagaggcttccggatggggcgctggcttgccggcagactcatgaaagagctggggctggtcagttgtcagcagcccatccatcggtataaacgcggtggctatgaacacatcgctatcccgaatcaccttgagcgtcagtttgcagtgacagagcctaatcaggtgtggtgcggcgacgtgacgtatagtgtgcccggagttcagggcgggcatggacgctcaaatgaaccacgagtctgtctggaatattga

SEQ ID NO: 243841 - DNA, 387 bp, Klebsiella pneumoniae; identical to SEQ ID NO: 241860

SEQ ID NO: 243842 - DNA, 570 bp, Klebsiella pneumoniae; identical to SEQ ID NO: 231480

SEQ ID NO: 243843 - DNA, 1080 bp, Klebsiella pneumoniae
atgcagattggttttatcggccttggcgcggtggtagaaactgcctatttaccggcgctgcgccgcctgggataccgtattgatagctgccagggctatgacctggactgcagcagagcgccgccggggatccagcgccgcaattcgctgtcggcgctactggccgaacccctggatacgctcttcattaccacctcatctctccagcacctgcccgtgctggagagggcgttagccagcgccattccccgcatcgtggtggagaaaccgattgtggccaaccttgagcaggccgcccggctgcgggcgctgctggcgccgggcagggaggccggtcgcgtgctggccctcgaccactggatggcgcgtgggttagcgctgaacgctcttgctccgccgtggcaggcggaagaggaggccagcggcctgccgccgccgcacctttcagcgcaggatatcgtctggatcgaaggctatttgctggagccaagcggctttaacgctgccggagaaccggtcgcgctcaactttgccaccggcgagctggatacccggcagctgcgtcatcccgacggcgtgatcctcgatatcggtacccatgtcctggcgatgctgcgtgaaaccctgctcggctacggatgcgatgtgccgctggacctcgccgtccgagcggtgaaagaccggctcggccgggacattgctcatggggatatggtcaccgccgagggagaggcgcatctgcagggacgtctgggcgatatcccgctgaatatctggcttaacaaatatgctggtcccgcgggcgggcaaaagggaatgcggatagggctgcgggatgggcgaatgctcgccctcgatcgcgcccctgatggcgaggtggcgacgctacaggacggtgagcggatccagcgctggacccggcccggagcgatctatgcgcactgtctcgatgagcagatccttggcgcggagaatgtgtttacccgggcgaccgaaagcgtggccgggctgacgcggcgtcggcttgaggaagtggagtggctgctcaggttgcagcagcaattacgcggccctcattaa

SEQ ID NO: 243844 - DNA, 600 bp, Klebsiella pneumoniae
atgaatgaccgtgaaacgcgctgttacagcggggaggtcagagccgagcaacgcaccgatgaacctacccgcattctgggctatggctcggtgttcaacagccgttctgaacccctgtggggattccgtgaaatcatcaagcccggagcatttgacgatgtgctgaatgatgatgttcgcgggctgtttaaccatgaccccaactttattctgggacggagcgctgccgggacgctatccctgtctgtcgatgagcgcggcctgcgttacgacattacagcgccggatacgcaaactatccgcgatctggtgctggcgccgatgatgcgcggtgacattaaccagtcatcttttgccttccgggtatcccatgacggtgaaaactggtaccaggacgatgaagggatcgttattcgtgaaatatcgaagttttcccggctgtttgatgtcagtccggtgacttatcccgcatatcaggaggccgactccggcgtccgatcgatgaaagcctggcaggaggcgcgcgacagcggtgcgctaaagaacgccattaatcaacgaatggcgcgtgagcgcctgctgacccttcttaacgcgtaa

SEQ ID NO: 243845 - DNA, 666 bp, Klebsiella pneumoniae
atgaccaataaccagttaacagacgcgcaaatttcaaacgcgacactcattcgtttaattcgatgggctgatgagcataaaagccactatgttgcagctgcgttgcgtgagctacaggaacgccgcaaggccgacagcgagccggcggcgcttcaacctgagctggcaaaagttatctatcacttccgtgactggaatgaaggatttccggttgagcggttcaaggccgactacgtcattagctggatgctggcaaattatccgccagcgcaactagcaaaggaccgagagcaggtacgccgcgagcacgcagagtggtcacaggcaacattcggtaatgtcggcccggttggcccgctgaagcacctcagcaaagaagcactggaagccgctgccgagcctggcgacctgtcggagtgggctgatatgcagttcctgctatgggacgcccagcgccgtgccggtattacagatgagcagattacccaagcgatgatcgataagctggcggtaaacaagcagcgctcatggccggagccaaaagacggggagccaaggcagcacatcaaagaacgacctcgtaaaaaagtagaccgctgtgatgtttgtactgaaggggctcgcggcgggtgcggaacgtgtatttataacggtaattttgaatga

SEQ ID NO: 243846 - DNA, 831 bp, Klebsiella pneumoniae
atgtctaaaagtaaagtatcacctcaaacgagctttgaagaaatggtttgtggttatgttatgcctatctcagatacccctgattatcgctcagggcactgggaagatataaagtcaatgttggatgaagttactatatctatagggtttaaagaaagtagaatagttagtaccggtctcgatgtttcgacaatacataaaagaattgtaaataatatttataatgatgacataataatatgcgatgtaagctctcgaaatcctaatgtaatgtttgagttagggatgaggatcgcctttgataaaccggtagtaattataaaagataatgcaacgcaatactgtttcgattctggcacaatagagcacctcgaatatcctaaagatatgagatactctgagatcgataagtttaaaattctattacaacagaaaattgaaaagactattgaacatcacaaatcaaatcctgatgaaagccccatattaagtagttttggttcatttactgcaatcaggcctaacattccagaaatgagtgatgtggacttatttaggtctgatttgcaagaaattaagtatcttttgtctaaaagtttaaggaaccaggatgatgtattgaagccgacatcaagatggttgagagaaaggtaccctaaggcaatgttaggaagtagcgacgatgaggtttatgcaaatgttacttctataccgggtctaagagtcgatggggtcgatgataaatttgtttacattttggctcgaagtttgactcccttaagagaattggcttccaggtttggcgaacagaaatccctaagtattgagtga

SEQ ID NO: 243847 - DNA, 1029 bp, Klebsiella pneumoniae
atgccttcaccattcctatttacaagatttacattagaatctacaaataatgaaataagcgcaatagttagcgatgtaaaacatcaagctcatatcttctttattgggaataataccagcgacatttatagaatggaacacgagacacacaaaccgattggatatataattgcaaaaaaatgcaatcatgaatttaatttatgcgcaacatctggcatgtattctcacagttttttcgacatacctagaataataattgtattattatcgcttctgtcattgactttagggatattaatatatgtaagcataaatctcttcttatctaagaaagatactattttgtttcgtctcaaccaagcattaagaactgataaattaagtatagtctatcaacctattctatccatcaaagaaaataaagtaataggtgtggaggcgttattaagatggtatgatactgaatacgggcaagtatctcccgatgtttttatttctattgctgaaaaacatggaattataaggcacgttacaaaatttgtaatgcttaaatcaatactggaaacgcacgaattaataaacacgtataaaattgacttgagcattaatattaattcgaacgatctgttttctgcgttatttaaagaagatctagtaaaagccaccaatttatataaaattagccctagcaccattactcttgaactaacagagagacagtcggcaaatatatctttaattaaggagcatttggtgaacttaagatctctaggatacaaaatagcccttgacgattttggtactgggcattccaatttagactggttgtctaacctagaagttgataaaatcaaaattgacaggttcataacaaactcaattggcaaaaactcaattaactctcgtattcttaataaaattatatcaatacttagcgaaatgcataatcaaataatattcgaaggtattgaaacagagggacaacactcatacttagaggctaacattcctaacgcgtatgctcagtga

SEQ ID NO: 243848 - DNA, 993 bp, Klebsiella pneumoniae; identical to SEQ ID NO: 225970

SEQ ID NO: 243849 - DNA, 246 bp, Klebsiella pneumoniae
atgaacgctgaggattgcagagaggccaccatcgttttgcataaaatcgacgcctttgcaggtcgcgcgcatatgattcagaaaagagtacgggtcgtcacttctctgttctctgattgtgagcaagccatgttcagccagataaatgatgtttgcagagagtttgacatcgtcgatctgtattatttctgggtcaaagctattccatgtggtgtgagctgggtatgcattaatacaacaagatag

SEQ ID NO: 243850 - DNA, 378 bp, Klebsiella pneumoniae
atgacgatttcgcgtcaaggtttagatgatcttgaggcggacatcaatgaaagccttgagagtgaatgcattgaaattaccttctcaggtcacttcaccaaggatagggtgaacgacccaagaaacaaaccgatgattaccttaaaagagctcgaatctatattcaagcagttcaaggcgatacatgctcaaacggttgttggttattcctctagtgacacattcgtccttaaatgcaataactcgaagataaatttgccgtgtatagttgagctgatcaggaagtttaatcagccatgggtgagaatcacagtcatgacggttatgaggaaaccagtttttctctcgaatgacaaatatgaattatttgttaactga

SEQ ID NO: 243851 - DNA, 213 bp, Klebsiella pneumoniae
atgacaaaatttaacatgcagcttaaacagaactatgccgctttttttattgagaaaacggacaagtgcgtgattgttgacagttttgataatcaggaatttgatgtgcggatcggtaccatcaccgaaagcaaacatatcggtacggtacacgcccaatctgatgaagagctaaatgagcagttagaacgtgtaacggcagattttttatga

SEQ ID NO: 243852 - DNA, 168 bp, Klebsiella pneumoniae
atggccggagtgccgctccctctctccctgaaagatatcgagctttacctggcttcgcgcaccatcctgatcgaccgcattgagtttgatgcagcgatactggcccttgacgatgcctggagggatgagtgggcgacaaatcagaagaagcttagtaaggaaaaatga

SEQ ID NO: 243853 - DNA, 744 bp, Klebsiella pneumoniae
atgtcaaaaacacggcttagaaagcccggtttttcagccaagtctgtgctgaccattatgttaatcgctgcgtcatctgcatcttatgcagcagaaagcatcgatcaactggcgacgcgcatcggtatggatcacttccgggaagcgatcaaaaagggtgatcgcagcgccttcaaaacgctgccggcaaaaggctataaaaacggacttaccgggttgctcatcaaaactaacacctacattaaccccgaagacagctttgctgattgcgatacggacaccgttattatctcggcgcaagaacacaaaacactccctggttgccgcatatctttaaagctagcgactaaagatgctgacggtagctatcacgataatggcattcgcgttgaatacggtattgccatcggctccaaaaagtttattgccaacaattcagcgtgggcgcagcatgccattacaggtgataaggcgctggaaagctcgttgaagagagatgctaacgatactgtatgcactgcatggtcaacgatggcaaaaaatattgccatcgggcgagacgaacacaacccaatttctgtctaccaacaacaaattgaagatctcagaggcaaacccggcatcactgagagtaatattgtttttgcccacgcccttgctggcatggtttacaaagacatggccgcaaaaaaaccgcaagaagttgaagcattggtttatcaaacctgccaatcaggtatgtga

SEQ ID NO: 243854 - DNA, 444 bp, Klebsiella pneumoniae
atgcgaacccgtcgagccgcaagattactgatcatcaataacactaatgacgtgctacttttccgttttaaacatcgtgatgacgctttagcaggaagatcttactgggcaacccccggcggtggacttgaaggtcatgaaacttttgagcaggctgctattcgagaactttacgaagaaacgggaatcacacgggacttcataggcaactctatcggaagcagcacttttgaaatgcttcttccaagtggggaatctgttcaggcagaagagcgcttttttgttgtgaaaatcaccaatacggaaattagcaaagaaggctggagccaaaatgaaaaaaacgttatcgaccggcatcattggtggactgaaactgaactcaaaaatactaaagaaacggtttatccattgaatattctggaaatgatctcagttctgaactag

SEQ ID NO: 243855 - DNA, 1017 bp, Klebsiella pneumoniae
atgaagattcgagaatgcaaagctgccgaagcagaccgcaaattctttaaagtctcagccggaattgactggctggacttaaagatcagcttatccagactgacccagcatcgctatgttcaggaagaattacttaaaatcaccgggttaaaactctgggttgaaccctgcggcctacgtatctcgaagttgacatcatgcgaaccccatcccgataacaacgtcaaaacttgggtaaaacccatgattagcagcactaacgatacttttcggattcgcttccgcgatctactggtaaaacattgtgggaagctggaagctgcactcaaccagttgcaaaaccgtttcccatttgcgtgtgagccgcaaattgtgggaatcgaagttttctgcgatttcaggcacaagattcggtcgataaccgctacaaatgcgatgacctatcggcttcaaagctccctgttcagtccgggaaccaaagtccgacaatacaatcccgtaactcgaagaaatgttttccttgatgttcagggtgctcgtatcaatcctgaatggaacctgagaacgggtaataagtgggataacatttcgtggcaggtctaccacaaatgcactgacaacggtcagaaactacctatagaagagcaacgcgctcgtgttgaagtcacgttaaaaggtgctgcgctcactcactactctcttcaccgccttaacgacatgcagcgctttcgatttgaaaccctcactcacctgttcaaatttcgcaaaccacttgagcctgaaatgatggctgacggtgatttgttccggttgaccgctatcaatgcggttcgtaaggtgaacgatgcaacagccgagcgcggattgcattctttcaataacattggacgtagggataaacgtagctggatgatggttaacgttgacaagcgcctgcggaaagaaagctcgcatctggcggttgttagcgatctgcaaaacgccgttaagggtgctttacggcgcctccacgtttaa

SEQ ID NO: 243856 - DNA, 159 bp, Klebsiella pneumoniae
atgcccgtatccaatcattaccaagcccaaccggattgttatgtgcgctttgattggggtgggatctcccttgaaggcgagtttttcagctatgaggagtatggtcgagatatcgatccgaaatggggatacatccgaccatttgatagagccatctga

SEQ ID NO: 243857 - DNA, 552 bp, Klebsiella pneumoniae
atgaaaaaagtaattatgaaaactgttttagccagtttggttgtatccagtattactgtgttgacaggttgtgtgacctcaccagatatggaagcagctaaacaaccgctgggtagtatagtcagtgttgttaacgttcccggggttaaaaaggatgcactttacagtagttccaaaatttgggttgcaaaggtcttcactgattctaacagcgtaatccaatatgccgataaagaagaaggttcgattgttggcaaggggaatgttaaatacccatgtgacggttttaatgattgcttagctaatgaagatgttcgatataaattcactatgaaaatcgacacaaaggatgataaagctcgcatcacctttgatgatatccacatttatcgtccggcccatgtaaccagcgggattgcgttccctgccatagattcgccaaatatgactgttggtggacaagcaaaagccaaaaaagcgttgaatgatattgtggaacaatacaaacgcgagatcgtgactgaaagtagctctgctgcaaaagactggtaa

SEQ ID NO: 243858 - DNA, 1092 bp, Klebsiella pneumoniae
atgaattggcatctgtattctctttcgacagataaacttcagacgatggttgccgcccagcacgggaaaataggcgatgcaataccgccactggatgttttccctagcggtatcgaaactgcctatacaaggtactgggaaagtcgccttacctcacttcatcaagtggttgtcacccgtaaccgatacgtacagcttattgaatatgtcattaaagggcataacgaaacgttcaagatttactcaggaattgaagcaacccttagccagcgttcaaaactgctgagggagatcattgatgagtccgctatcgtaaatgttgacgatgttctaactactcgagttcaacgcttaacaaactgtaaccgccaggctatggccattattcagcgtgtcgctgcgctacaaaatattgttagttggatcaggagcaatcatgtatctgatagcacaatcatgggattggcagaagaatatgaacgagcggtgttgttgggaaagttaacatgtggcgagatactaactctttatgctgattctgacgttgctatggactcccttaaagcactttctgaggaggtgggaaacgctacaggtgaagagcgccagatgattacagacccgattagagaagaaatcagctggcgatctttccagcgtaacattatcagtgcgacgaaagagcattgcctcagtccgcaacttaccgtactgcagcatatgcttgaaagtgctaatgtcgaacgcaacagaagtaattcagcttttactgcttcagttaagcagtcggaccgtataaaaatgacactattatctgaaccgcagcatgcattcgaattccctgttaatgtatcttttgataattccatggtttgggtcgaactggcagatggaaggatcgtaggggctccacttaaatggtttccgaaactacgagaagcaaataggttggaacgtgatcaataccagatgactcctgtaagccttatatggcgagccttggacactcaaatccatatggatgatctctttgatggagataacaatccattatatccaatagatgacatcgacaaaaaaattgacctataa

SEQ ID NO: 243859 - DNA, 1359 bp, Klebsiella pneumoniae
atgaatatattgtcagaattactcagaaaactgatgcttgatgaaaaaaaagtgatgaataataatccggttaagcaccccacattgatcggaagcatgtatgaaggggccaccaagaaaatactgaaaaaaatagacttttcacatcctgatcttaaggtcgtatcaggaatcatcacatcaggtgataatcactctggacagatcgattgtatggtcgttataggtgaaggagagagaattacaaatactgatgactttttttatccgatagataaagtgatagcagtttttgaaataaagaaaaatttgttttcacgtgaaatagataacgtttatcagcatttgaatgcagtcttccaattatctaaattagattatcaggttaagcaagacgaggggactcttaattttaacactaccagaccagctcaggagtttgttaatctttttggcgtgtggccttgtcattatgaagaaaatgatagtctaccactacatcaacgtgtagtgtatcaaagcctggttagagactggctcactccattacgaattgcgattggttataatggtttcaaaagcgaagacgcacttcgagcaagcgtccataagatttatgaaaataaagaattccaacccggatatggcatgcaaaatatgccaaatttgctgataagtgatggatactcattaattaaaatgaatgggatgccttataagggattttggaatgaagagcatggatggtgctggctgggttcaagtaatgcaaacccaattttacttatcatggagttattgtttgaccgtgtgcaacttttattgggaataaaacctgacaggggagacgatcaaaatgaggaagttctctaccctctaattttgagtaaaccagtagttgagagtgaaaagttgggatggtacacattcattatacaggctcccgtccctgaaagacaggtatctcaaacacaatggtcacctatacgactatctcttcttgaaaaagatcttctgggtctactacataaacatggcccgctggagataaaaggtgatatactctgtgaatataaatccaaatatgaattagataatgttttcgaagctattcagtcacttttagatgctcgggttgttttggctactgatgaacaattgtatatatgttccggaaaatggtctgtagctaaagtatgcggtagcttttattgcggtgataatagcgatgaaagattcgagcattgggtcaaactgaacacgaccccaccttggcagatggggaaaatttacataatcagcccttctccttatggaccgccaacgttatcgacagaaaagggtttaagcactaaatga

SEQ ID NO: 243860 - DNA, 1896 bp, Klebsiella pneumoniae
atgaatctatcaaatgctcagcgtcagattattgaagctccaataaactctgctgttcaagtgcttgcatcagctggctctggtaaaacacgtgtgttaacagagcgtgttcggtatattttggataaaactaaaaaagaaggtatcatcgctcttaccttcacaaataaagcagcggaggaaatgagtgcacgtttagctgatttcgagcaagtagaagatagggtttggatcgctacgatacattctgtcgcacagcgtattttggagaaatatggacacaccgttggtttacccacggagttacacatatatgatagagataaagaccgaatggaagtcttcatacagtctttacgtgaagatggcattaatatagatgagtatctaaatatcactgattcaagagaattgaaaagcagagaaaaaaatctgcaatcctttatggatattttctcgaaaataaaacgagagttgttgactgaccttgaagttgccgaattatatccaaataataatatttggaaaatataccaagactatcaatctgcactgcttaatagtggcggcatcgactacgatgatattttggtatatgcacataaaattctactaacacatgattgggtcgcaaaaatataccgatcccagtataaacatatttgtgttgatgaagctcaagatcttaataaagcgcagtatgagtttatcagggtactttgcggtgatgctataaaaagcattataatggtaggagatcctaatcagatgatttatgggtttaacgggtcctcgaaagactatctctgcaccaactttgtagatgacttcaccccacaatgctttgaacttaaagaaaactatcgtagcactaaagccgttatacgtgcagcaaacaagttgcggccaggctcacaagcagaaattgattatgccttagaaggcggtgtatggatttcagaatttgatacggaagaggatgaggctgcggcgattgttgctactgttaaaaaacttttggatttgagagttaacgatgaaatagaaggtgagatttcactgaaaaatatggtagtgattggccgcaatcgttttgtttttagtaagcttgaaagttctcttaaagacaattcaataccttactctttgagaaaaggtgaaagacagcttgagccttcaactagattcggcaagatattagattatgccattcgggtgaaacttaactctaaagattgggtggatgggaagaagttatgccaaatattgaatattgctgagccaaaaaattggacgacctgtgtattgcaggaaatagctgctcaagtttcatcatcagttgacgagtactctgatgtattcgcaaaacttcttttcgctgtcgatggattggatatagaaaatccaaaaatccctaagcttgtaaaggactttaactgccttctcacttcattggttgaaagacatagcagtatttctgacggtaaaatagaagatgttaagctcagcattgaagaacttgatgaatttaatcgcacatggacacgctttaaacggaaaggaattggggattccctggttgcatttcgcaatgcgttagctctgggacagctttcgcaagatacccttgaaaacggcttaacattaagtaccgtacacacaatgaagggtcttgagaaggatatcgtgtttttaattggtatgtgtgaaggcgttttcccagactacagagccaatacagtaaaagaacttgatgaggaaagaaataacgcatttgtcgcagtaataagagccaagcgatggctttatatatcttatcctaagcaacgaatgatgccatggggcgacaaaaaatttcagcgaaaatctcggtttgtaatggagatggaatcatga

SEQ ID NO: 243861 - DNA, 1824 bp, Klebsiella pneumoniae
atgaatatccaaatagatactgttcgtatcagcggatttcggggtatatgtaatattgaagtgaccttaccgagagttaccgttttactagggcaaaataatgccggaaaaacatcgattgtaaaagctctacaactagcattgggggactactcacggtacttagctgacgaagattttcatataggcgaagatgaaaaacgccaagagacgattacagtagaccttcgatttatagctgttgatagtgatgcgagagcaagagagttttcagagaactggcaacaggcatttggcgataaaattcagtcagagcctgatgggaagcaatttgtagcaatacgtactactgcaaaaccagatcgagtgaaaggcggttatattgttgagcggttccatttggatgagtggccagaacttagtgggtggcaagacgttcgagttggcagcaagaacagattgggcaaacgattggagtctgtacctttcatttcgatcgatgcacaaagagacatccataatgaactaaaggaaaaatcttcttttgttggtcgtgtgctatccagcgttgagtatgacgaaaaagacgtggctgaactagagcggctggtagccgaagttaataaagaggccatagaaaaaagcgagccgcttaaacgattgaagactcatctggataacatgaatcaatcgtttgagggttcaggccaaacagagcttaccccatttccaaagaagattcgtgacctgtcaaagcggtttagtgtgaattttggtgaaacggataaaagctcattttctatggaatatcacggcatgggtacacgcagttgggcatccatgttaacagtaaaggcctttaccgaactgctggccaaaaatcacgaagaggaagccgagccatttttcccagttatggcagctgaggaaccagaagcacatctacacccgaacgcgcaaaggacattgtatagacaactcgtggatgtgccaggacaagtgattataagcactcactcgccgtatattgctggcctagccgagttgcacgaaattagatctctgagcaaacggaaaaattcagtccaagtatatcagttgagagatgagtttgaagatgatgatctgaggagattgaaaagagaggtagtacactcccgtggtgagctcttattttccaaagcaatagtcctctctgaaggagaaaccgaagaacaagccctccccgagctatttggagcgtatgctggaaagcatcccttctcacttggaattaattttgttggtgtcaatggctcaggggcaaaatatcgtccattcctcattttggcgaaagaccttaacattccagtctttatatttagtgatggagagcctaaaacgattaaagatctcaagaaaaattatgaaaaagttttcggagttactgatatcgagaaagccaataatatcacaatacttgacgggactgattttgagggatatctattaagtcagggccttcgcgatttgatagaaaaaactatcaatgaagttgaaggtgaggataccatagacaagtggattgagaaaaaagacggcatgcttttaaaacgagtcaaaactgataagccaagttgccaaacctgtcatcagcatatttttgaggatgtgctacgagattacaaggatgatgctggacgaattcgcgcaatccttgaaattcttgattcaagcaaaccgctttatgctaaggcaattacagacaacctgattaaattgtcagcagataagtttcctgagaagatcattgaattattcaaaaaaattgaatctggagtctga

SEQ ID NO: 243862 - DNA, 240 bp, Klebsiella pneumoniae
atgaccgaaattgagatttatgagcgtatcagacaagtattggtcgatgcgcctcgcaatcaatacaccgcagagttacacctgcaaatgattaaatatgctgatgaattgaagaacatcacatctaaagagttctgtgaaggggttgggctacggagcagcttcggcacggagttcagcaagatgcgcaacttaacccagcgcttaaaagcagcagggctcaatacagcaaagatctaa

SEQ ID NO: 243863 - DNA, 195 bp, Klebsiella pneumoniae
atgcgtgcgcaactccttgacggtaaattctccggcgatagccgcaattacaatatcgccgtgacttgccgaaagcgaacgatcaaccaccagaaggtcaccatctccaattccagcatccgtcatggagtcaccgcttactttaatgaaatatgtggcgttagggtgggctatcaaaagcgtattgagatttaa

SEQ ID NO: 243864 - DNA, 1269 bp, Klebsiella pneumoniae
atgacgatgtttgctctggctgacgtcaacaacttttatgcgtcttgtgaaacggtgttccgcccggatttaaagggaaaacccgtggtggtggtctctaacaacgacggttgcgtaatttcgcgttcagcagaggcaaaagcgctcggcattatgatgggagaacctttttttaaattgaaaaataaaacattcccctccgcagtgcacgtattcagttcaaactatgccctttatgccgatctcagcgcgcgagttatgcagacgctgacggagatgtcgcctgccatcgagatctattcaatcgatgaagcctttatcgacttatctggtgtagctagctgcatgtctctgacagattttggcaaaactgtgcgaaaccaggtgtttaaaaataccgggctcacgatcgggattggcgcttcgcaaaccaaaacgttagcgaaattagcaaattacgcagcaaagagatggcctggtacgggaggtgtagttgatttatctgacatatcacgtcagcgaaagctgttagagcgcgtgcctgtagaggaggtgtggggggtaggaaggcgcatcagcaaaaaactgaacgctatggggatcagtacagcactggacttagccaatagctcaccgtgggtaatcaaaaagcatttcaacgttgttctggaaagaacgttgcgtgagctgcgtggtgaaccgtgtctggcgcttgaggagttcgcgtccgataagcaacagattatgtgcagccgatcttttgggtatcgtattaccgagtatgccgatatgcgtcaggctgtctgcacctatgcggagcgcgctgcagcaaaattgcgtagcgagcaccagttttgtgcttttgttagcgtttttctacgcaccagcccgcacgcagataatgaaatttattatggaaaccaatcatcggtgaaattactgacaccttctgatgatacgcgtgacatcattcgtgccgcgacagaatcactggatcgaatatgggtcgatggttaccgttacatgaaagcgggcattatgctggcagacttttttagtcgcggcacagcacagcttaatttgtttgacagtttcgccccgaaagctaatagcaaggcactcatgacggcaatcgacggcattaacgcgtcaggaaaaggaaaggtctggtttgcggggcagggcatccaaaagccctgggcaatgaaacgtgagatgctgtcacctgcttacactacacgctattcagatctgcctatcgctaaatga

SEQ ID NO: 243865 - DNA, 447 bp, Klebsiella pneumoniae
atgacaaataaaaatatgagcggtatttatacctggcaacgcaaccgcgttgaaaacagtgtgtccttggttaaacgtgcgattgatgtgctcctgtcagggaggctaagaatcagtctgacgacgattgttctggcttcaaaaagcgtagaccctgcgggaaaaggcgtatctgcttccaccatcttgcggaacaggcaatgccacgagctgtacaaaaagcacgcaacactaagcggcagtagccagaaaaaaagtaccatttcggtcgctgagcttaatgatccaacagagtcagaattacggagagcttatcttcttgcgagtaagagcaaaatagccctgatagcgaaggttattttgcttgaacgtgagcttgaaaactgtgaaatacagaatggtaacctgcgagagaaaatactgtcactgcagctacagcacctgtaa

SEQ ID NO: 243866 - DNA, 2934 bp, Klebsiella pneumoniae
atgagcattgatactcaacctgttgcacggcgccgtcatacattattttgtgaacttactcagcgtgaagaacggggaaattggttcaggattgaagacttaccgggcacccgtaccggacggcctgcactgaaaagagcgttgatgccttacattgagaatgttatggctcagctgctcggtactacgcccatgtgcgataagacgtttctaagatgggagcagcaatatctgacatttgattttttcatccgatgcagcagatatgcactggagattaaatatcgatacattatttattgcattgaggatgggctcagaaacaacaatgaagagtatatattaaaaataagacagcagtgttgtgctgcagataaagatattttcagcattgttgagaaaattaagttcaaggagcctatagccaaacccgttgcactctctggctctatttcacgcctgcctctggatgagcgtgaaaaggttatttataaattatacgacttttataaagcgcaggctgaaccctttaaaacttcagaaatatcagatcaattcggcatagatttacatatcatatctaggtatggacgttgttacattagcaaactggctgatctgcttattgacgaagatgtttctgatgatttggcctactttgaatggaacagaacggtaacgaccttcaagtactcactgcaaaatacagcaagagcaaaagagattggcgagaaaaaagtggctcttgccattgattatttaagtcgaaatcaacgtgaagtgacatattcagaaataaccaccattgtctgccttgaccatcggctagttaaaagagcggtggctcaatgggaaaagcgcactgataaaaaattggtgaaaaaagatgcctggaaaacaatctctctggatgagctgatcgccacactcgacccggttcttcatacaataccgttgacgtttctggattcgcctgcaacagggaaaccaatgaccaatgcacagatacgtatgatttacgagattaagcaaccgaggctgagaaacacggcattttttatcatggcgacttgttacagtaacagaagaaatgacattacttttttttattacatgccccgttttcttaacgcaactggcctggatgacatagaccagtttgactgtgagacctttttcaaggcgtatcatcaaggtgaccttatcccggaagacaacatagggcagcgggctagaataattcagacgtattttcggttactcgttaaacaagcagattacttcagcaaacttaacgcagaccagcgagaaaaatttaccccctttgcactgccgcgcgtgtcagacgatttattctggaaaaaatccaccctacacagggctgtctcacaggaacaaaaaaacaaaagaaagtctaaaacagctgtcctgcaccagaagttttattttcttcgcgattttgtggaaagaagaaagttgcagatcaacaggctacatcaggagatacaaaaggcgtttaagcaatttgaaaagtcggggaaaaagacgccgctggtttttgagtatacagaatctgttgtcatggaaaacagaggcgaacaggcatatacgcacaggtttaaagtctgggacgcaaaactattgaggcaggcacatgagcatgtcgctgaaaccggaatctatcgatttcatgatgctaatccgcatcatactattcacgactcggatataaaattcactacttatgagggaagctacgataagcatcaccagcccgttgaagggttgtggttcactgaactgatcatgcttgccgcgttcacgggcactccttcggctgaaatcactgaccgatacggggtatctaagacgtcttttcaaggtcccatcaccactccctacggatttacagccagccggtggcaatacctgttgagtaaagatttgggactgatatttattcctgttgaaattttgatggtcgatgctctgttggcgcattctgttgtacagatcatgtcaaagacaggggccagagcacatgagtttttgcagataaggttagtcccagagcatctttatcggatcagtctggcagaaaataaagagtgcattttatttaacgcggttcccaaagggagattaaaagaggagcctttttatattgataataagtgcatggaaagtctttatgaatggtggggttaccaaagaagcagagcgcagactttccccgtaattaaagcagcagcatgcctggggccaaaattaaagcctgcaagctacctctggcaaaacgatgaaaaacatttcacacagaaagacatcaacggcgcactttccgttatgctccatgggctttccctgaaaacacctgccggtgagcctgtaaaagtcaccagccatctgctcaggcatagttttgcaacagagatgcgtacgctgaatacgccacttgatgtgctggctctgttgatgaagcaaaaagatgtcaacgttacggaatattatgccaggcatacgccctcccaactggtcgagctgcagcagcaaattttcactcagcggcatgacttctccaggcaacatatccgcacgaaagccgatgttgctcagcaactgacagaggctatcggtaaggtgggagcgctgatacccgttacgggtggatgttgcacgattgcgaatgcgtgtccggccaagtttgcctgtattggctgtgcggggaatgcccccgatcccgccagacgcagtgacgtcctggtgtacagagatgcttgggtaaagatggctgagcttgccgggcagcagaatttgccagcagaaaagagaaaagctcgcgaaattattggcagctgtgacgacatgctggaagaaatggatttgattgagcaggtcgataccatcaggcgtaacctgcagtcctcatcctga

SEQ ID NO: 243867 - DNA, 1338 bp, Klebsiella pneumoniae
atgtttcggttacgtcgcggtagcggtgattttctctttcatgtgacagattctcaagggttgccacatttatcgttgacggtttatgcatgtcgagccgacaggtaccattcaccagccacagttaaggcttatctcaggcatcttctggcatttttttcctgggctggacaggatgaaacagtgaagcgacagcattgggatttgctgggcaacagtagtcaggtccgtgctgtactcgaacatttcctgacaacccagctgcactgtactctgtttttcgcccgcgatctgtcaggaggagatattcgcaaggtgcaggttacttggggaaaagcccaccggataaatcatctgttagctgcgctgcgatctttttatcagttactcatctcgatgcagctgtatccccatcctcaccctcttgatttaccccaagccaaaaatatgattgccgaaatccggcagcagcattttgatgactttgtgagaataaatcagcgaccgccgatgccatcagacagtggcattgaccattggcgtcctctcaggctgacttcttcgtattacagaattaaagataatcaatggattcctgagtatctggacgatccggaacttatggggcatgtactggcctcaggcgaacagggcggctggaacctacaggatatagcactcgtgagaatacttttcgatacgggctgcagaatacacgaggcctgtgcgctgactatgcatgactggaaggtcagcggttttcgcaacatgttcatgtcgctaagtaaaggcagtcgtgggaagcgggtcaagaatattatcatcacggataaaacgctgaaggtgctgctgcgctatatcagaaatgacaggcctgagctgctgccatatatcaacgggcgcaccactttgcctcccgaaaatgttcaccggcttcctctcttctgtacaaaaagaggtcatccactgacaccggacaactttagacgttaccggtggacgcctgtgctggccgctgccgggcttaagatacgcacgcaccaggttcgacactggtttgtcacgatggcgctgaacgagatccaccgtagcgccgtttcagaggctgatcttctgcagaaacgcagcgccctgcaggtattaatgggatggagatccgatatgttgccagcttatgatcaagcccgacagcgtcatgatttgcctttgctggcaagtgcaatacacacctacatcgaagacaagcagttggaggctcaagctgcttgtgatgtgcccgatgacaaggaaagtcagggctcgctgatgctgaaagaaatgttggaggggaaactatga

SEQ ID NO: 243868 - DNA, 210 bp, Klebsiella pneumoniae
atgaaaactgtattcaactatgttatcgctggcgtatttgtggtgactttatttattggcgtaatccgtggtgctggttttgctatgtgcaatgtcgatgcgtatgggttcaaagctgatcaggtgagtttggttttttctactgaaacagcaaaagccccagccttaacatgcccaaagaaaacaaagtcgattaaggcccgtaggtaa

SEQ ID NO: 243869 - DNA, 207 bp, Klebsiella pneumoniae
atgcagcgggagctggtagagctgagaaagctgatcgagaaacaacaattgttgcttgaggataagcaggaggctgaccggctgcgggaacaggtgaccgggttgcaaaatgagcgtgatgcagcggctcaggagctggaaaaggtgtacgcggagcttgaggcggagaagaataaaggattctttaggcggctattttccaaataa

SEQ ID NO: 243870 - DNA, 345 bp, Klebsiella pneumoniae
ttgacctcaacgcccatgctgccaacatttgcagcccctaccgatacggaacgcgccagcctcaccgcgatcctgaatgacacgggcctccgtgccacgaatccccggattaacgtcttacactacctgaacgcaaccgacactcctgtaaccgctgagatgatcagccgcttcgttgacctcccgttatcgactgcgtacaggacgctcacggcgctggaaatcacccacctcgcaggggtcactttcgggcgcggagacgtcagtcgctggttccggtttacaccggatacaccccagcattgcgccgcgtgcgggcagagtttttacggcgaatattcctga

SEQ ID NO: 243871 - DNA, 144 bp, Klebsiella pneumoniae; identical to SEQ ID NO: 182299

SEQ ID NO: 243872 - DNA, 663 bp, Klebsiella pneumoniae; identical to SEQ ID NO: 182300

SEQ ID NO: 243873 - DNA, 1950 bp, Klebsiella pneumoniae
atgtctcagcgatataaactctatcgtcgaacgagcggcatttatgttgtccgcattagcgttccccaacgttttcgtcgatacgcaggacagtgtgagattcacacttcaacaggcactcacgatcttcatgaagcaaagcagaagtccgcgctcctgttggcggtctggtatcagaccttacaagagtatgaacaattggattatcgaactttaagtgactgcgccccactgcttgctggtgagggtatgatctcgatttctaactttgctcagtcaatcgagttgcctgtatcgcaattgattcgagaggtgattaatcgtaacctcccggtattctggctggcgactggtcagttcggtttctatgttgatgaatttaatgcagtagagcgggaacccggtgcaaaacgagaaaaacagtctgatgatgaaaaggatcaacctaaagaagtcatcattctcaatagcgcgtttgagctgggtatcgagagcttcgcaaatggttatctccgccccttcaatccccggcatactttagattgtctgttgagcgctggagtatccgaaggagaggctgcatttcgaactagtggtgataaccaaagtggaggttggttcttcgatttacccggcgtagatataactgctgatagcctgttgattagcaaagttcatgctgaaggccttcgacttacatggctggttaagaccacgccaccagcagttagcattcaccctgcagtgcctcttgtcgctcctgttatcgctaacgaatatgttcaccgcaaacattacaatgaaaacttgtcatggcttcgtgaagagtatttgaaacatcggcgtaagggcaaggtatcagaagcggcgctccgcgatattcgctattacttcgatttgatgattgaagtgatgggggatattcaattggaagatttcgaccgtgatttcctccgggcttatgagagcaagttgcgcacaattcctgctaaccgtaatttgatgaaaggtaagcacggggttaaaacgctggatgagttaatcgccaaagcggcagaatgtggcgataaactgatgacagaagagtctgtcaaaaagtatatcaacggcctttatggtgcaatggagtgggctgttgatgatggtaagtttctgaaatcgccatgcgacaactttttccctcccgatgataaaggtgagcgagagcaggatcacactgacatatttgaaccgcatgaaattaaggcaattttttcgcaaccgtggtttgtggctggaactgttgaacgtaatgcgcaagggcgattccatcaatattgcccgtttcactattgggcgccgttgttgggcttgatgacgggggcaagggttaacgagattgcacagttaatgctggacgatgttctggcagatgacggcgtttattacctgaaccttgaaagcgatagcgaaaacggaaagaaactaaaaaacgccaattcccgccgcaagattccggttcattctacgctgattaaactcggttttatcgagtatgtggatgcgttgaaagctgccgggtatgaccgtctttttcccgagcttaaaccacataaaactaaaggctatggtaggccagtttccgcatggttcaatgaatcattgcttgcgggtcgattaaaacttgaaagagacagaagcaaatctttccactctttccggcattctgtttcaactttgcttaaagagaaggatgttagttcggaactgcgtgggcagctacttgggcatgtgcgcggcaaaacagaaactgaagtgcgatacagcaaagatttaaaaccggttcacatggttgaggttgtcgaaaagattgatttttctttgcccgagatagcgagattcaacatccctgatgggctggatgctgtaagagatgcgctgcgaagaaagcgtggcaaacaaacaggttga

SEQ ID NO: 243874 - DNA, 870 bp, Klebsiella pneumoniae
atgtcaaatgatgctttgatgattgcaagtgctattttaaatttgcagcaggagtcgagtaattttaaggattatatttttcctgcattgactacttcaggttctgtgttactcggttacttaatggctaataatacatttgccaaacaggaaatcattaagtcagagatagcgcgagtcaatgattttaataaattcctagtagcaatcgatagtggtatgcaaactctgatagcaataaaaaacacatatatgggtcgaataaattctaaccctattgaaagggctttaagtatacctacaattagctgttatttttcaccgccgccagatgttacattgattatttttttagcaaaggctaatgaatacaatgcgtctcgtgcattttttgagacatggaataaccttcctcgcgtgaatgctatgttaggtaactttcaaaaccttcatgataaaataaatcatcgcaatactgtgttatctcaattgcgtgaattctatcaaatagatgatcagggacgtagtgttatgaacatcggaacattaactcctgaacagtttaaagtcttgaaaacagcagtggacctaacggaaggcgtattatgtttggttgaggggttacttaaagagtattattcttgtttaaagaatatacccagtgcggcaaagttatctataaatgaaaaagtaacaaaaaagcatgttgaaatattaacctattcaaacccatcacctcaatttcaaaaatcattttcctccattccaaatgtggatatttcagctctagctttcatacttggcgtttcagaagaagttgcaaaagcatcattcattacaggttatgaaaaagttccggttgttttttag

SEQ ID NO: 243875 - DNA, 336 bp, Klebsiella pneumoniae
atggaacgaaccgtcgaaatactgcaatacaccttacttaaaggcaccggaaccatttttcacacaatcatgcgggaaatcaacgttcctctacaccaacgccacgggatcgatgtagtatcgtttggtaactccctgcatgattccgattgctactaccttattcgtgcttttaacaaccaagaaagcatggctatggttctagattctttctacgcaagcgctgattggcggaacggcccacgccaagacatcattggcagcatcgagacaagcattaaaacagtgataagcctgccaccggaaagcgttgacgggttgcgggtgcaatcgtag

SEQ ID NO: 243876 - DNA, 414 bp, Klebsiella pneumoniae
atggaatcaaaatacgatctggttgatgcggttccacccgcagaagatttttgccgcttgcgcatcatatccggtttaacaccccgctctcctgaagctgcaaaacatgcacttccaagaacttttcatggcgtatacattgaatattcgggactcattgtcgggatggggagaattgtcggtgatggcgcgctcaacttcgaaatcgtagaggttgcggtcgatccagaacatcaggggaaagggctgggccggaaaatcatggaagctttaatgtcctggcttggacaacatgcacccgcaggagcatacattaccttgatcgcagatgtcccggagctatatgaaaaattcgggtttaaaagcgttcgccccgaaagcgaagggatggcactcaattggggacagcattaa

SEQ ID NO: 243877 - DNA, 246 bp, Klebsiella pneumoniae
atgtcagagatcaccgcatctgagcaaatccgcctggatattatcaagaaagtaaattacgacactgcagcggcgaagttagccattgactgggtaggcgacagctatctgaagtctgagttattcgcagactctttcgatcgtgtttacacggaaagcgagattgtctcgaaaactcgtaaagcaattcaggaagcgaccgaagcgctggcgctgtttgatactgccgctgagcaggtcagctaa

SEQ ID NO: 243878 - DNA, 747 bp, Klebsiella pneumoniae; identical to SEQ ID NO: 129787

SEQ ID NO: 243879 - DNA, 729 bp, Klebsiella pneumoniae
atgggtaattcaaaaagaaatataaaaaaactaaatgataattttagagaggatattttagattatgcgttcgcgcacaatctaaaatgtgctaacgcacttgctattttatatgcgacgggttgccgtccggacgaactccaaaccggagttacggtaaactatgacagcaaaaaaaatgaaattgaatttagaataattggatcaaaactaaatagaagaatgagaagaggcataggggttagaaaaataaaagtaaaaatcaataatgaaaatgccagattttttaaaaacattgttgataaatttattgaaaacccaatgtcatatgatcacaaaataaaaattgaaagcgccaaagcattttccgggtacataacaaaaatatcgaaaaagctatggcccaggaaaacctatcatgcttctgcatattcttttagacatgcaaaagcaacggaattgaaaaattccgattatgataaaatcgaaatagctcagattatgggccatgcctcagttagatctcagcagagttacggaagaaagagcaaaaaaagcaaaggtggatttgatgacatcgcagatgtcgaaaccaatgttaaaccccgtggcggtgatagattattgagatttaagatcgcaaataaaaacaaagcagcggcaaaaattgccgatacttccacccccagcagtcctccaccggctcccgttcgtcgcttcaaaatgtga

SEQ ID NO: 243880 - DNA, 702 bp, Klebsiella pneumoniae
atgaagcgtattgccctttttttctgtttcatttttagttttgcggcccacgccaacaatattattgttaacggtacccgctttatttatccaggaaatgaaaaagaaataacggtacagctttcaaataacgccgaccgtccggcgctggcgcaggcctggctggataacggcgatgccgatgccacaccggataccattaccaccccgtttattatccccccgccgatttcgcgcgttgacgccaagagcggccagacgctgcgtattaagctcggcagcagcgccggtctggcgaaagataaagagacgctgtggtggctgaatctgttggaaataccgccggtggtggccaatcagaaaaatgaaggccagaacgtgctgcagctggcgatccgttcgcgctttaaatttatttatcgtcctgccggactgggcaactgcgatgcggcggccgagaagctgaccctgaccgccagcggcagtagtctcgccatcaacaacccgacgccgttctacattaccgtcagccgtatttcccgcgacggcggtaaagccctgaacagcaaaaccgtgatgctggcgccgcagtccagccagacggtggcgctttcctccgccgtcaaccgcggcgaaaccctgaccgttaacaacattaatgactatggcgccgatgtcgcagtgaaagtggccgttaaataa

SEQ ID NO: 243881 - DNA, 579 bp, Klebsiella pneumoniae
atggacttcttcgccgcacacagccgaggcgtgggcatcgatccgctgttgcatggtgtcgaaaatagcctgatagtctgctttggtggtgcctttcgtctggtctgcttcgccctgcatccagtacatagccacaggcaggtaggttttcccgagctcctgagcgcgggcgtaaccataactgatatcatcgaaaactcgctgcatgtactttccgggatacgccgccagcacatcaatgggctgaccgccctccgccggaacagaacccagaatgatcagatcatccgggttaaagccatagttctcggcaatcatgagttcataccagccgcgaatgctggcccccatcggggtttcccatgcctggccgttatcggtgtttttatacgtctcgacgtagggaaccagctgagcatggttttctgccgaagtgccggagccatcctgtgcccgtaccccaccgataaaacgcaatgcggtatacagcgcagcgatcgtaatcagcgcctgagtatttacgcccgcagcgagcgattgtccgtaaccgattttatgggcaatatccggcaggcgtga

SEQ ID NO: 243882 - DNA, 465 bp, Klebsiella pneumoniae
atgtttgcgctttgcgatgtgaactccttttacgcatcgtgtgagacggtgtttcgtcctgacctgaaagggcggccagtagtcgtcctttccaataacgacggttgtgtgattgctcgttccgctgaggcgaagcccttcgtcaaaatgggggagccgtacttcaaacaaaaggacatgtttcgccggcacggcattatcgcgtttagtagcaactatgagctctatgccgatatgtccaatcgtgtgatgaccacgctggaagagctctctccgcgctgcgaaatttacagtatcgatgaggcattttgcgatctgactggagttcgtaactgtcgcgatcttaccgattttggcagggaaattcgcgagacggttctgcgcaggacgcacctcacggtcggcgtcggcatagcccagactaaaaccctggcattatacagtgatcaagtatttcttcattag

SEQ ID NO: 243883 - DNA, 309 bp, Klebsiella pneumoniae
atgtatgcgcgcctctttctgattctgctggctctgtttagcctggacgctaaggcgcaaaccattcaggaaagcgtagccttcgcgattatcggcgaaccgaaatacgccgccggtttcagtcattttgattacgtcaatcccagggcgccgaaaggcggcaccctcaccctggcggcgatcggcacctttgataacttcaaccgttatgcgctgcgcggcaaccccgcggtacgcacggaggcgctctacgataccctgttcaccacctcggatgatgagcccggcagctactacccgcttccatga

SEQ ID NO: 243884 - DNA, 1326 bp, Klebsiella pneumoniae
gtgttgaccggcggggcgcacggcgtgccgcgcgaaatcacccaccaggtcgaagcgggaaaatactacccgaaccacgaagccgtcgacttctacggtcgctacaaagaagacatcaaactgttcgccgagatgggcttcaagtgcttccgcacctctatcgcctggacccgcatcttcccgcatggtgacgaaacccagccgaatgaagagggactgaagttctacgacgacatgttcgacgagctgctgaaatacaacatcgagccggtgatcactctctcccacttcgagatgcccctgcacctggtgcagcagtatggcggctggaccaaccgcaaagtggtcgatttctttgtacgcttcgccgaagtggtcttcgagcgctataagcacaaagtgaaatactggatgacctttaacgagatcaacaaccagcgcaactggcgcgcgccgctgttcggctactgctgctccggggtggtctataccgagcatgacaatccggaagagaccatgtaccaggtgctgcaccaccagttcgtggccagcgcgctggcggtgaaagcggcgcggcgcatcaacccggacatgcaggtcggctgcatgctggcgatggtcgccctctacccttactcctgcaaaccggaagatgtcatgttcgcccaggagtcgatgcgcgagcgctacgtctttaccgacgtccagctgcgcggttactacccgagctatgtgttgaatgaatgggaacgccgcggcttcaacatcaggatggaagacggcgacgcgcagatcctgcgcgaaggtacctgcgcctatctcggcttcagctactacatgaccaacgcggtgaaagccgagggcggcactggcgacgccatttccggtttcgaaggcagcgtgccgaacccgcacgtcaaagcttccgactggggctggcagattgacccggtcggcctgcgctattctctgtgtgaactgtatgagcgttatcagaagccgctgtttatcgtggaaaacggctttggcgcctacgacaaagtagaagccgacggcagcatcaacgatgactaccgcatcgactacctgcgcgcccacatcgaagagatgatcaaagcggtcacttatgacggcgtcgatctgctgggctataccccatggggctgcatcgactgcgtctccttcaccaccgggcagtacagcaaacgctacggcttcatctacgtcaacaaacacgacgatggcaccggcgacatgtcccgctcgcgcaagaagagctttaactggtacaaagaggtcatcgccagcaacggtgagaacctgtaa

SEQ ID NO: 243885 - DNA, 735 bp, Klebsiella pneumoniae; identical to SEQ ID NO: 215194

SEQ ID NO: 243886 - DNA, 243 bp, Klebsiella pneumoniae
atgctcttgcagcttagtattgaaatcgatgcgatcggtggttatgtcgacttcttccgggcgccagaagaaggagagctgtttttcgatcagcttttcgaaatcgcggtacttctgctgatcgtagcgcgcaacgttgacagactgcccgaggaacataggctctttggttgcgtcgttagcgcccaaacggaaagtggagtaactcatgtgtttccctttgaatgttatcggtattattaa

SEQ ID NO: 243887 - DNA, 693 bp, Klebsiella pneumoniae
atgagtaaccttaagtatcgtgcggatattgatggtctacgcgccgttgcaatacttccagtgttattatttcatgtggggtacaattggtttagcggtggttatgttggggttgatgtttttttcgttattagtggttatcttattacctcaatattagttaatgatataaagaataacacttatagtatattggatttttatgaaaggagaattagaaggattgttcccgctcttgtatttgttatcgcgtttattattgtagcatcacctttttttcttcccccagaaaattattcatttctgccgaaggaaataataggaacattactgtttatatctaatatagtaagttatttaaagtcagggtatttttcaactgatgcagaacagcggccactgctacatacatggtcgttaggtattgaggagcagttttatataatatctcccgttatactttttattgcgtttaaatatttaaaggaaaaaacaaacttattattagttatattgacgataatatcattttttatgagtgtatttttatctcaaaaacatccaacatcatcattttatcttttacatacacgttactgggaattatcgtttggttcattagctgctgtaggtgtatttcaggggagtaaaaacaaatatatagggaggtattatctctcgtcggtttattga

SEQ ID NO: 243888 - DNA, 216 bp, Klebsiella pneumoniae; identical to SEQ ID NO: 230738

SEQ ID NO: 243889 - DNA, 486 bp, Klebsiella pneumoniae
atgaaattctccaaattcactgagctggtaacccgcatctggtccaattcaacaacgcagcggcgcgacccggagattactatctccatccactcgccaggcagcattggtgcatcgccatacgttgctgtcgaggctattcatcctggctttgactgggacgccgggcaggtaatgatctacccagcccagccgctgaccacgctgacacctgagcaggtgaacgatatcaccgaaagcgtgcgcaaaggtcaatcctggcacgcctatgaggcttacaagaagcacaaggcccagttggaaaacgcagcccttgagcatgcaaaactcgtcctgcagcgcgacgagttgctggcagcgctcgaagagatgaccgatatcgttagtaaacatacctacccacaaccagataaacctaactctacatggggccggttagaggtcgccaaagaagttatttcccggataaaaggcggtgcagcatga

SEQ ID NO: 243890 - DNA, 249 bp, Klebsiella pneumoniae
atgtatttgccgcataaaccgaatgtcacgctcggtaacgccctcatcgtcatccaccgggatgaacacggcgttctcctgcccgtgattgcgtccaagcgtatgcgcaagctcaaaattagtgtcaggatcctgagtaccatgcacagcaaaagtctcgacttcgaaatcaatacgctggccctttgctgtcaggcaggcggcaacatcgatgtttccccctgtgtttccaccaccgaaagcgagtaa

SEQ ID NO: 243891 - DNA, 489 bp, Klebsiella pneumoniae
atgcaatcgacgataagcgcatcgagcgcggagaagaagaagcaatcttcgtctgggaaaacgtcccgggcgtcctcacaagccacgacaacgcttttggtttctttctggcaggacttgccggagaaagctgtgaacttgagccatcagggggaaaatggacgcactctggttgtgtgtatggaccccaaaggacaatcgcttggatcgtcaaggacgcccaatatttcggagtggcccaacgacgcaagcgtgtgttcgttgtcgcaagtgctcgaaaaggattcgatcccggccaggtactttttgagtccgaaggcgtgcgccgggatactccgccgagcagagaaccgcaaacggcagttgccgcccttactgcgagaggcgttggaacgtgtggcgcagatgacaaccaggcacaagcagggcacttactcgctttcggtggtggaaacacagggggaaacatcgatgttgccgcctgcctga

SEQ ID NO: 243892 - DNA, 486 bp, Klebsiella pneumoniae
atgactatcacactacaggcagtaaacgagctcatcgcctccctggagagcgcaggcgagctgtcgatcaaagagcggaagtatctggagctggcgaaagagtttcgcatttgcagcacctcactggacgccgtcataagaaccgggaatgcgctggcagaccaaaatgctcagctggctgcggagaatgtgcaaatcaaagctatgaacgattgcctatctgaggaactgcgtggttatgagtctgatggcacttttgatgggccgaagatgcatctgctgtggtggcaggtcgaaaccccagctaccgacgcctacctggccgggattaaggctgatggggtggatgagttcgctgaaagtcagaaggaatacgttcgtcagcatcgcaacgaaatggaccaggtgctgcgtgcggcttatgcagggagtgcagtagacgccgagagattcgccaagcagctgcgcgagggggccgacaaatga

SEQ ID NO: 243893 - DNA, 609 bp, Klebsiella pneumoniae
atgcgtaaacctgcacgtcgtaaatgcgcccactgccgcgaatggttccatcctgcccgggaagggcaggtggtgtgcagttttgaatgcgccagcgcgatcggcaaaaaacagacagcaaaagcccgggaagcggcgaaggccagggcggtgaagcgccagcgcgaatctgagaaggaggggcgccaacggcgtgctgcacgtcgaagtgagctgaagccaattcgctattgggtccagatgactcagcgtgttttcaacgactggcggcgcgaaatgctgcttgctgacgggcatggatgtatctcctgcgggacaaaaaccgcatttgcgtggcatgccggtcactaccgcaccaccgccgccgcaccacagcttcgattcaatccagataacgtctggctccagtgctcagcgtgtaacgttcacaaatccgggaacatcgaagcgtaccgttccgctctggtcgatctgataggcgaagagcgtgtgctggcgctggagcaaaacaacgaaatccacccatacactcgcgaagaactggaaggcatcaggcgccattacagcgcgctacgccgtgcgctcataaaacaacgggaggccgcatga

SEQ ID NO: 243894 - DNA, 2085 bp, Klebsiella pneumoniae
atgctggcagtgcgcccaaaacaggggcttcctgccggtgtagtcgatgccacaagctacgcagggacattgattccgaatagcgcaaactcgccgtggggtaaaacgggaattcaaaacacctccggtgttggtgctgatcgcatcatttctcttagctctatgggcgttaagccgggagacacaatcactgtccgtctggctgcatggttcgcgtcaacgggtggcacgtttcaggttttctgtcgtaatgcatccggagtactttcttcggcaactattgccgcatcagcatccggctttaatgatggaagtaccacgctgacaataccagcatcaacgacataccttacgcttcgcgcatcaggggctatggtcaaggagctggttgccataggtgtagctttcggacgatctcgccctgagtttatttacggtagccttccagcagagtattcaggataccagcgccagcagattaacctgtggcctgatccctggtatcgccgctacgagtgcggggaaacgtgtattgatggttggggtcctgctcaagtagcaggggtttcactaccagcatatgttgcggattattctggcagcccgtttcttaggaaaaaatctctgattatcccagtaggtggtggtcagacggatattaacatttcagcaaagcggcttggactgcgtgctggagattcgctgacagtagcgctgggtgtggtatcgtctcaggcaatcaacgtggcagcatatttccggacggctagcgggactgttattagtgacagttcgtctcagttgttccagttcccaacccagcaatatcagactctggttcgcacaatagctatcacccagactattgttgatacggctggatatctgcaaatccgccttatgaatgggcagactgttggcgctgcaggtgtttatgttgttgccagggggctctttgttgggaatggctctcctgtactgagtgatgatacgtaccgacaggatgtcgattacacaacttccagagcattcacgttaaatcaggattcactcagagagacacataagcgcctgatgaacaggcggctttctcagtcagcaacactggtaacagcgcacattggcgatagctggactcacctgtggaaccgatggagcggaatttttgccggaaaaatgcaggctgactatggcagtgcaggtatcggctatatcggatttggctatccgtctgaggcgggtttcgggcagtataacggcaatatacttggtcagataactttgaccaaaacaggaacatggacgccgacatatgcggcagcacagagcgcagatatttgtagcgtctcgtcttctgataccaccgctactttcagggcgaacggtataccggcaaatgcatcgtcagtccgcctttttgctaaacctcaggggagtgttaaatacagcacagatggtggagttaactggacaactatcgacctgagcacgttcactgaccttgcggttgtcagcctcacggtaccttcaacagctttcaatatctggttcagtccggtatcaggaaccgttgaactgtacggtctggatgtgcagaccgcgacagatggtgtccggtctcacaagctgggtgcgacggggagttctgctcaacaatgggcggcgcaggttaccagcgcaacatggaaagcagcattcaccgcgctggcccccaatctggtgacaattctgcatgggaccaatgaccagacatcatcccgtgatccatccgcgtttgctgccgatattcagacgataatcacagcagttcgcactgcatgcccgttggctgatgttctggtgatcatgccatgtgaaaaccagaggaataacaatgtggcaatggcggcgtatgcgtctgttgtacgggatgtttgtgcgctaaacagggtggcttatcacaatctccagattgactacggagacaagccatctgattacgcatcgacatctccacgcaactggttcaatgctgatggaatccatcctgaccctgcaactggaggtgggctgccgatcgtttctgctgttttgaagttaatgtaa

SEQ ID NO: 243895 - DNA, 243 bp, Klebsiella pneumoniae
atggaggaggaaagcgataagcgcgcaggcggccgccaggcgcgccagcgcgcttgcatcgacagactaggcgatcagcgcgagaagccagaaaaaaagggcgccgtttatggcgagatactgtttgtccatcagcagtggctggctactccgttagtcatcagcaacctcctggtttgctctccacttatccgcagttttgccatggcgatcaaggttttttgccgaaaactgctgatttaa

SEQ ID NO: 243896 - DNA, 894 bp, Klebsiella pneumoniae
atgggcaccatcctgtcgctggtgccgaccaatatcgtggcatcgatggcgaaaggcgatatgctgccgattatcttcttctcggtgctgtttggcctggggctctcctcgctgccggcgacccaccgtgagccgctggtgacggtcttccgctctatctccgagaccatgtttaaagtcacccatatggtgatgcgctatgcgccggtcggggtattcgccctgatttcggtaaccgtcgccaccttcggtttcgcctcgctgtggccgctggccaagctagtgttgctggtttactttgcgatcctgttcttcgcgctggtggtgctggggattgtcgcgcgcctgtgtggtctgagcatctggatcctgatccgcatcctgaaagatgagctgattctggcttattctaccgccagttcggagagcgtactgccgcgcattattgagaagatggaagcctacggcgcgccggcgtcgatcaccagctttgtggtgccgaccggttactccttcaacctcgatggttcaacgctgtatcagagcatcgcggcgatctttatcgcccagctgtacggtattgacctctctatctggcaggagattaccctggtgctgaccctgatggtgacctcgaaagggatcgccggcgtgccgggcgtctccttcgtggtgctgctggccaccctgggtagcgtcgggatcccgctggaagggcttgcctttattgccggcgtcgaccgtatcctcgatatggcgcgtaccgcgctgaacgtggtgggtaatgcgctggcggtgctggttatcgccaagtgggagcataagttcgatcgcaaaaaagcgctggcctatgaacgcgaagtgctgggcaagtttgataaaaccgcccaataa

SEQ ID NO: 243897 - DNA, 402 bp, Klebsiella pneumoniae
gtgaagaaaacaaaaaaagtcagtctggcctggcaaattttgctagccctggtgctgggtatccttctgggcagttatctgcattaccacgctgaaagtcgcgattggttaattagcaatttgctgacgccggcgggcgatatctttatccatctgattaaaatgatcgtggtcccgattgtcatttcgaccctggtggtcgggattgccggcgtgggtgacgccaaacagttagggcggatcggtgccaaaaccattatctatttcgaagtgatcaccacggtggcgattgtgctgggtatcaccctggccaacgtcttccagccggggacgggcattgatatgtcgcagctggcggcagttgatatttcgaaatatcagaacaccaccgccgaagtgtag

SEQ ID NO: 243898 - DNA, 1017 bp, Klebsiella pneumoniae
atgtcaggggatctcgccgcggtgacggatacgtatggtggcgcactttcgacgccacgggagatccatcaggcgattaattccctgatttttctgtatccggggatgcgggattttgtgtatttccctgatttgtgcctactccagcttatccgggtgacaaacccggccctgtatgactggacagagcattacctgacagaacggtccgtgattgaaaccggccagggcatgctttctgaccgagaaaaggcagacttccgggaggagcttataaggtctatgaagacgttcagggcatccaatgcagactcgtttctgacgcttgcagactggctccccggtatcagcggacatgatgatgcacatctgaatctctttgagcccgtcagtgaggattttcgtcatatccagacgaccggtaaacgactcagcagtctgacgcactggcgatattattatgccttctcctcaccccagaatgttctgcccactgatttctttaatgagctttttaagcaggcaggcgtaccggaaaaccagcagcagctctctgaaaagctcctttcaaaaatcaacagtgtgggtagtctgtccggaacctggttcgaacatatactaagcaggctgacaccggggctgattaaggaacgtaatttcgaagagtgtgctgggttgattcagtttttcttcgatcacacggatgaggtcagcactcgcttccggatccgtaacacatggttttccctgcgtgaaactggcattaatcaggttgtacggcatctgctgaagcatatgcagaatattgatgagaccagaacagtcacgcagatggaaaagctgattgttactggcgcttcgccgttctggatagccgattttatgcgggatcttatctgggaacacggtcttgctcaaaatgcagtaccttccccttcagacgctcttttcagtcgcgatattacggaacggttgcgtgacagatttgctgaacgcatgagtcatgccagaacttaa

SEQ ID NO: 243899 - DNA, 720 bp, Klebsiella pneumoniae
gtgatcggaattgaaggagcatggggctcaggtaaaacaagccttctgaatctgatactgaaaagtctttttcagcacaaggatggacacacgcatgtactgcatgtttccccatggctgagtggcagtgatccggttgaagcgctctttcttcctgttgccacggttattcagcaggaaatggaaaaacgctatcctccgaagggcttcaaaaagttctggcgtaaatatctgttgtcaccagaagctcagaaagtgattgagtatgctcaggatacttcatcgcgcgttcttccgctggttcagtatatcgggcagttttccagcatcattaactggatagcaggcgggataaaagtatttaccgagagtcgtctcgcagttgatcaaaaaacgacaacaaaactgcgggctgaaattgcgaaacaactggttactctggatctgaaattcatcgtcgttatggatgaccttgatcgacttgaaccttcccagattgctgaagtgttcagactggtgagggctgtagccgatctgccccgctttacccatattctctgttatgacaggcagattatcactcatgccgttgagtatgcgctgaatatagaagatggcagccgttacctgcagaaaatcattcagctcagttttaaattaccccggcctgaagcctttgatttacgcaatgaatttcgccagcgggctgaggcgctgtaa

SEQ ID NO: 243900 - DNA, 756 bp, Klebsiella pneumoniae
atgaccaatgatctagaaaaattcattaaaaacgcaataaatattaataatattgacactcctgtctataggatatttagttacgaacgttttatcgaactaattactacaaatcaactggtattggttcaaccttctatgtgggatgatccatatgaaaacttctttcttaaaactgaagtggtttctgatgatggcgaattcgggtctttggaaagcctttgtaattcgtggtatggtcagtgctggactgaaaacgaagacactgatgcaatgtggagaatatacagcccagaaaaacggggtgttagagtaaaaacaaccattcgaaaactattcttgaccttatatgacacttctgacacaaattgcagtctaaaatattttattggaaaggttaattataaagataaagaagagataattgaattcatgaattcaaccacattttctgaattcatcctcggcgggcaaaacacccagttcgcggaggtattatgtacaaaaagaactgccttttcccatgaaaatgaaatcagactgattgtcgatgatataggtcataaacatgggaggggggggctatataaaataaacataactcctgaggagctttttgaggaaatctgccttgacccacgtttatcaagttcagattttttaaatcttcgggcggaaattcagggcatgggtgtcaccacaaatataatacaatcagatctttataaattggatcttccacgcctaaaaatgtga

SEQ ID NO: 243901 - DNA, 342 bp, Klebsiella pneumoniae
atgggcaaagtccatgagattcttattgatctccgaacgtttgctgtagacagcgactggaaaagacgggaagaagagcgatgctatcagctgcgatgccagaaattttatgcatggtcagaaaaatggatcaccgtcgaccaacttaagaactcccgtctgtggatagacgcccccatacgccgctggcctggcgtgccactgcagcagggcaaatataaggtattatctgttgaagccgtcaggatggcggacacaggcccggacttacagacgtggcgacaggcacgtatcgataaaaaacgaaccatccataaattttttgagatcccatttctctga

SEQ ID NO: 243902 - DNA, 717 bp, Klebsiella pneumoniae
atgaatgtggacgaggtcgcttttaaaaaaggacatcgttatataacggtaatctccgatcgtgacgggcgagcgctggctttaacggatgatcgaggtaaggaaagtcttgccggttacctcagaaccctgactgacggacagctgcaggccattaaaacgctctcaatggacatgaatgcgggctatataagagccgcgcgcatccacttaccgtgtgcagttgataaaatcgcctttgaccgcttccacgtagcgaaacagctgggtgaggtggtggataaaacccgccgtcaagccaaaggtacccgcttcctgtggcagtacagcgacaaatggatgactgagtcccggcaggaaaagctgatgtggctgcgggaacagatgcagcagacaagccagtgctggacactgaaagagctggccaaaaatatctgggatcgcccctggagcacagaacgcaggaatgactggttgcagtggatatcgctggcgtctgaatgtgatgtgccgatgatgaaaaacgcagcgaaaaccatcaaaaaacggttatatggaatactgaatgcgatgcatcatcgtgtctcgaatggtaatgcagaggcgctgaacagcaagatcagactgctgagaataaaagccagaggatacaggaaccgggagcgctttaagctgggagtgatgttccactatggaaaactgaatatggcgttctga

SEQ ID NO: 243903 - DNA, 789 bp, Klebsiella pneumoniae
atgaatatcaaaactgctttaattgcggtggctgtctcctcttgtatgttaacccctaccctgggccaggccagtgaacattcttctgtattcaacccggagcaggaaaaaagaattggtgaaattgcagcagattatatgcgtgcgcatcctgatattcttattcagatgagcgaaaagctgcaggcagaacagcaggaaagggaaagtcgcgagttgaaatcagctgcgctggcacaacaagccagaattctgtctgatgaaaacatcccatcatggggacccgctgaagggacggtcatggtcgtcgagttcttcgactatcagtgcatctggtgcagcagactggcaccagaactggaaaaagtcatgaaggctaacacgaacgtgcggtattacttcatggagtggccagtttttggcagccgctggccggcatcactgctcgctgcgaagactggtctgcaggtctggaaagagaagggggccgaagcttatttaacgtaccataataatatctatggtaccgggctgagtgaaggcagactcacgcaggagattattgaaaaacaatccgggaaaataaattttaatcaacacaccattgaagcaatcaataatacgttgaagaatataaatcagatcgccacaacaacaggcttaaccggcacgccgggtgtaattattatgccgctcaatggagcgacagaggataacaccaccgtcttttccgggatgacagaagcagagaatattcagcaggcaatcaataaagctcaggggaaataa

SEQ ID NO: 243904 - DNA, 636 bp, Klebsiella pneumoniae
atgggaactccgtacaaaccgccgggatatcatgaagaagctttcaattgtccaaattgtggggcatatgcaaaacaagagtggagtaaacttgtgtatatgaagtatggcagtagctataatggcaacatggaactgagtgcttgttcttgctgtgaaaaatatagttactggtacgctgaaaagctgatcattccgcaatcttcaccgattgaaatgcctaaccctgacatgcctgaaaactgcaaagttgactatatggaagctagggatattgttagcttatctcctaaaggtgcagccgctctacttcggctttgcttgcaaaaattaatgattcatttaggtgagccaggcaaaaacatcaacgatgacatcaaatcactcgttgctaagggattaccaccattagtacaaaaagcagctgacatttgtcgaatagtaggcaatcaggcggttcaccctggggaaataagcttggatgatgatccacaactggcgcaaagcttatttagattgctaaatatcattgtatcagagcagataactcgtcataaagaaatcgatgctatgttccaaaatctacctgcaaatgcccttaaagggattgaaggtagagataaagctaaggcataa

SEQ ID NO: 243905 - DNA, 1221 bp, Klebsiella pneumoniae
atggacgaaaagtccctctacgctcatattctcaacctgtccgagccgtggcaggtaaagtccctttctctcgatgaaaatgccggttctgttactgtcactattgagatcgctgaaaacacccggctagcctgtccgacctgcggtaaatcctgttctgttcacgatcaccgtcatcgtaaatggcgccatcttgatacctgccagttcaccactattgttgaagccgatgttccacgaattatatgtccggagcatggctgccagacgttgcctgttccgtgggctggccccggaagccggtatacgttgctgttcgaatcgttcgttctctcatggctgaaaatcagcaccgttgatactgtcaggaaacaacttaaactcagctggaatgcggttgacggcattatgacccgggcagttaagcgaggtcttgcccggataaaaaagccattatccgcccgtcatatgaatgtggatgaggtcgccttcaaaaaaggacatcgttacataacggtgatctccgatcgcgatggtcgggcgctggccttaacggatgatcgcggcacagagagtcttgccggctatcttcgcacgctcactgatgggcagttgctggctatcaaaacgctctcaatggacatgaacgcgggctatataagagcagcgcgtatccacttacccagtgcggttgagaaaatcgcctttgaccgcttccatttggcgaagcaactgggcgaggtagttgataaaacccgtcagaatgaacatccgcacctccctgttgaaagccgacaccaggcaaaaggaacccgcttcctgtggcagtacagcgataagtggataaccgaatcccggcaggaaaagctgatgtggctgcgtgcacagatgaagctgacgagccagtgctgggcgctgaaagagctggcaaaggatatctggaacaggccatggagcgaggaaagacggagtgactggcagagatggctggcgctggcggctaacagtgacgttcccatgatgaaaaatgccgcgaaaacgataggaaaaaggctgtacgggatcctgaatgcgatgcgacacagtgtctcaaacggaaatgcggaggcacttaacagcaagatcaggctgctgaggataaaagccaggggataccgaaaccgggagcgctttaaactgggggtgatgttccactacggaaagctgaatatggcgttctga

SEQ ID NO: 243906 - DNA, 1761 bp, Klebsiella pneumoniae
atgaagcattttaactctcaacagatggattatattgaatcctctattagctctagtatttatcttgaggcgtgtcctggcagtggaaaaactgaagtcattgccgcgaaagttgcaaaggagataaataattggacacttagtccaggtggaatagctttattatccttttctaatagcgctacagatgaactattctcccgggttaaaaagtacacccccaatacggtcagtagatttccacacttcattggaacttttgatagttttatatttaagtttttaattaatcctaacgcaaaaagtttgactaattttgagggggaatgtaataacaatactttaaggattattgaggctgcgtcaccattattcattcaaacgaaatatgcttacaataaacgaggaaagatcaaagcacatcattatacttttgatagaaaaaatgattccatactgttcaaatcgaataaccccgaacttgacagaatgagaagcacaatagacctgaaggaatggcaagttgaagatttaatagaaacaaaatctaagttatttaaatctggattaatgactcacgatgattcactatttcttgccgctgaaattttcagtaatgaacagtataaaaattatgcttcattactctctaaaagatttccactaattattattgatgaatgccaagatttatcatatgaacacttattgatattacaggggcttcatgatttaggcgttaaacttcactttgtcggcgatttagatcaatccatttatggtttccgtgctgtagaccctgaagatacaataaaattcattgctgacaatgaattcgaaagaatgccattaaatattaattatcgaagctgtcagcaaattattgatctttgttcacaattaacagcacacgatggtattaatggtcaatttagttcaattgaatttccctgtatcgttttgcaatataatgaaacgcctctagaattaatcgataaaattggacaactatgtttcggatacagtaataatgtaatcgtagctcgtgggcactctattttggaaaagttcacatttaatggtatcgaagataatattgtgaaaaatcttgttaccgcaataaacactttctcattacatggagctcaaaatataaaaaactcactgcagctattttcaacagtaatacgtgcgagatcaaatcatccaattagagaatctaagtataattgtcctaatgagattgagtcatccgtgcaatggcgaaattttcttttctatacattggaatacttcatcgagaataagctcaacaattttgaattaacatggagtaagtggtgtaaaaatgcaaatacaatccttatcaatcttcataaacaaccgttcgttgctgatgaattaaaatctatagtggaggaagtattttccttatcaataaaagctccttcagggcttgcaaaaattaatgtttcggagttcactgcgatagaaaaagttaatactgaaaattacaaattcgctacgattcatagcgttaaaggtgaaacccatgatgtgacaattctattatcatcctcgtcaaatactggaaaaacaggctcacattggaaacaatggataaataaccccaattcagaagcggctcgatttgcctacgttgcaagttcaagaccaaggtataaattaatctggggagttagaaaattaaaaaataatgaaattgcaacattaaagaaacttgggtttaccattatgtaa

SEQ ID NO: 243907 - DNA, 1431 bp, Klebsiella pneumoniae
gtgcctggtcccgtaaagtgctttcatgttaatggaaatatattttatgctaatgggtatgttgaacataataaaatgccggtttttttatcaggtaatattgggagtaagaaattatttgatgggaatgactcttttgatcctcatgaaaccgatcccaagaaaaaagtacttttaagtactgcaatatctataaaaaacaaaatagttgctggatacaataatagaatctctatatttataaatagcaatgacaaactaaattcagtaaataattttctaagaacatttaaaactggcgaatcccctagcaatttttcaatcaagttgcatggtgagttaaactcaacaaatatacttgaacttttatatgaccaaggctcttttattgaaagtcttggcaaagaagttgttacgacaatatctaatattacgctttttcgagaaaagggtattgagtattatttcgccaaggctttggctttattctggccattatttgaagagactatccataaaaataacataatgactttcaatcgaatgttcataatgttttcagatgagttagtgttgcagcaaagacgtaatttattcaaaaataaatatgtcagatttgaaaatctattagtagatgaattccaggacatttcacctcaaatagctaactggttaagggcaatacataaagaaaatgcaattttaagtcgaaagcctacgataatggctattggtgatgattggcaatcaatatattcatggagaggcagctctcctgatattttcatgaatttttcagattttttccctgtgcataaatcattgggaaaacataagacagtttttatgatggaaaactatcgttcggatgctgcgattcttaatgatgctgaaaaaatgatggctttagttaaagggaaaatcataaaagaatctatatcatgccgaaaacctgatggtgatgagcatggtgtctattgttatgggtatgatgataaaaaagatgataattcatggaaaaataaagcaattcagctaatttatgaacaattaaatatggtaaaaaatcaaaaacataaagataaaactcatattatagttttgagtcgaactaataatacacttaaagaaataagagatctttatatagaaagatatggcagtattaaaggaataaattttttaacgatccataaagctaaaggtttgcagggggaagtatgtgtgatatttgatgatagcaaagctcatataggacacattttaagaaatgaagtctataaacagattccctacttcaaatatagttatgatcaagctatgattgatgagtcatatcgtttggcatatgtagctataacacgagggataaaaagagtattctggtttgcaccaaaaggaagtgatggggcattctctcattttaggtaa

SEQ ID NO: 243908 - DNA, 324 bp, Klebsiella pneumoniae; identical to SEQ ID NO: 227619

SEQ ID NO: 243909 - DNA, 411 bp, Klebsiella pneumoniae
atggttcagtttacaaattttatttattctattgttaatactgtcgcaccttttatgacaggtactgttgcaatatatattgttgcattttctctggttgtttttatatacgacatattttttggggatggttctatttttgaatggttttgctacattatgataggtctggcactggcaggactatttgtctatattctggcattatttttatcaccaatttacgaaaaggaacaggactggcgaaactgggctaaagaacactgtaaagttatcgaaaaaagagaaggcgctaccacgacgggagtgggtatttcattaaaaggtcaggcgggtgtatttcttggaggggaacctgatcagacagggtatctctgtgacgatggtgtaacgtactggaagaatgaataa

SEQ ID NO: 243910 - DNA, 690 bp, Klebsiella pneumoniae
atggcgcgaaccagcgatattccataccatgtgctggaaagtacgtacgaacagtaccttcgtcaggcatcactgctcgcggccaatgactgcatcactgatgctatagagaaactgcccgtttttccgctctattcgtttgagccggataccctttatggcactgtggatgggcagaaatttggtgttgaacgaccaacagtgaaagcccggcactcacggaaatactttggtcgcggtaaaggcctggtggcctacactctgctgtgtaaccatatcccgatcaacggatacctgattggcacgaatgattacgaaggacatcatgtttttgatatctggtaccgcaatacctctgtagtgaagccggtagccatcaccggagatatgcacagtgttaacaaggcaaattttgcgatactgcactggtttggccttcgttttgagcctcattttactgacctgaacaggcagctacaggagctgtacagtaccagggaaccgtcggtctataaaaaattcctgatccagcccgccggacagattgaccgggaccttatcatccgcgaaaaaaacaatctcgatcgtattgtcgccactctggggctgaaagaaatgacacaggggacgctggtccgcaaactgtgcacgtacaccacgactaatccgacccggcaggcactattctaa

SEQ ID NO: 243911 - DNA, 390 bp, Klebsiella pneumoniae
atgccccatctgctgtggcccttcttcaacaataactggccactcatcaacgccctgttccgggctgccacccgggccatactcaggtgggcgcgtaaacagggtgttgaggtcggtatcttctgtgccctgcacacctacggccgtcaactcaaccagcatccgcacattcatttgtccgtcacccgtggtggcctcgatattaaacacggcgtctggcgcgatatcttctttaagaagcacgccgtggagataatctggcgtgatgcagtcacccgcctgctgcgccacagctataacctgataaatcctggcagtctgccggggccgcggcatatccgcgataagaagcaatggcagcgctatctgcaggcgcagtacggacgctga

SEQ ID NO: 243912 - DNA, 651 bp, Klebsiella pneumoniae
atgaatgtatcaaaccctcttcgcctgcaattcaccgatgctttcgggaatgtttgctttagtgcgttctgctacaacctgaaccagctttcgggcgcagttcaagaagccgcacagcgcgacgcgcagaaattggtttctatcgacgtgatggagccggaaggctctaacactctcagcacctacagttgctcgctaatcgtagggccgaccggcgcagagcagagcagtctgtacaaacaagttctgcaagcggccaaaagcaatctgaaatggccgcaaaactacatgcccgcgtctgcgaccgataaggaacttgagaacctgggaattcagatcacggccggcgtggcagcccaagttatcgtccagattggcggtaaggctattaaaatgatcctgcgcaaactgaccggcgttccaaacccagcagtcgttgacggaaacgacccgaccccgcctgaaagcgctggcgaagtggtccgcaccgttcccgacccagaccccgaaggcttattgccagaaggtggcgattccggcggctacccggaagagagcggcgaagatggtggcgtaggcgacggtggtgatgacggcggcgttgaccccgatatctccgatatccccgatatcttcgaaaagaaagactaa

SEQ ID NO: 243913 - DNA, 882 bp, Klebsiella pneumoniae
atgatttataataaacaagctgcaaattacgcaaagttagttatatattcttgggacatgtgtaaccctgacttgcattgcctttcaccaactcccgactctcggttatccactgccggttggagtgtgattggttatattactggtggcaactccatatttgtctctttggatagtggtttaaataatcttttgcgggcaagcagggtaaaagaagatcaagtgtgttatggctatgttgcaaaaaatgatgacgaagaagtcgttattgctattcgtggaactgacggtattctagaatggctagatgacatggattttttactaaagaccccatctccacctataaatggtatggtagatgccggattttatgacatttatcagagtttgagataccataaaattggaagtgttgatgtaagttatcccataatagagggaatagcgaatatttcctgttcatcaatcaccgtcctcggacatagccttggcgctgcgctaggtacatacttaatagcagagctggttacgcggattggtagtaaatcagcttctgcatgcctttttgccagtccgaagccaggggattgtaattttgcagattacttttcaggtcaagttcttcgataccaagattatatatatattaatgatattgtacctacattgccacctataggctactcttctttacacaattacactctattaactaagccagtagatggtataactatttcgtcaagcaaggtgtgctgtcatcatttaataagctatatagcattactggatccagtttgttacaaagaattcttatcctcaccatttttgacgggcaatgataaggcatgttctgaatgcgttgttggaatttattaa

SEQ ID NO: 243914 - DNA, 165 bp, Klebsiella pneumoniae
atgcttattcataacgttgcagaaaggaaagaagccgcaaacagaaaaatgcttgcattgctgacatttcttaaagaggaaacctactccgattttaaaacgctgaaaaaagttgttgggttcaagggtaaaagggctttgttgaataaatcgaacttttgctga

SEQ ID NO: 243915 - DNA, 627 bp, Klebsiella pneumoniae
atgacagataaaaccaaactggttgctatctcacgaaccgatgacatgagcgctctggatgcactcaagctgttgcggtttcgccggtacaatacagccagaagtcagttaagggtcacgagtgtctggtctgcatggtgcgccaggcacggtctgacccccttccccgtcacagcggttgatgtcgagcgctatattaatgggctgaatggatccgttaaaatggcgaccatctctcattttattgcatgcctttcaagcgttaacagcagcctgggttttccagacttccgcaacgttctgataaaagcactggttcaggtatggcgggcgcgggagaatgagaaaaaaatcgtcaccggccaggcccttccatttcttatatccgatctcaatattcttcgccggtcgctgcataaaagcgacgacctgagagacatacgggaccttgcaatgatatgggttgggtttgaaaccctgctgcgtaacgtggaaattcgaaggattaaaaccggcgacctgaaatggcaaaatgacacgtcctgttaccttctggacgtcatgcggaccaagacaagcctttcaagtaacctgacatttcagctctcaccaggctttgttgaataa

SEQ ID NO: 243916 - DNA, 678 bp, Klebsiella pneumoniae
atgctcgacagcgccacgcaggtgcccagcgccaacaggaacagcccccacaccagggcggtagtgaggcgcttgcggcctgacggcgcgctggccacggtaggagccggtggcggcgcggcggcatcagggagagggacagagacgtcggatggcgcaccggcggccggcggcgcaggaacggcggtcgacggcgaaggcgtcagcgcctccatcgacggggctagctcctccccctcttcggtgcaccagatcaccggcaccgtgagcttatacccccgtttgggtaccgtcgcgatgtactcaaggctaacgtcgtcgccgtctttgagcgacttgcgcagttcagaaatactctgcgtgacgacgtggctggtcacaacgttccgggtccagacgttttcgataagctcgtcccggctaagcacttcccccggatggcgggcaaaaaagaccagaagatcgattaaacgcggttcaagggtaagctggcgccccttcctgctgatttggtttacagagggggttaccagccattcaccgacgcgaacaacaggttgtagcatacaagaaagccccagacaaaaagggaaaggcgcgatgataacacatttgtcctacctatttttgccaggggtcactccctcaggcattaggtcagaattggctctttattaa

SEQ ID NO: 243917 - DNA, 981 bp, Klebsiella pneumoniae; identical to SEQ ID NO: 95379

SEQ ID NO: 243918 - DNA, 678 bp, Klebsiella pneumoniae
atgtctactcccgctaactttaacggtgctcgtccggtgattgatgttaacgataccgcaatgctgttgattgaccatcagagcggtctgttccagaccgtcggcgatatgccgatgccagagctgcgcgctcgcgccgccgcgctggccaagatggcgtcgcttgccgggatcccggtgatcacgaccgcctccgtgccgcaggggccgaacggtccgctgatcccggagattcatgaaaacgcgccgcatgcgaaatacatcgcccgtaaaggtgagattaacgcctgggataacccggaattcgtcgccgcggtgaaagcgaccggtcgtaaaacgctgattatcgccgggaccatcaccagcgtctgcatggccttcccggctatcgccgctgtcgccgacggttataaagtgtttgccgtgattgacgcttccggcacctacagcaaaatggcgcaagagatcaccctggctcgcgtggtacaggccggcgtagtgccaatggataccgccgccgtcgcctctgagctgcagcgcacctggaatcgcccggacgccgcagaatgggcggaggtgtacaccaaagtcttcccggcctaccagctgctgatcgaaagctacagcaaagcgcaggacgtcgtgaagaataacgaacagctggattcccagcgctaa

SEQ ID NO: 243919 - DNA, 447 bp, Klebsiella pneumoniae
atgtatacgtatttcaaaagtaaggatgagcttgttaaggctattgtactggaagaacagaactccgcgctgactgcccataatgcgacctatgcaggctcttattttgatcgcctttgtgcacaagtcacgtcctgtattagcgagatcggttaccctatcacgcatcaactttgggttgaaatcatggctgagtctgcgcgtaatccagaactgcgaaaaacgtatatctccagtgatggcatcatgcggaaaagcttcgcgcggctcatccaggagggtatcgctgccggagagtttcgccgtgatattaaccttgaagaaatcacgatcattatttttgcccttattgacggtttaatcgctcgtcaggcaataaacacgaccttctcattcaaggatgatctgccaatgttttttgacgttatggcaaaattgcttaaataa

SEQ ID NO: 243920 - DNA, 864 bp, Klebsiella pneumoniae; identical to SEQ ID NO: 217112

SEQ ID NO: 243921 - DNA, 939 bp, Klebsiella pneumoniae
atggagattattttttaccatccgacctttgatacccaatactggatctgtgagctggaaaagcagttacccggcgcgcgggtgcgcgagtggaaagcgggcgataaccggccggcggactatgccctggtctggcatccgccggtagagatgctgcagggccgggcgctgaaggccgtgttcgccctcggggcaggggtggactctattctcagcaagctgcgcgaccatccggatatgctgccgctgtcgattccgctgtttcgtctcgaagataccggtatgggacggcagatgcaggagtatgccgtgagccaggtgctccactggttccgccgctttgatgactatcaggcgctgaagctggtttcccgctggcagccgctgccagagtaccgcgccgacgaattcaccgtcgggattatgggcgccggcgtgctgggggcgaaggttgcggaaagtctgcaaccctgggggttcccgcttcgcgtctggagccgtagccgcaaatcctggccgcaggtgcagagcttcgccggccaggccgagctgggcgaattcctgcagggcactcgcgtgctgatcaacctgctgccgaataccgccgaaaccgccggcattattaaccagacgctgctggcgcagttgcctgatgagagctatgtcctcaaccttgctcgcggcgtgcatgtcgttgaagaggatctgctggcggcgctgaacagcggtaagctcaaaggggcgatgctcgatgtcttcagtcgcgaaccgctgccgcaggagagcccgctatgggcgcatccgcgggtggccatgaccccccatgtggcggcagtgacccgtccaatggaagctatcacctacattgcggagaccattagccggcttgagcgaggggagccggtaagcggtcaggtcgaccgccagcgcggttattaa

SEQ ID NO: 243922 - DNA, 738 bp, Klebsiella pneumoniae
atgtatcccgttgacctgcacatgcataccgtcgccagcacccatgcctacagcaccctgcacgattatattgcggaagcaaagcgtaaagggatcaaactcttcgccatcaccgaccacggcccggacatggcggatgctccgcactactggcacttcgttaatatgcgcatctggccccgcctggtagacggggtggggatcctgcgcggtattgagtcgaatattaaaaatattgaaggcgagatcgactgttccggaccgatgttgacttctctcgatctgatcatcgccggatttcatgagccggtgtttccgccgcaggatcgtgacacccatacacaggcgatgatagccgcgatggccagcggtaaagtgcatatgattagccatccgggtaatccgaaattcccggtggatatcccggcgattgccgaagcggcggctcgctaccaggtggcgctggagattaataactcctcgttcgtatcatcgcgcgtgggcagtgaagacaactgccgggccatcgccgccgcagtgcgtgatgccgggggatgggtggcgctgggctcggactctcacaccgcctttacccttggggaatttaccgaatgccgcaagatccttgatgcggtcgatttcccggaggagaggatcctcaacgtttctccgcgtcgcctgcttaacttcctcgagtcgcggggcatgccggcgatcccggaatttgctgacctttaa

SEQ ID NO: 243923 - DNA, 555 bp, Klebsiella pneumoniae
atgaacgagttttcaatcctctgccgcgtgctgggttcgctgtattaccgtcaaccgcaggacccgctgctggtgccgctgtttaccctgatccgcgagggcaaactggccgccagctggccgcttgagcaggacgagctgctggcgcgtctgcagaaaagctgtgaaatgcaatccctggcgacggactataatgcgctgttcgtcggtgaagcctgcagcgtcccgccgtaccgtagcgcgtgggtggagggttcctcggaagcggaagttcgggcttttctgagcgaacacggcatcccgacaggggaaggtccggcggatcatctcggctcgctgctgctggccgcctcctggctggaggatcatgccgcagaagaccagagcgagacgctggagctcctgtttgccgactatatcctgccgtggtgcgggacgatgctggggaaagtcgaagcccatgcgcacacgccgttctggcgcaccatggcgccgttgacccgcgacgccatcgccgcgatgtgggacgagctgcaggaagaagatgagcaataa

SEQ ID NO: 243924 - DNA, 483 bp, Klebsiella pneumoniae
atgaacatactcttcgcaatcgcattaacgacaggcatcctctccgggatttgggggtgggtggcggtcgctctcggcctgctgagctgggccggattcctcggctgtacggcctatttcgcctgcccgcagggcggcttgaaagggctggccatctcgtcctgcacggtgatgagcggcgtggcctgggcgttagtgattatccacggtagcgcgctggcgccacaggtgcagatcctcagctatatgatgaccggtgtggtcgccttcctgatgtgcattcaggcgcgaaggacgctactgtcgtttgtcccgggcacctttatcggcgcctgcgcgaccttcgcggcagacggcgactggcgtctggtgatcccttccctggcgctgggtctggtctttggctatgccatgaaaaatagtggcctgtggctggcggcccgtgcggataagcataaatcgttcgccaacgacaacgcctga

SEQ ID NO: 243925 - DNA, 528 bp, Klebsiella pneumoniae
atggctgttaaacctgaggtaattctcggcgatattacgacacttgatgtcgatgtgattgttaatgcggcaaatccctcgctgctgggtggtggcggagtagacggggccatccaccgggcggccggtcccgcgctgctggcggcttgcaagcaggtgctgcagcagcagggcgaatgccctcccgggcatgcggtaattactattgccggcaatctgccggccagcgcggtgatccacaccgtgggcccggtctggcacggcggcgaccgcatggaggcgcaaaccctggccgatgcttacaaaaacagtctgcagctggcctcggcaaacaactatcgctccattgcgtttccggcgataagcaccggcgtgtatggctatccgaaagaggaagcggcggcgatcgccgtgcgcaccgtcaccgcgtttctcactcgctataaccctcttgagcgcgtcctgttcgtctgttttgacgaggaaacggcggctatctatcgccgcctgctggcgtcatacccctga

SEQ ID NO: 243926 - DNA, 594 bp, Klebsiella pneumoniae
gtgtcagaaggaaaagtccagcagaaacagcaggcgcgccgcgcggagatcgttgtcgccgcgcaaaaatgtttcgctgaaaaggggctgcacggcgcttccgtcgccgatatcgcccgggaagcgggcctgagcgtcggtcagctatatcgcatttttgccagcaaggaagcgatcatcgaagcgattgttagcgaaatcgtcaacgccagggtcggggagatgatcgatgagaaccacaatctggcgcgtaaagcggcggttttggccggcaggatcccgacgtcggcagccaccaaaagcgataattatctgctgatggagatcaatgccgaggcctcgcgtaacccacgcttgcgtgagatcctgatgcaggccgatcggcggttgaaagaggagggcggtcgcctgtcgcagcgcaaccatcccgggctcagcgatgcgcgacgcaatgccgcatcagagctcatcgccgttctgacagagggggcagcttaccgctgtgagctgagcgcctccaccccggtcgataaggcagatttagaagccctgtacaatatgattttcgaccggctttttgacgagcaggcataa

SEQ ID NO: 243927 - DNA, 1161 bp, Klebsiella pneumoniae
atgaataatactccggtacagcgtgaatatttcttcgacagcatccgcgcctggctgatgctgctggggatccctttccacatttcgctgatctattccagccacagctggcatgtcaacagcgctgagccctcgtggtggttgacgctgtttaatgacttcatccatgccttccggatgcaggtctttttcgtcatctccggctatttctcctacatgctgttcctgcgctacccgttgaaaaagtggtggaaagtgcgcgtcgaacgggtcggtattccgctgctgaccgctatcccactgctgacgctgccgcagtttattatgctgcagtacgtcaacggcaaggcggaaaactggcacaccctttccgggtacgataaatttaacaccctggcgtgggagcttatttcccacctgtggtttttactggtgctggtggtgctgacctcgttgggcgtggtgctatttaaatggctgacgcgccgcccggcagggggcgcctcagcctttggtgacactgtcactatgagccagctaacgatgattttccttgcgctgggggtgctttacgcgctgatccgccgatcgctgttcctgatttacccgccgctgcttagcaatggtctgtttaactttgtggtgatgcagacgctgttctatcttcccttctttgtgctgggggcgcagacctttattaatccgcgtctgaaggcgatgtttaccaccccgtcaccatggtgctgcgcagcggcgctgctgggatttatcgcctaccggctgaaccagcagtacggctccggcgacggctggatgtatgaaacggaatcggtgatcaccatggtgcttgggctgtggatggtcaatgtggtcttttcgctcggccatcgcctgctgaacttccagtcggcgcgcgtaacctatttcgtcaatgcttcgctgtttatttacctggtgcaccatccgctgacgctgctgtacggggcgtggatcaccccggtcattaagtccaataccttaggctttattggcgggttagtttttgtggtgggtattgccctgatcctgtatgaaattcacctgcgcattccgctgctgcgtttcctgttctccggtaaaccgatgaacaaaccggccaaaaccccagcctcggccagctaa

SEQ ID NO: 243928 - DNA, 1554 bp, Klebsiella pneumoniae
atgaaacataaaccacagatgatgaaaatgcgttggttaagcgcagccgtaatgttgtccctgtgtacttcatctgcatgggcatttagcattgatgacgttgcaaaagaggccaaaacgttagccgggaaaggctatgaagcgccgaagagtaacctgccctccgctttccgcgacatgaaatacgcggattaccagcaaattcagtttaatcacgataaagcttactggaataaccagaaaaccccattcaagcttgaattttaccatcagggtatgtacttcgacacgccggtcaccatcaatgaagtgacggccaccagcgtgcgcaaaattaaatatagcccggactattttaactttggtaacgttcagcacgataaagacacggtgaaagacctcggtttcgccggcttcaaagtactgtatccgatcaatagcaaagataagaacgatgagatcgtcagcatgctcggtgccagctacttccgcgtgctgggtcagggtcaggtttacggcctgtccgcgcgcggcctggctatcgataccgcgctgccgtccggcgaagagttcccgcgttttcgcgagttctggatcgagcgtcctaaagccaccgacaaacgtctgactatctatgcgctgctggactccccgcgggcaaccggcgcttatcgctttgtcatcatgccgggacgcgacaccgtggtagatgtccagtccaaagtttacctgcgtgacaaagtgggcaaactgggcgtggcgccgctgaccagcatgttcctgttcggttccaaccagccttctccggcgcttaactatcgtccggcgctacacgactccaatggtctgtcgatcctggccggtaacggcgagtggatctggcgtccgctgaacaacccgaaacaccttgccgttagcagctatgcgatggaaaacccgcaagggttcggcctgctgcagcgcggccgtcagttctcgcgcttcgaggatctcgacgatcgttatgacctgcgtccgagcgcctggatcaccccgaaaggggagtggggcaaagggaaaatcgaactggttgaaatcccgaccaacgatgaaaccaacgataacatcgtgacttactggacgccggatcagctgccggagccgggcaaggagatgaacttcaagtacaccatcaccttcagccgcgatgaagacaagctgcatgcgccggataacgcttacgttatgcagacccgccgctctaccggcgacgtgaagcagtcgaacctgatccgccagccggacggcaccattgctttcattgtcgacttcaccggcgccgatatgaaaaaactgccggcggataccccggtcgccgcccaagcgagtaccggcgataacgctgaaatcgttgaaaataccgtgcgttacaatccggtgaccaaaggctggcgaatgatcctgcgtttgaaggtgaaagatccgaagaaaacgacggaaatgcgcgccgcgctggttaacggtgatgacacgttgagcgaaacctggagctatcagctgcctgccaatgaataa

SEQ ID NO: 243929 - DNA, 2529 bp, Klebsiella pneumoniae
atgaataagataacaaagtacattgacgcattgccgctgtcggacgccgagaaatcggcgctgccggacaccagcctgcaggccgttcatcaggccctggatgacgaccatcagaccttcgcccgcgaagacgactccccgctggggtcggtcaaggcacggctggcgcatagctggccggattcgctgtctggcgatcagctggtgaaggacgatgaaggccgtactcagctgcatgcgatgcctaaagccaagcgctcctcaatgatcccggacccgtggcgtaccaacccggtcggccgcttctgggaccgtctgcgcggacgcgatgtcacgccgcgctatctctcccgtctgacgcaagaagagcgcgagagtgagcaaaaatggcgtaccgtcggcaccattcgtcgctatatcctgctgctgctgacgctgtcgcagaccgtggtagccacctggtatatgaaaaccattctgccttatcagggctgggcgctgatcaacccggccgacatggtggggcagaacctgtggatctcgttcatgcagctgctgccgtacgtgttgcagagcggcattctgatcctcttcgcggtgctgttctgctgggtttccgccggcttctggaccgcgttaatgggcttcctgcagctattgatcggccgcgataagtacagtatttccgcctcgacggtcggtgacgaaccgttgaacccggcgcaccgtacggcgctgataatgccgatctgtaacgaagacgttgaccgcgttttcgccggcctgcgggcgacctgggagtcggtgaaagcgaccggtaacgccgctcatttcgacgtctatatcctcagcgatagctataaccccgatatctgtgtggctgagcaaaaggcgtggatggagctgattgccgaagtgcagggcgaagggcagatcttctaccgccgccgtcgtcgtcgagtgaagcgtaagagcggcaacatcgatgacttctgccgccgctggggcagccagtatagctatatggtggtgctggacgctgactcggtgatgaccggtgagtgtctgagcagcctggtgcgcctgatggaagcgaacccgaatgccgggatcattcagtcttccccgcgcgcctcgggcatggatacgctgtatgcgcgttgccagcagtttgccacccgggtgtacggtccgctgtttacggcgggtctgcacttctggcagttgggggagtcccactactggggccacaacgccattatccgcgtgaagccgttcattgagcactgcgcgctggcgccgctgccgggcgagggcaactttgccgggtcgatcctgtcgcacgacttcgtcgaagccgcgctgatgcgccgtgccggctggggggtgtggattgcctacgatctgccgggctcctatgaggagctgccgccgaacctgctggacgagctgaaacgcgaccgtcgctggtgtcagggcaacctgatgaacttccgcctgttccttgtcagagggatgcacccggttcaccgggcggtgttccttaccggcgtgatgtcctacctgtcggcgccgctgtggtttatgttccttgccctgtcgacggcgttgcaggtggtgcatgccctgaccgaaccgcagtacttcctgcagccgcgtcagctgttcccggtgtggccgcagtggcggcctgagctggccatcgcgctgttcgcctcgaccatggtgctgctgttcctgccgaagctgctgagtattattctggtgtggtgtaaagggccgaaagagtacggcggatttatccgcgtcacgctttcactgctgctggaggtcctgttctcggtcctgctggcgccggtccgtatgctgttccacacggtcttcgtggtcagcgccttcctcggctgggaggtggtatggaattcgccgcagcgtgatgatgactccacgccgtggggggaagcctttatgcgccacggctcgcagctgctgctggggctggtgtgggcggtcgggatggcatggctggatctgcgcttcctgttctggctggcgccgatcgttgtctcgctgatcctctcgccgttcgtgtcggcgatttccagccgggcgacagtgggcctgcgcaccaagcgctggaagctgttcctgatcccggaagagtattcgccgccgcaggtgctcaaggataccgatgcgtacctgacgatgaaccgtcagcgttcgctggacgatggctttatgcacgcggtgtttaatccgtcgtttaacgccctcgccaccgcaatggccactgcgcgccaccgtcagggtcatatcctggagatcgcccgcgagcgccatgtcgagcaggcgctgaatgaaacgccggataagctgaaccgcgatcgccgactggtgctgttgagcgacccggtaaccatgtcgcgtctgcactatcgcgtatgggccgcgccggagaaatactcttcatgggtgaacgcctatcagcagttggcgcttaacccgctggcgctgaaaacgaaataa

SEQ ID NO: 243930 - DNA, 228 bp, Klebsiella pneumoniae
atgcgaatactaccgatcattgccatggcgctgctgctcagcggctgcggcagcattatcagccgtacggtgcccgggcaggggcgtggcaatcaatattacccgggcgtacagtgggatgttcgcgattcggcatggcgctatctcaccattctcgacctgccgttctcgctggtatttgatacgcttctgctgcctctggacgccagccacggcccctataactga

SEQ ID NO: 243931 - DNA, 387 bp, Klebsiella pneumoniae; identical to SEQ ID NO: 135922

SEQ ID NO: 243932 - DNA, 1227 bp, Klebsiella pneumoniae
atgtcgtctgctgaaacccccattaactggaaacgaaacctgaccgtgacctggcttggctgctttttaaccggcgccgccttcagcctggtcatgccctttctgccactctacgtcgaacagctcggcgtcaccgggcatagcgccctgaacatgtggtccgggctggtctttagtattacctttcttttctccgccatcgcctcgccgttctggggggggcttgctgatcgcaaggggagaaaaatcatgctgctgcgttccgccctcgggatggccatcgtgatgatgctgatgggaatggcgcagaatatctggcagtttctgctgctgcgcgcattgctcggcctgctgggcggttttattcctaacgccaacgccctgatcgccacccagatcccgcgccataaaagcggctgggcgctggggacactgtctaccggcgcggtaagcggcgccctgctcggcccgctggcaggtggcttcctggccgaccactggggattgcgcaccgtcttctttatgaccgcggcggtactatttatctgtttcttgtttaccctgtttttaatccgcgaaaattttgtgccgatcgccaggaaagagatgctcagtgccagagaggtgttctcctcgctgcagaatcccaaactggtgctcagcctgtttgtgacctcgctgataatccaggtggccaccggttccattgcgccgatcctgacgctttatgtacgcgatctcgcgggcaacgtcagtaacatcgcctttatcagcggaatgatcgcctcggtgccgggtattgccgcgctgatgagcgctccgcggctgggcaaactgggggatcgcatcgggccggaaaaaatcctcatcgtcgcgctgattatctcggtgctactcctgatcccgatgtcgttcgttcagaccccgctgcagttaggtatcctgcgattcctgctcggcgccgcggacggcgcgctgctgccggcggtgcaaaccctgctggtgtacaactccaccagccagatctccgggcgaatcttcagctataaccagtcgttccgcgatattggcaacgttaccggccccctgattggcgcgtcggtttccgctaactatggcttccgcgctgtatttctggtcaccgcaggggtggtattgtttaatgcgatctactccaccctcagcctgcgtcggccagccgcggatacttcgcattcagtaaattaa

SEQ ID NO: 243933 - DNA, 921 bp, Klebsiella pneumoniae
atgactcatttgcctaaattttctccggcgctgttgcatccgcgctattggctgctgtggctgggtatcggcctgctgtggctggttgtccaactgccctacccgctgatctaccgcctcgggaacgccatcggccgtctggccatgcgctttatgaagcgccgggcgaaaatcgcctatcgcaatcttgagctctgcttccccgagaaaagcgagcaggaacgccaccgaatggtggtgatgaactttgaatcggtgggcatggggctgatggagaccggtatggcctggttctggccggttcgccgtatcgcccgctggaccgacaccatcggctttgagcatattcgcgatgtgcaggcgcagcagcgcggcattctgctgatcggtattcatttcctcactctcgagatgggagcgcggatgttcggtatgaacgagccggggattggcgtctatcgccccaacgacaacccggtgatcgactggctgcagacctggggccgcttgcgctccaacaaggatatgattgaccgtaaggatctgaaaggcatgatccgggcactgaaaaaaggcgaagtggtgtggtacgcaccggatcacgattacggcccgaccgccagcgtcttcgccccactgtttgcggtcgaccaggcggcgaccacctccggcacctggatgctggcgaaaatgtccaaagcctgcatcgtgcccttcgtcccgcgccgcaaaccggacggtaaaggttatgaactgattatcctgccgccagagtgttccccgccgctggacgacgcggaaaccaccgccgcgtggatgaacaagatcgttgagcagtgcatcatgatggccccggaacagtatatgtggctccatcgtcgcttcaaaacccgccccgaaggcatgccctcccgctactga

SEQ ID NO: 243934 - DNA, 1065 bp, Klebsiella pneumoniae
atgccagtgttacacaaccgcatttcaaatgagacgttaaaggcgcaaatgctggctgagaccgagccgcgcacgacgatctcattctataaatatttcaccattgtcgacccgcaggcgacccgtgatgcgctgtgggttgccttaacccagctgaaggtttttggccgcatctatctggcccgggaagggatcaacgcgcaaatcagcgtgccgcaaagcaacgttgaggctctgcgtgagtttctctatggcttcgatccggcgctgacggggctgcgtttcaatatcgccgtggaggacgatggtaagtctttctgggtgctgcgcctgaaagttcgcgatcgtatcgtcgccgacggcatcgacgatccctcgtttgacgcctccaatgtgggggagtatctcaaggcggcggaagtcaacgcgatgcttgacgatccggatgccgtgtttatcgatatgcgcaaccactatgaatatgaggtgggccatttcgaaaacgcgctggagatcccggcggataccttccgcgaccagctgccgaaagccgtggaaatgatgcaggaccataaagacaagaaaattgtcatgtattgcaccggcggcattcgctgtgaaaaagccagcgcctggatgaagcataacggcttcaataaggtctggcacatcgagggtggcatcatcgagtacgcccgtcgcgcccgcgagcaggggctgccggtgcgtttcattggcaaaaactttgtctttgatgagcggatgggcgagcggatctccaatgacgttatcgcgcactgtcatcagtgcggcgcgccgtgcgacacccatactaactgcctgaacgatggctgccatctgctgtttatccagtgcccgagctgcgccgagaagtttgccggctgctgtagcgaagcctgcatggaagagcataagctaccggaagaggagcagcgtaagctgcgcgccgggcgtgaaaacggcaacaaaatctttaataaatcccgtggccggctgaataccaaactcgggatcctcgacccggagccgtcagaaaaaccataa

SEQ ID NO: 243935 - DNA, 1119 bp, Klebsiella pneumoniae
atgcaatacgatcttatcattattggcagcggctccgtcggcgccgccgctggctattatgcgcgccgtgccggactcaatgttctgatgaccgatgcccatcaacctccccaccaggaaggcagccatcacggcagcagccgtcttatccgtcacgcctatggcgaaggtgagaaatatgttccgctggtgctgcgtgcccagcagctatgggatgaactggcagagatcagtggcgaagccgtgtttgaacgcaccggcgtcattaacctcggccccgccagctccgcttttctcgccaacgtcgccgccagcgcccgtgcgttccagcttgaggtggaagagctggatgcccaggccgtgatgcagcgctggccggagatacgcctccccgatgactatcgggcgattttcgaacccgcttccggcgtactgcgcagcgaactggccgtcgaaacctggatccgtctggcgcgggaagcaggctgcgcgcagctattcaactgtccggtctcggctattcatcaccatgctgacgggatcaccatcgacaccctcgacggtgaatatcatggtaaaaagctgctggtcagcgccggcacctgggtcacccgcctgcttccggacctccctatccagccggtacgcaaggtgttcgcctggtaccaggccgatggccgttacagcagcaagaatcacttcccggccttcaccggcgagttgcccaacggcgatcaatattacggtttcccggcggaagataatgaactgaaaattggcaagcataacggcggccagccgatctccaccccgcaggagcgggtagcgtttggcgctgtcgccagcgatggttccgaatccttcccgtttttgcgtaacgtcctgcctggcatcggcggctgcctgcacggcgcctcctgtacctacgacaataccgtcgatgaggactttattatcgatacgttgccaggcaggccagacacgctgctgatcaccgggctgagcggccacggctttaagtttgcgccggtgctgggcgaaattgccagtcagtttgctcagggcgaagcatcgagcttcaatctggcccccttttctctggcgcgctttaacgcgtaa

SEQ ID NO: 243936 - DNA, 255 bp, Klebsiella pneumoniae
atggaaaaaaataatgaagtcattcagacccatcccctcgttggatgggacatcagcaccgttgatagctacgatgcgctgatgttgcgcctgcactaccagaaccccactcaagaaaacagtaatgatgctgagatcggccagacgctatggctaacgacggacgtcgcacgtcagtttatttcaatcctggaagcaggcattgcgaagattgaatctggcgaataccaggaaaacgagtaccgccgacattaa

SEQ ID NO: 243937 - DNA, 252 bp, Klebsiella pneumoniae; identical to SEQ ID NO: 135915

SEQ ID NO: 243938 - DNA, 1047 bp, Klebsiella pneumoniae
atgacagcacaatcccaggtattgaaaatccgccgcccagacgactggcatatccatctgcgcgatgacgatatgctgaaaaccgtcgtgccttataccagtgagttttatggccgggcgatcgtgatgccgaatctggtgccgcctgtcaccaccgtcgcggcggctatcgcttaccgccagcgcattatggacgccgtgccggccgggcatgattttaccccgctgatgacctgctatctgacagactctctcgacccagcggagctggaacgcggctttaacgaaggggtgttcaccgccgccaagctctacccggccaatgccactactaactccagccacggcgtcaccagcaccgacgccattatgccagtgctggagcggatggaaaaacttgggatgccgttgctcgttcacggcgaagtcactcacgccgagattgatattttcgatcgcgaagcgcgctttattgagacggtgatggagcccctgcgccagcgcctgcccggcctgaaagtggtttttgaacatatcaccaccaaagacgccgccgagtacgtgcgtgacggtaatgaactgctggctgctaccatcaccccgcagcatctgatgttcaaccgcaaccatatgctggtgggcggcattcgccctcacctgtactgtctgccggtacttaaacgcaatattcatcagcaggctctgcgggagctggtcgccagcggcttcagccgcgccttcctcggcaccgactccgcaccgcacgcccgccaccgtaaggaagccagctgtggctgcgccggctgctttaacgccccgaccgccctcggcagctacgccacggtgtttgaagaaatgaacgctctgcagcactttgaggctttctgctcgctaaacggcccgcgcttctacggtctgccggtcaatgagaactacgttgaactggtgcgtgaagagacgaccgttgtggacagcattgccctgcctaatgacaccctggtgcccttcctggcgggtgaaaccgttcgctggaccgtgaagaaataa

SEQ ID NO: 243939 - DNA, 561 bp, Klebsiella pneumoniae; identical to SEQ ID NO: 135913

SEQ ID NO: 243940 - DNA, 1209 bp, Klebsiella pneumoniae
atgtcccgcgtctcgcaggcaaggagcctgggtaaatatttcctgttagtcgataacatgctggtcgtgctgggcttttttgtcgtttttccgctgatttccatccgctttgtcgatcagatgggctgggcagcgctgatggtcggcattgcgctcggcctgcgccagctggtacagcagggattaggcatctttggcggcgccatcgccgaccgcttcggcgcgaaaccgatgatcgtcaccggtatgctgatgcgtgccggcggtttcgcggcgatggccgtcgcccatgagccgtgggtgctgtggttctcgtgcatactctccggactcggcggtacactgttcgatccgccgcgggcggcgctggtggttaagctggtgcgtccgcatcagcgcggccgctttttctccatcctgatgatgcaggatagcgccggcgcggtgattggcgcgctgctgggcagctggctgctgcagtatgattttcgcctggtgtgcagcgccggcgccgcgctgtttatcgcctgcgccgcgtttaacgcctggtatctgccggcatggaagctctcgacggtgaaaacgccgattcgcgagggtctgggccgggtgctgcgggacaaacgcttcgtcacctatgtcctgacgctgaccggctattatatgctggcggtgcaggtgatgctgatgctgccgatcatggtgaatgatatcgccggctcgccggccgccgtgaaatggatgtacgccatcgaagccaccatttcgctcaccctgctctatcctattgcccgttggagcgaaaaacgcttccgccttgagcaccggctgatggccggtctgctggtgatgaccctggccatgctccccatcgggatgaccagcagtttacagcagctgtttaccctgatttgcctgttttacatcggctctatcattgccgaacccgcccgcgagacgctgggcgcttcgctggcggacgcccgggcgcgtggcagctatatgggtttcagccgtctggggctcgccttcggcggcgcgctgggttacgcgggcggcggctggctgtttgatgccgggaaagccgtcggccagcccgaactgccgtggctgatgctcggcgccatcggggttatcaccttcctggcgctatggtggcaattcagtccgaaacgctctgcctccggtatgctggagccgcgcacctga

SEQ ID NO: 243941 - DNA, 624 bp, Klebsiella pneumoniae; identical to SEQ ID NO: 135911

SEQ ID NO: 243942 - DNA, 654 bp, Klebsiella pneumoniae
atgaaatatcagttaactgcgcatgaagcgcgcgtcattggctgcctgctggaaaagcaggtcaccacccccgagcagtatccgctgtcggtaaatgccgtggtgaccgcctgcaatcagaaaaccaaccgcgagccagtgatgtcgctgagcgaaagcgaggtccaggccctgctggatacgctggtgaaacggcactatctgcgcacggtcagcggattcggtaatcgcgtcaccaagtatgaacagcgcttttgcaactccgaatttggcgatctgaagcttagcgccggcgaggttgcggtggtcacgacgctgctgctgcgcggtgctcagacgccgggcgaactacgcagtcgggcgcagcggatgtatgagttcagcgatatggcggaagtggaaagcgtgctggaagggctggcgacgcgcgaagatggccccttcgtcgcccggctgccccgggagccgggaaaacgggaaagccgctatatgcatctgttttgcgacgatatggacacgctgatcaccacagtggaagctctcgcgccgctggacgatgacggcgatctgcgcgccagggttgaagcgctggagggcgaggtggcggagctgaaagcgcgcctcgattcgctgttacaccatctgggagactaa

SEQ ID NO: 243943 - DNA, 924 bp, Klebsiella pneumoniae; identical to SEQ ID NO: 231389
